United States Patent Application Publication US 2011/0183924 A1 - sequence listing, part 139

SEQ ID NO: 369978 - DNA, 2705 bp, Homo sapiens
ggtcttgaactcctggcctcaagtgatcctcccacctcagcctcccaaagctctgggattataggtgtgagccactgcacccagctacctacatgatctcctaattcccactaaatcctgagactacaaggtactgatcatttcagatgttccctcaaagtcatctgaaaaactgctttctaggaacactcttattttgttatatgagatccagccatgcaataggttccaatttgtgtttcaggatggctgacttcaggctgcggaaactgaaggcaataatgttggcttttggaaggggcaagacgagaaactctgaagaaagctctgactctcaggaagttatctggaaagatacctggatgtttactgccttgggacactgtgggatctccatgtttggactatgggacagagaattgaccctaactaactatgaactatttatttcctcctcccctacccctagttaagtgccacaaagactgtgttatgtagtcagtacttttctcatgtatctttctctagaccatttatatacgggtgaaatgaaagcttttttgcatgtacttgatactcagtctgtaaactcagacttcgctttttttgtgagactatcctttcaatatttttataaacttttgtgtgtgctgtggcagggaacagttaacaaggagtttatttagaggggtttttttcattttttgtttttcttgttttgttttgttttgttttgttcttcttggtgtgctttttggatgggaccagaacttaacattttcctgaggactaggaagctcatcagacactggaatgcagtgattcttctaatgatggtcaactgcaaggagaaactgtttacatccttcccactacacagttgctatgatatgtaacaagtcacacatgtatatatcacacaagtcttaccaattctgcgtcactaggaagctatagcatggtcgtgaaagctctcctaatacttacttaaatagccatggaagaaaattatgcttgtcccttctgactgggttaagccatctttcttaagattcctgaagtagaaatagcaattaagaaattaattcaagttttgacggttaacatttagcagaaaaacaaaccattgaataagctactaggtgaaatgcaaaacaaccatcaatttttttaaactcaataattttgtgaaaaaaaaaaccaccaccaaacttttggttgtaaaagagaacccttgttcccttcctaagaaactgccttccacaattaaagaatactcatagaaagaaaataatcataaatcatatttgattaacatttcatttaagcttttaaaatatcaattttttaaatagctcccatttacccaaaataactagttatgggtctatttcttccatgattagaggagagagaacttgattcaagatactgaaaaatagagctgggactgagcctgtgaatgacaggaatgatctattaccaggtgactagtcggaaactacacagaggtgcactggtctgcatttgggggctaaagtgtatatattccatttaaaatggaatttgtttgtatttggggcagtcttcagtaaagcctttctcctttcttttctccattgaggacagttctgctcagcaaaattgttgagtacctgttctgggcaggtcccacgctatatgcacaaagttaagaaaaacttggtcttagcccttgggagctgacagcccatgggcattaaggcaaagtagttccagtgatttaaaatacggttccaaatacgctaaaaccaacttgtgccaaccagatttacagattggaaatactgcagatgatgtgaagttatcagttggaggagctgtgattaagctggataataagagaacgtgccatctgtaaagcactcagaaggcagccatccctagatgttggtttcatgtatattacactatctactactatccataaatgcaataatatgcatgttaacaacattaaaaacagcaaacagcaatctaagtacagaaaagctttttgtgtgtttaaaaaaattgaagaaaattcaggaagaaacgtgttaataaacattgtactgttcttttgcttctcaaaggaattattcacttgccactttggttatttttgagttttcgtacataggaagttttatattgccagccttcctgtgataaagatattaaatgtaacttgagtaaaaaataaaaaagaataactatgtatatacatatataaattacatatgggcctgtatattgtgtgtgtatatacacagtaagtcctcatttgtccatagattcttggaaactgctactttaacaacttttttttctcatcaacgttgtaatgaaaggaaattgaatgaaattaccttgtggaggaccagtttgaacacttcatttgacttaaagttgctatttccaagaatctacagaccatgttaagtgaggacttacttactgtatacacacacacacacacacacacacacgcacacccccctattattactttgctgaagactaatttaagtctataacaaaactgccttataattatgattatatcatttactgacaaccagtgactctgatgtttccaatctatcaatttcccatcatcagtaaaataaaataggcaaatccacgatggggcaaaaagaacaatcacaattgactcctcctca

SEQ ID NO: 369979 - DNA, 3849 bp, Homo sapiens
ttgagctcaaagcttagcagcttcaatgttgttgttaggcataaacagcttgcaaatttcaattttttttctctcctcacttttgaactagatttgggcaatggaggtgatgacagcattttagaagacagaacaggaattctaggtgtttaggcacgttgaagagaaacttgctagaggtgatgaagtggaaagaaaaagacaattcactatagggatcaacattattgcagttctgcaaaggatattttcttttaaaacatccatatctcttctttgccatggaaactacacccaatctacctgaacctgcggcacccctctgatgacccatttggattctctgatttcactgccaagattctcagttctccaaaatacttatcattcaggttgaataaaccagttctacagactgcttcttccatgcatttcccaatgatgctaactgcccttaaaattctttcagatttggaactgtatctgtatggaaacaacagagttttcttgaagtacaactaaggacaggtcaccactaggcactaacatcgctgacttgcatgattatggagatggtctatctgatgctgaaaatgtctctagttttttgacaacggctaaataaccatgggatcaagtggccttgggaaagcagcaacattagatgaactgctgtgcacttgcattgagatgtttgatgacaatggagagctggataatagttatttgccaagaatagttctactgatgcaccgatggtatttatcttccactgaattggcagaaaaacttctctgcatgtatcgaaatgccactggagaaagctgcaatgaatttcgattaaagatctgctacttcatgaggtactggattctgaagtttcctgcagagtttaatttggatcttggtttgattcgtatgactgaggaatttcgggaagtagctagtcaactaggatatgaaaaacacgtcagcctcatcgacatatccagcattccttcctatgactggatgagaagagtcacacagaggaaaaaagtatccaagaagggaaaagcctgtctgctgtttgaccatctggagcccattgaattggctgagcacctcacttttctggagcataaatcttttagaaggatctcattcactgattaccaaagctatgtcatccatggctgcctggagaataatccaaccttggaaagatcgattgctttatttaatggaatctctaagtgggtccagttgatggttcttagcaaaccaaccccccagcaaagggcagaagtcatcacaaagtttatcaatgttgcaaagaagctccttcagctcaaaaattttaacaccctgatggcagtggtgggaggcctcagtcatagttccatttcacgcctcaaagagacccattctcatctttcttcagaagttacaaagaactggaatgaaatgacagagttggtctcctccaacggcaattactgcaattaccgcaaggcctttgccgactgcgatggcttcaaaatccccatccttggagtacacttgaaagacttgatagctgtccatgtcattttcccagactggacagaggagaacaaagtgaacattgtgaaaatgcaccagctctccgttaccctgagtgaactagtctccctgcagaatgcctctcaccacttagaacccaacatggatttgatcaacctgctcacgctttccctggacctctatcacactgaagatgatatttacaaactgtcactggtgctggagcctagaaattctaaatcgcagcctacctcccctacgacgcccaacaagcctgtggtacccctggagtgggcattaggggtgatgccaaagccagaccccacggtcatcaacaagcacataaggaaattagtggagtctgtatttagaaactatgatcacgaccatgatgggtacatttcccaagaggactttgaaagtatagctgccaattttcccttcttggattccttctgtgttctggacaaagatcaggatggcctaattagtaaagatgaaatgatggcttacttcctgagagctaaatcccaactacactgtaaaatgggaccaggatttatccataattttcaggagatgacctatctcaagccaaccttctgcgaacactgtgcgggatttctctggggcataatcaagcaaggatacaaatgcaaagactgtggagccaattgtcacaaacagtgcaaagacctcctggttctggcctgcaggagatttgcccgggcgccctccttgagcagtggtcatgggtcactgcctggaagcccctcgctgcccccagcgcaggatgaggtgtttgagttccctggagtcactgctggacacagggatttagacagcagagccatcacactggttacaggctcttctcgcaagatctctgtgaggctacagagggccaccaccagccaggccacccagactgaacctgtctggtcagaggctggctggggggactcggggtcccacaccttccctaaaatgaaatccaagttccatgacaaagcagcaaaggacaaaggctttgccaaatgggaaaatgagaagcccagggtgcatgctggtgtggatgttgtagaccggggcacggagtttgaacttgaccaggatgaaggagaagagaccagacaggatggtgaggatggctgacttcaggctgcggaaactgaaggcaataatgttggcttttggaaggggcaagacgagaaactctgaagaaagctctgactctcaggaagttatctggaaagatacctggatgtttactgccttgggacactgtgggatctccatgtttggactatgggacagagaattgaccctaactaactatgaactatttatttcctcctcccctacccctagttaagtgccacaaagactgtgttatgtagtcagtacttttctcatgtatctttctctagaccatttatatacgggtgaaatgaaagcttttttgcatgtacttgatactcagtctgtaaactcagacttcgctttttttgtgagactatcctttcaatatttttataaacttttgtgtgtgctgtggcagggaacagttaacaaggagtttatttagaggggtttttttcattttttgtttttcttgttttgttttgttttgttttgttcttcttggtgtgctttttggatgggaccagaacttaacattttcctgaggactaggaagctcatcagacactggaatgcagtgattcttctaatgatggtcaactgcaaggagaaactgtttacatccttcccactacacagttgctatgatatgtaacaagtcacacatgtatatatcacacaagtcttaccaattctgcgtcactaggaagctatagcatggtcgtgaaagctctcctaatacttacttaaatagccatggaagaaaattatgcttgtcccttctgactgggttaagccatctttcttaagattcctgaagtagaaatagcaattaagaaattaattcaagttttgacggttaacatttagcagaaaaacaaaccattgaataagctactaggtgaaatgcaaaacaaccatcaatttttttaaactcaataattttgtgaaaaactgccttccacaattaaagaatactcatagaaagaaaataatcataaatcatatttgattaacatttcatttaagcttttaaaatatcaattttttaaatagctcccatttacccaaaataactagttatgggtctatttcttccatgattagaggagacttgatcgatctgtggactggactgacctggattgacagatgtctatc

SEQ ID NO: 369980 - DNA, 2048 bp, Homo sapiens
ttgagctcaaagcttagcagcttcaatgttgttgttaggcataaacagcttgcaaatttcaattttttttctctcctcacttttgaactagatttgggcaatggaggtgatgacagcattttagaagacagaacaggaattctaggtgtttaggcacgttgaagagaaacttgctagaggtgatgaagtggaaagaaaaagacaattcactatagggatcaacattattgcagttctgcaaaggatattttcttttaaaacatccatatctcttctttgccatggaaactacacccaatctacctgaacctgcggcacccctctgatgacccatttggattctctgatttcactgccaagattctcagttctccaaaatacttatcattcaggttgaataaaccagttctacagactgcttcttccatgcatttcccaatgatgctaactgcccttaaaattctttcagatttggaactgtatctgtatggaaacaacagagttttcttgaagtacaactaaggacaggtcaccactaggcactaacatcgctgacttgcatgattatggagatggtctatctgatgctgaaaatgtctctagttttttgacaacggctaaataaccatgggatcaagtggccttgggaaagcagcaacattagatgaactgctgtgcacttgcattgagatgtttgatgacaatggagagctggataatagttatttgccaagaatagttctactgatgcaccgatggtatttatcttccactgaattggcagaaaaacttctctgcatgtatcgaaatgccactggagaaagctgcaatgaatttcgattaaagatctgctacttcatgaggtactggattctgaagtttcctgcagagtttaatttggatcttggtttgattcgtatgactgaggaatttcgggaagtagctagtcaactaggatatgaaaaacacgtcagcctcatcgacatatccagcattccttcctatgactggatgagaagagtcacacagaggaaaaaagtatccaagaagggaaaagcctgtctgctgtttgaccatctggagcccattgaattggctgagcacctcacttttctggagcataaatcttttagaaggatctcattcactgattaccaaagctatgtcatccatggctgcctggagaataatccaaccttggaaagatcgattgctttatttaatggaatctctaagtgggtccagttgatggttcttagcaaaccaaccccccagcaaagggcagaagtcatcacaaagtttatcaatgttgcaaagaagctccttcagctcaaaaattttaacaccctgatggcagtggtgggaggcctcagtcatagttccatttcacgcctcaaagagacccattctcatctttcttcagaagttacaaagaactggaatgaaatgacagagttggtctcctccaacggcaattactgcaattaccgcaaggcctttgccgactgcgatggcttcaaaatccccatccttggagtacacttgaaagacttgatagctgtccatgtcattttcccagactggacagaggagaacaaagtgaacattgtgaaaatgcaccagctctccgttaccctgagtgaactagtctccctgcagaatgcctctcaccacttagaacccaacatggatttgatcaacctgctcacgctttccctggacctctatcacactgaagatgatatttacaaactgtcactggtgctggagcctagaaattctaaatcgcagcctacctcccctacgacgcccaacaagcctgtggtacccctggagtgggcattaggggtgatgccaaagccagaccccacggtcatcaacaagcacataaggaaattagtggaggtaagtggttgagggagaataaagagagggcactagaagaccctttctctttccagaatgttctgcgattgtccaggaatctgatggaacccctgaaaacaaccctctggcagcctgggagacagagtgagactccgtctgaa

SEQ ID NO: 369981 - DNA, 1792 bp, Homo sapiens
ttgagctcaaagcttagcagcttcaatgttgttgttaggcataaacagcttgcaaatttcaattttttttctctcctcacttttgaactagatttgggcaatggaggtgatgacagcattttagaagacagaacaggaattctaggtgtttaggcacgttgaagagaaacttgctagaggtgatgaagtggaaagaaaaagacaattcactatagggatcaacattattgcagttctgcaaaggatattttcttttaaaacatccatatctcttctttgccatggaaactacacccaatctacctgaacctgcggcacccctctgatgacccatttggattctctgatttcactgccaagattctcagttctccaaaatacttatcattcaggttgaataaaccagttctacagactgcttcttccatgcatttcccaatgatgctaactgcccttaaaattctttcagatttggaactgtatctgtatggaaacaacagagttttcttgaagtacaactaaggacaggtcaccactaggcactaacatcgctgacttgcatgattatggagatggtctatctgatgctgaaaatgtctctagttttttgacaacggctaaataaccatgggatcaagtggccttgggaaagcagcaacattagatgaactgctgtgcacttgcattgagatgtttgatgacaatggagagctggataatagttatttgccaagaatagttctactgatgcaccgatggtatttatcttccactgaattggcagaaaaacttctctgcatgtatcgaaatgccactggagaaagctgcaatgaatttcgattaaagatctgctacttcatgaggtactggattctgaagtttcctgcagagtttaatttggatcttggtttgattcgtatgactgaggaatttcgggaagtagctagtcaactaggatatgaaaaacacgtcagcctcatcgacatatccagcattccttcctatgactggatgagaagagtcacacagaggaaaaaagtatccaagaagggaaaagcctgtctgctgtttgaccatctggagcccattgaattggctgagcacctcacttttctggagcataaatcttttagaaggatctcattcactgattaccaaagctatgtcatccatggctgcctggagaataatccaaccttggaaagatcgattgctttatttaatggaatctctaagtgggtccagttgatggttcttagcaaaccaaccccccagcaaagggcagaagtcatcacaaagtttatcaatgttgcaaagaagctccttcagctcaaaaattttaacaccctgatggcagtggtgggaggcctcagtcatagttccatttcacgcctcaaagagacccattctcatctttcttcagaagttacaaagaactggaatgaaatgacagagttggtctcctccaacggcaattactgcaattaccgcaaggcctttgccgactgcgatggcttcaaaatccccatccttggagtacacttgaaagacttgatagctgtccatgtcattttcccagactggacagaggagaacaaagtgaacattgtgaaaatgcaccagctctccgttaccctgagtgaactagtctccctgcagaatgcctctcaccacttagaacccaacatggatttgatcaacctgctcacgggaatatctggagaggacatttgccttacatcccaattcacgtaaccaggagttttaaaagctgatgtttctgttgcgtggg

SEQ ID NO: 369982 - DNA, 928 bp, Homo sapiens
ccagtctccccctctgcgcacacacacacgcaaacacatttaactttccacttgcagtgacctgcccttcagtgtgacttatcagctgtttggcttttgtcactaaaggaaaacaaattgtggaatatcccgctctgcatgctcatgagatggctgagccaactcaggggttatgaggtggtttgcgagtgaggagaagaatgatcttcagtttctgacctcctggcacggtggcgggcggtatttatcaggaggtacatgtgactggttaagactcagagccccagcttgaaggaaacagctgctctcggcgtgctccggcacttggcagctggacaggcagagtgctgatgtgaaaaataccacgacaaaaccaccctagttctccaaaatacttatcattcaggttgaataaaccagttctacagactgcttcttccatgcatttcccaatgatgctaactgcccttaaaattctttcagatttggaactgtatctgtatggaaacaacagagttttcttgaagtacaactaaggacaggtcaccactaggcactaacatcgctgacttgcatgattatggagatggtctatctgatgctgaaaatgtctctagttttttgacaacggctaaataaccatgggatcaagtggccttgggaaagcagcaacattagatgaactgctgtgcacttgcattgagatgtttgatgacaatggagagctggataatagttatttgccaagaatagttctactgatgcaccgatggtatttatcttccactgaattggcagaaaaacttctctgcatatatcttttcaactactgtgtaatttttacaatcataaatcaagctctgtatttagatagagtgtctatccaaagccagtaaattaagatgaataaatagtctttggttatcca

SEQ ID NO: 369983 - DNA, 4308 bp, Homo sapiens
gataccctttacactagattagcaggcaaaactatgatggtttgtgatatccatgcttgtagaagtaataagaagaaagggaacacagaagctttattttatagtggagtcctgactctaggccttaataattgcatggttttggagttttcttgaagtacaactaaggacaggtcaccactaggcactaacatcgctgacttgcatgattatggagatggtctatctgatgctgaaaatgtctctagttttttgacaacggctaaataaccatgggatcaagtggccttgggaaagcagcaacattagatgaactgctgtgcacttgcattgagatgtttgatgacaatggagagctggataatagttatttgccaagaatagttctactgatgcaccgatggtatttatcttccactgaattggcagaaaaacttctctgcatgtatcgaaatgccactggagaaagctgcaatgaatttcgattaaagatctgctacttcatgaggtactggattctgaagtttcctgcagagtttaatttggatcttggtttgattcgtatgactgaggaatttcgggaagtagctagtcaactaggatatgaaaaacacgtcagcctcatcgacatatccagcattccttcctatgactggatgagaagagtcacacagaggaaaaaagtatccaagaagggaaaagcctgtctgctgtttgaccatctggagcccattgaattggctgagcacctcacttttctggagcataaatcttttagaaggatctcattcactgattaccaaagctatgtcatccatggctgcctggagaataatccaaccttggaaagatcgattgctttatttaatggaatctctaagtgggtccagttgatggttcttagcaaaccaaccccccagcaaagggcagaagtcatcacaaagtttatcaatgttgcaaagaagctccttcagctcaaaaattttaacaccctgatggcagtggtgggaggcctcagtcatagttccatttcacgcctcaaagagacccattctcatctttcttcagaagttacaaagaactggaatgaaatgacagagttggtctcctccaacggcaattactgcaattaccgcaaggcctttgccgactgcgatggcttcaaaatccccatccttggagtacacttgaaagacttgatagctgtccatgtcattttcccagactggacagaggagaacaaagtgaacattgtgaaaatgcaccagctctccgttaccctgagtgaactagtctccctgcagaatgcctctcaccacttagaacccaacatggatttgatcaacctgctcacgctttccctggacctctatcacactgaagatgatatttacaaactgtcactggtgctggagcctagaaattctaaatcgcagcctacctcccctacgacgcccaacaagcctgtggtacccctggagtgggcattaggggtgatgccaaagccagaccccacggtcatcaacaagcacataaggaaattagtggagtctgtatttagaaactatgatcacgaccatgatgggtacatttcccaagaggactttgaaagtatagctgccaattttcccttcttggattccttctgtgttctggacaaagatcaggatggcctaattagtaaagatgaaatgatggcttacttcctgagagctaaatcccaactacactgtaaaatgggaccaggatttatccataattttcaggagatgacctatctcaagccaaccttctgcgaacactgtgcgggatttctctggggcataatcaagcaaggatacaaatgcaaagactgtggagccaattgtcacaaacagtgcaaagacctcctggttctggcctgcaggagatttgcccgggcgccctccttgagcagtggtcatgggtcactgcctggaagcccctcgctgcccccagcgcaggatgaggtgtttgagttccctggagtcactgctggacacagggatttagacagcagagccatcacactggttacaggctcttctcgcaagatctctgtgaggctacagagggccaccaccagccaggccacccagactgaacctgtctggtcagaggctggctggggggactcggggtcccacaccttccctaaaatgaaatccaagttccatgacaaagcagcaaaggacaaaggctttgccaaatgggaaaatgagaagcccagggtgcatgctggtgtggatgttgtagaccggggcacggagtttgaacttgaccaggatgaaggagaagagaccagacaggatggtgaggatggctgacttcaggctgcggaaactgaaggcaataatgttggcttttggaaggggcaagacgagaaactctgaagaaagctctgactctcaggaagttatctggaaagatacctggatgtttactgccttgggacactgtgggatctccatgtttggactatgggacagagaattgaccctaactaactatgaactatttatttcctcctcccctacccctagttaagtgccacaaagactgtgttatgtagtcagtacttttctcatgtatctttctctagaccatttatatacgggtgaaatgaaagcttttttgcatgtacttgatactcagtctgtaaactcagacttcgctttttttgtgagactatcctttcaatatttttataaacttttgtgtgtgctgtggcagggaacagttaacaaggagtttatttagaggggtttttttcattttttgtttttcttgttttgttttgttttgttttgttcttcttggtgtgctttttggatgggaccagaacttaacattttcctgaggactaggaagctcatcagacactggaatgcagtgattcttctaatgatggtcaactgcaaggagaaactgtttacatccttcccactacacagttgctatgatatgtaacaagtcacacatgtatatatcacacaagtcttaccaattctgcgtcactaggaagctatagcatggtcgtgaaagctctcctaatacttacttaaatagccatggaagaaaattatgcttgtcccttctgactgggttaagccatctttcttaagattcctgaagtagaaatagcaattaagaaattaattcaagttttgacggttaacatttagcagaaaaacaaaccattgaataagctactaggtgaaatgcaaaacaaccatcaatttttttaaactcaataattttgtgaaaaaaaaaaccaccaccaaacttttggttgtaaaagagaacccttgttcccttcctaagaaactgccttccacaattaaagaatactcatagaaagaaaataatcataaatcatatttgattaacatttcatttaagcttttaaaatatcaattttttaaatagctcccatttacccaaaataactagttatgggtctatttcttccatgattagaggagagagaacttgattcaagatactgaaaaatagagctgggactgagcctgtgaatgacaggaatgatctattaccaggtgactagtcggaaactacacagaggtgcactggtctgcatttgggggctaaagtgtatatattccatttaaaatggaatttgtttgtatttggggcagtcttcagtaaagcctttctcctttcttttctccattgaggacagttctgctcagcaaaattgttgagtacctgttctgggcaggtcccacgctatatgcacaaagttaagaaaaacttggtcttagcccttgggagctgacagcccatgggcattaaggcaaagtagttccagtgatttaaaatacggttccaaatacgctaaaaccaacttgtgccaaccagatttacagattggaaatactgcagatgatgtgaagttatcagttggaggagctgtgattaagctggataataagagaacgtgccatctgtaaagcactcagaaggcagccatccctagatgttggtttcatgtatattacactatctactactatccataaatgcaataatatgcatgttaacaacattaaaaacagcaaacagcaatctaagtacagaaaagctttttgtgtgtttaaaaaaattgaagaaaattcaggaagaaacgtgttaataaacattgtactgttcttttgcttctcaaaggaattattcacttgccactttggttatttttgagttttcgtacataggaagttttatattgccagccttcctgtgataaagatattaaatgtaacttgagta

SEQ ID NO: 369984 - DNA, 5166 bp, Homo sapiens
ccagtctccccctctgcgcacacacacacgcaaacacatttaactttccacttgcagtgacctgcccttcagtgtgacttatcagctgtttggcttttgtcactaaaggaaaacaaattgtggaatatcccgctctgcatgctcatgagatggctgagccaactcaggggttatgaggtggtttgcgagtgaggagaagaatgatcttcagtttctgacctcctggcacggtggcgggcggtatttatcaggaggtacatgtgactggttaagactcagagccccagcttgaaggaaacagctgctctcggcgtgctccggcacttggcagctggacaggcagagtgctgatgtgaaaaataccacgacaaaaccaccctagttctccaaaatacttatcattcaggttgaataaaccagttctacagactgcttcttccatgcatttcccaatgatgctaactgcccttaaaattctttcagatttggaactgtatctgtatggaaacaacagagttttcttgaagtacaactaaggacaggtcaccactaggcactaacatcgctgacttgcatgattatggagatggtctatctgatgctgaaaatgtctctagttttttgacaacggctaaataaccatgggatcaagtggccttgggaaagcagcaacattagatgaactgctgtgcacttgcattgagatgtttgatgacaatggagagctggataatagttatttgccaagaatagttctactgatgcaccgatggtatttatcttccactgaattggcagaaaaacttctctgcatgtatcgaaatgccactggagaaagctgcaatgaatttcgattaaagatctgctacttcatgaggtactggattctgaagtttcctgcagagtttaatttggatcttggtttgattcgtatgactgaggaatttcgggaagtagctagtcaactaggatatgaaaaacacgtcagcctcatcgacatatccagcattccttcctatgactggatgagaagagtcacacagaggaaaaaagtatccaagaagggaaaagcctgtctgctgtttgaccatctggagcccattgaattggctgagcacctcacttttctggagcataaatcttttagaaggatctcattcactgattaccaaagctatgtcatccatggctgcctggagaataatccaaccttggaaagatcgattgctttatttaatggaatctctaagtgggtccagttgatggttcttagcaaaccaaccccccagcaaagggcagaagtcatcacaaagtttatcaatgttgcaaagaagctccttcagctcaaaaattttaacaccctgatggcagtggtgggaggcctcagtcatagttccatttcacgcctcaaagagacccattctcatctttcttcagaagttacaaagaactggaatgaaatgacagagttggtctcctccaacggcaattactgcaattaccgcaaggcctttgccgactgcgatggcttcaaaatccccatccttggagtacacttgaaagacttgatagctgtccatgtcattttcccagactggacagaggagaacaaagtgaacattgtgaaaatgcaccagctctccgttaccctgagtgaactagtctccctgcagaatgcctctcaccacttagaacccaacatggatttgatcaacctgctcacgctttccctggacctctatcacactgaagatgatatttacaaactgtcactggtgctggagcctagaaattctaaatcgcagcctacctcccctacgacgcccaacaagcctgtggtacccctggagtgggcattaggggtgatgccaaagccagaccccacggtcatcaacaagcacataaggaaattagtggagtctgtatttagaaactatgatcacgaccatgatgggtacatttcccaagaggactttgaaagtatagctgccaattttcccttcttggattccttctgtgttctggacaaagatcaggatggcctaattagtaaagatgaaatgatggcttacttcctgagagctaaatcccaactacactgtaaaatgggaccaggatttatccataattttcaggagatgacctatctcaagccaaccttctgcgaacactgtgcgggatttctctggggcataatcaagcaaggatacaaatgcaaagactgtggagccaattgtcacaaacagtgcaaagacctcctggttctggcctgcaggagatttgcccgggcgccctccttgagcagtggtcatgggtcactgcctggaagcccctcgctgcccccagcgcaggatgaggtgtttgagttccctggagtcactgctggacacagggatttagacagcagagccatcacactggttacaggctcttctcgcaagatctctgtgaggctacagagggccaccaccagccaggccacccagactgaacctgtctggtcagaggctggctggggggactcggggtcccacaccttccctaaaatgaaatccaagttccatgacaaagcagcaaaggacaaaggctttgccaaatgggaaaatgagaagcccagggtgcatgctggtgtggatgttgtagaccggggcacggagtttgaacttgaccaggatgaaggagaagagaccagacaggatggtgaggatggctgacttcaggctgcggaaactgaaggcaataatgttggcttttggaaggggcaagacgagaaactctgaagaaagctctgactctcaggaagttatctggaaagatacctggatgtttactgccttgggacactgtgggatctccatgtttggactatgggacagagaattgaccctaactaactatgaactatttatttcctcctcccctacccctagttaagtgccacaaagactgtgttatgtagtcagtacttttctcatgtatctttctctagaccatttatatacgggtgaaatgaaagcttttttgcatgtacttgatactcagtctgtaaactcagacttcgctttttttgtgagactatcctttcaatatttttataaacttttgtgtgtgctgtggcagggaacagttaacaaggagtttatttagaggggtttttttcattttttgtttttcttgttttgttttgttttgttttgttcttcttggtgtgctttttggatgggaccagaacttaacattttcctgaggactaggaagctcatcagacactggaatgcagtgattcttctaatgatggtcaactgcaaggagaaactgtttacatccttcccactacacagttgctatgatatgtaacaagtcacacatgtatatatcacacaagtcttaccaattctgcgtcactaggaagctatagcatggtcgtgaaagctctcctaatacttacttaaatagccatggaagaaaattatgcttgtcccttctgactgggttaagccatctttcttaagattcctgaagtagaaatagcaattaagaaattaattcaagttttgacggttaacatttagcagaaaaacaaaccattgaataagctactaggtgaaatgcaaaacaaccatcaatttttttaaactcaataattttgtgaaaaaaaaaaccaccaccaaacttttggttgtaaaagagaacccttgttcccttcctaagaaactgccttccacaattaaagaatactcatagaaagaaaataatcataaatcatatttgattaacatttcatttaagcttttaaaatatcaattttttaaatagctcccatttacccaaaataactagttatgggtctatttcttccatgattagaggagagagaacttgattcaagatactgaaaaatagagctgggactgagcctgtgaatgacaggaatgatctattaccaggtgactagtcggaaactacacagaggtgcactggtctgcatttgggggctaaagtgtatatattccatttaaaatggaatttgtttgtatttggggcagtcttcagtaaagcctttctcctttcttttctccattgaggacagttctgctcagcaaaattgttgagtacctgttctgggcaggtcccacgctatatgcacaaagttaagaaaaacttggtcttagcccttgggagctgacagcccatgggcattaaggcaaagtagttccagtgatttaaaatacggttccaaatacgctaaaaccaacttgtgccaaccagatttacagattggaaatactgcagatgatgtgaagttatcagttggaggagctgtgattaagctggataataagagaacgtgccatctgtaaagcactcagaaggcagccatccctagatgttggtttcatgtatattacactatctactactatccataaatgcaataatatgcatgttaacaacattaaaaacagcaaacagcaatctaagtacagaaaagctttttgtgtgtttaaaaaaattgaagaaaattcaggaagaaacgtgttaataaacattgtactgttcttttgcttctcaaaggaattattcacttgccactttggttatttttgagttttcgtacataggaagttttatattgccagccttcctgtgataaagatattaaatgtaacttgagtaaaaaataaaaaagaataactatgtatatacatatataaattacatatgggcctgtatattgtgtgtgtatatacacagtaagtcctcatttgtccatagattcttggaaactgctactttaacaacttttttttctcatcaacgttgtaatgaaaggaaattgaatgaaattaccttgtggaggaccagtttgaacacttcatttgacttaaagttgctatttccaagaatctacagaccatgttaagtgaggacttacttactgtatacacacacacacacacacacacacacgcacacccccctattattactttgctgaagactaatttaagtctataacaaaactgccttataattatgattatatcatttactgacaaccagtgactctgatgtttccaatctatcaatttcccatcatcagtaaaataaaataggcaaatccacgatggggcaaaaagaacaatcacaattgactcctcctca

SEQ ID NO: 369985 - DNA, 4466 bp, Homo sapiens
ttgagctcaaagcttagcagcttcaatgttgttgttaggcataaacagcttgcaaatttcaattttttttctctcctcacttttgaactagatttgggcaatggaggtgatgacagcattttagaagacagaacaggaattctaggtgtttaggcacgttgaagagaaacttgctagaggtgatgaagtggaaagaaaaagacaattcactatagggatcaacattattgcagttctgcaaaggatattttcttttaaaacatccatatctcttctttgccatggaaactacacccaatctacctgaacctgcggcacccctctgatgacccatttggattctctgatttcactgccaagattctcagttctccaaaatacttatcattcaggttgaataaaccagttctacagactgcttcttccatgcatttcccaatgatgctaactgcccttaaaattctttcagatttggaactgtatctgtatggaaacaacagagttttcttgaagtacaactaaggacaggtcaccactaggcactaacatcgctgacttgcatgattatggagatggtctatctgatgctgaaaatgtctctagttttttgacaacggctaaataaccatgggatcaagtggccttgggaaagcagcaacattagatgaactgctgtgcacttgcattgagatgtttgatgacaatggagagctggataatagttatttgccaagaatagttctactgatgcaccgatggtatttatcttccactgaattggcagaaaaacttctctgcatgtatcgaaatgccactggagaaagctgcaatgaatttcgattaaagatctgctacttcatgaggtactggattctgaagtttcctgcagagtttaatttggatcttggtttgattcgtatgactgaggaatttcgggaagtagctagtcaactaggatatgaaaaacacgtcagcctcatcgacatatccagcattccttcctatgactggatgagaagagtcacacagaggaaaaaagtatccaagaagggaaaagcctgtctgctgtttgaccatctggagcccattgaattggctgagcacctcacttttctggagcataaatcttttagaaggatctcattcactgattaccaaagctatgtcatccatggctgcctggagaataatccaaccttggaaagatcgattgctttatttaatggaatctctaagtgggtccagttgatggttcttagcaaaccaaccccccagcaaagggcagaagtcatcacaaagtttatcaatgttgcaaagaagctccttcagctcaaaaattttaacaccctgatggcagtggtgggaggcctcagtcatagttccatttcacgcctcaaagagacccattctcatctttcttcagaagttacaaagaactggaatgaaatgacagagttggtctcctccaacggcaattactgcaattaccgcaaggcctttgccgactgcgatggcttcaaaatccccatccttggagtacacttgaaagacttgatagctgtccatgtcattttcccagactggacagaggagaacaaagtgaacattgtgaaaatgcaccagctctccgttaccctgagtgaactagtctccctgcagaatgcctctcaccacttagaacccaacatggatttgatcaacctgctcacgctttccctggacctctatcacactgaagatgatatttacaaactgtcactggtgctggagcctagaaattctaaatcgcagcctacctcccctacgacgcccaacaagcctgtggtacccctggagtgggcattaggggtgatgccaaagccagaccccacggtcatcaacaagcacataaggaaattagtggagtctgtatttagaaactatgatcacgaccatgatgggtacatttcccaagaggactttgaaagtatagctgccaattttcccttcttggattccttctgtgttctggacaaagatcaggatggcctaattagtaaagatgaaatgatggcttacttcctgagagctaaatcccaactacactgtaaaatgggaccaggatttatccataattttcaggagatgacctatctcaagccaaccttctgcgaacactgtgcgggatttctctggggcataatcaagcaaggatacaaatgcaaagactgtggagccaattgtcacaaacagtgcaaagacctcctggttctggcctgcaggagatttgcccgggcgccctccttgagcagtggtcatgggtcactgcctggaagcccctcgctgcccccagcgcaggatgaggtgtttgagttccctggagtcactgctggacacagggatttagacagcagagccatcacactggttacaggctcttctcgcaagatctctgtgaggctacagagggccaccaccagccaggccacccagactgaacctgtctggtcagaggctggctggggggactcggggtcccacaccttccctaaaatgaaatccaagttccatgacaaagcagcaaaggacaaaggctttgccaaatgggaaaatgagaagcccagggtgcatgctggtgtggatgttgtagaccggggcacggagtttgaacttgaccaggatgaaggagaagagaccagacaggatggtgaggatggctgacttcaggctgcggaaactgaaggcaataatgttggcttttggaaggggcaagacgagaaactctgaagaaagctctgactctcaggaagttatctggaaagatacctggatgtttactgccttgggacactgtgggatctccatgtttggactatgggacagagaattgaccctaactaactatgaactatttatttcctcctcccctacccctagttaagtgccacaaagactgtgttatgtagtcagtacttttctcatgtatctttctctagaccatttatatacgggtgaaatgaaagcttttttgcatgtacttgatactcagtctgtaaactcagacttcgctttttttgtgagactatcctttcaatatttttataaacttttgtgtgtgctgtggcagggaacagttaacaaggagtttatttagaggggtttttttcattttttgtttttcttgttttgttttgttttgttttgttcttcttggtgtgctttttggatgggaccagaacttaacattttcctgaggactaggaagctcatcagacactggaatgcagtgattcttctaatgatggtcaactgcaaggagaaactgtttacatccttcccactacacagttgctatgatatgtaacaagtcacacatgtatatatcacacaagtcttaccaattctgcgtcactaggaagctatagcatggtcgtgaaagctctcctaatacttacttaaatagccatggaagaaaattatgcttgtcccttctgactgggttaagccatctttcttaagattcctgaagtagaaatagcaattaagaaattaattcaagttttgacggttaacatttagcagaaaaacaaaccattgaataagctactaggtgaaatgcaaaacaaccatcaatttttttaaactcaataattttgtgaaaaaaaaaaccaccaccaaacttttggttgtaaaagagaacccttgttcccttcctaagaaactgccttccacaattaaagaatactcatagaaagaaaataatcataaatcatatttgattaacatttcatttaagcttttaaaatatcaattttttaaatagctcccatttacccaaaataactagttatgggtctatttcttccatgattagaggagagagaacttgattcaagatactgaaaaatagagctgggactgagcctgtgaatgacaggaatgatctattaccaggtgactagtcggaaactacacagaggtgcactggtctgcatttgggggctaaagtgtatatattccatttaaaatggaatttgtttgtatttggggcagtcttcagtaaagcctttctcctttcttttctccattgaggacagttctgctcagcaaaattgttgagtacctgttctgggcaggtcccacgctatatgcacaaagttaagaaaaacttggtcttagcccttgggagctgacagcccatgggcattaaggcaaagtagttccagtgatttaaaatacggttccaaatacgctaaaaccaacttgtgccaaccagatttacagattggaaatactgcagatgatgtgaagttatcagttggaggagctgtgattaagctggataataagagaacgtgccatctgtaaagcactcagaaggcagccatccctagatgttggtttcatgtatattacactatctactactatccataaatgcaataatatgcatgttaacaacattaaaaacagcaaacagcaatcta

SEQ ID NO: 369986 - DNA, 2684 bp, Homo sapiens
ttgagctcaaagcttagcagcttcaatgttgttgttaggcataaacagcttgcaaatttcaattttttttctctcctcacttttgaactagatttgggcaatggaggtgatgacagcattttagaagacagaacaggaattctaggtgtttaggcacgttgaagagaaacttgctagaggtgatgaagtggaaagaaaaagacaattcactatagggatcaacattattgcagttctgcaaaggatattttcttttaaaacatccatatctcttctttgccatggaaactacacccaatctacctgaacctgcggcacccctctgatgacccatttggattctctgatttcactgccaagattctcagttctccaaaatacttatcattcaggttgaataaaccagttctacagactgcttcttccatgcatttcccaatgatgctaactgcccttaaaattctttcagatttggaactgtatctgtatggaaacaacagagttttcttgaagtacaactaaggacaggtcaccactaggcactaacatcgctgacttgcatgattatggagatggtctatctgatgctgaaaatgtctctagttttttgacaacggctaaataaccatgggatcaagtggccttgggaaagcagcaacattagatgaactgctgtgcacttgcattgagatgtttgatgacaatggagagctggataatagttatttgccaagaatagttctactgatgcaccgatggtatttatcttccactgaattggcagaaaaacttctctgcatgtatcgaaatgccactggagaaagctgcaatgaatttcgattaaagatctgctacttcatgaggtactggattctgaagtttcctgcagagtttaatttggatcttggtttgattcgtatgactgaggaatttcgggaagtagctagtcaactaggatatgaaaaacacgtcagcctcatcgacatatccagcattccttcctatgactggatgagaagagtcacacagaggaaaaaagtatccaagaagggaaaagcctgtctgctgtttgaccatctggagcccattgaattggctgagcacctcacttttctggagcataaatcttttagaaggatctcattcactgattaccaaagctatgtcatccatggctgcctggagaataatccaaccttggaaagatcgattgctttatttaatggaatctctaagtgggtccagttgatggttcttagcaaaccaaccccccagcaaagggcagaagtcatcacaaagtttatcaatgttgcaaagaagctccttcagctcaaaaattttaacaccctgatggcagtggtgggaggcctcagtcatagttccatttcacgcctcaaagagacccattctcatctttcttcagaagttacaaagaactggaatgaaatgacagagttggtctcctccaacggcaattactgcaattaccgcaaggcctttgccgactgcgatggcttcaaaatccccatccttggagtacacttgaaagacttgatagctgtccatgtcattttcccagactggacagaggagaacaaagtgaacattgtgaaaatgcaccagctctccgttaccctgagtgaactagtctccctgcagaatgcctctcaccacttagaacccaacatggatttgatcaacctgctcacgctttccctggacctctatcacactgaagatgatatttacaaactgtcactggtgctggagcctagaaattctaaatcgcagcctacctcccctacgacgcccaacaagcctgtggtacccctggagtgggcattaggggtgatgccaaagccagaccccacggtcatcaacaagcacataaggaaattagtggaggtaagtggttgagggagaataaagagagggcactagaagaccctttctctttccagaatgttctgcgattgtccaggaatctgatggaacccctgaaaacaaccctctggcaggtaggaacaatttagcaggcacttagtcctaccaggcattgggtcctggggagagtcgatcagaaaggcccttttccctttgttgtctctcttgcccagatactctcagctacttccagctcctctctttcacaggcatttgccacctctgtcattgtcaacagctcaagggattggggattagaatcactcatgaaaaacccacataggtcccactaagatgcccaataaattgattacccaagggcaggaaagaaatcctgtaagttggatagtttctccttttgtatagttttggaattttatgacacagcagcccgatgttattgagattagaaaaatcacctaatgtaggacaaggctctgtcagagttttccgtgtagaaaaaagagtagggccgggcgcggtggctcacgcctgtaatcccagcacttgggaggccgaggcgggcggatcacgaggtcaggagatcgagaccacggtgaaaccctgtccctactaaaaatacaaaaaattagccgggcgcgatggcgggcgcctgcagtctcagctactcaggaggcagaggcaggagaatggagtgaacccgggaagcagagcttgcagtgaggtgagatcgcgccactgcactccagcctgggagacagagtgagactccgtctgaa

SEQ ID NO: 369987 - DNA, 813 bp, Homo sapiens
taaaataggaaacaaaatcatcaggagtggagatagtgtgatgacatttgagaagagaatggaggaaaactgtggaggaatggggaccaggctggtctcagaatcctggcctcaagcaatcctcttgccttggcatcccaaaatgctgggattacagggatgagctatcccaccagggacccctcaggcagattgatttcttatgtgtgttcagctctggaggccacattccaacacctgttgtttcctgactttttaatgatcgccattctaactggtgtgagatggtatctcattgtggttaagagcttctgcacagcaaaagaaactaccatcagagtgaacaggcaacctacagaatgggagaaaatttttgcaatctactcatctgacaaagggctaatatccagaatctacaatgaactccaacaaatttacaagaaaaaaacaaccccatcaaaagtgggcaaaggatatgaacagacactctcaaaagaagacatttatgcagccaaaagacacaagaaaaaatgctcatcatcactggccatcagagaaacgcaaatcagaagaagactctttaatctatttttttctctctagttaaacattttaagacagagccgttttttataaattctaccctatataagaaacttaacatgcatttatttcctttttcctttcctccaattttcagtttttgttgacaaaactgattataatacttttaaagtatgacaggtattttatttcaaaaattcttatttacatttatattgttttgtaactatgccaacaataaacccagat

SEQ ID NO: 369988 - DNA, 429 bp, Homo sapiens
ctccaattttcagtttttgttgacaaaactgattataatacttttaaagtatgacaggtattttatttcaaaaattcttatttacatttatattgttttgtaactatgccaacaataaacccagataaacaaaaagctgagttcaaataatctgttctgcaaagcaccccgacttctcagcaatatacagacttaattctctgtactggtcactgttgcctctatattcttcttctactttgaattatgtgttattctgtaggcttcacattgttttgtttgctattctacctcacaaggttatgagttccagaagggcaggactctcatctcattttcatttttatacgctcagtacttggcacttagtagtagttaattttagtaatagattgctttccatgtaccaggcagtgtcttcagggattt

SEQ ID NO: 369989 - DNA, 1257 bp, Homo sapiens
gcggccgcctccgcgagcccacagcgccacctggggaccggaggccgctggcccgcggccgggcgagcgtgcaggaatgtgagcggcgcttccctgcttcgcgccgggcccgggtttgggagtcgtttgaggcgcgagcttcctgcgcctgctcagcagcctgaggccgcggccgggtgccctcctgccctcctggccatccagggattgggtgtcagtggcctgttgcacattgtcacttctacaagtgactaacaccgtcaggataatctaaaactacgaatactacctgactccacaagggtacggtgtattctccagttttagcatctgccttaaaaattacctcagagttaagcactgctggggacttatttctactcttgttttccttctaacaggtccctcagctgtaggtctgttggagtttgctggaggtccactccagatgctgtttgcctgggtatcagcagtggaggctgcagaacagcaaatattgcagaacagtaaatattgctgcctgatccttccctctggaagcttcgtcccagaaggccacctgcctatatgagttctagatccctgaggaatcgccacactgacttccacaatggttgaactagtttacagtcccagcaacagtgtaaaagtgttcctatttctccacatcctctccagcacctgttgtttcctgactttttaatgatcgccattctaactggtgtgagatggtatctcattgtggttaagagcttctgcacagcaaaagaaactaccatcagagtgaacaggcaacctacagaatgggagaaaatttttgcaatctactcatctgacaaagggctaatatccagaatctacaatgaactccaacaaatttacaagaaaaaaacaaccccatcaaaagtgggcaaaggatatgaacagacactctcaaaagaagacatttatgcagccaaaagacacaagaaaaaatgctcatcatcactggccatcagagaaacgcaaatcagaagaagactctttaatctatttttttctctctagttaaacattttaagacagagccgttttttataaattctaccctatataagaaacttaacatgcatttatttcctttttcctttcctccaattttcagtttttgttgacaaaactgattataatacttttaaagtatgacaggtattttatttcaaaaattcttatttacatttatattgttttgtaactatgccaacaataaacccagat

SEQ ID NO: 369990 - DNA, 710 bp, Homo sapiens
gaggagtctgtgagccaagaagggaaagtgtgacatctattcagaggatagtgagtaaagggttttggctgaatcagagagtcctaggaggcaatttctgggaaataaagctggacatttaagttaaagccagatggtggagaatataaagcaccagacagaagagtctgggtcatgttatgctaccatgatttctgtgggtgaaaaccagactctgagagaccaactggaagtcactgtagttatccaggtgtgaagtgataaaaatcttgtcctaaggtggagacagtgatgaaattagcaacatgacttcttaacaaacaattgattctctgaatgatggaggcaaaatggcttcaaaattacagatctgcatgtttagcatatagcagtacttgctatttctagatttacagaagaaggatctaattttgagaagatcttgaaccagcctttagacacaagtattttcatataaaagatatatagatatgggaatataggaatgtcctttggaaatgaggaattgaaacccaagaagtcagggctggagatagagatttgagagttatgcaaatatactcagatcatgttcaagatcacacaggactatgagatttacaactgagtgtatttgttgaagcaagtagaaagctgaggccagggctcctggtgggtggggaggaaaatcaacaaagattttcttttga

SEQ ID NO: 369991 - DNA, 396 bp, Homo sapiens
gggtatattgggatgtagcccatcgtaaagatgagcatatcatctgtatatttttatgttttttagctctaaagactattaaatatgaacatacttgagaaactacttaatctagctgggggtggtggctcaccctataatcccagggatttaggaggccaaggcaggaggatcacatgaagccaagagttcaaaaatagcttaggcaacatagcaagaccctctccctacaaaaaaaaattaaaaaaatagccatgcgtggtggcatgtacctgtagtcctagctacttgggaggctagggcaggaggattgcttgaacccaggagttcaaggctgcactgggctgtgatcacaccactgcactccattctgggcaatggagtgagaacctgtct

SEQ ID NO: 369992 - DNA, 2564 bp, Homo sapiens
agcccgggggcggggcgaacggggcgggggccggggtctggtaaggccccgccggctgagatatccagcggcgcacctgacttcccgggaggcaaggccaacgtggttggaggcggggctgggttggggggtgggggttcaagtctgagagacctaaaggcaccgctagcgtatgggggcgtggccaaccatgcgggaggcggggccttgatgctggacatcaggctgtgctgcgggcagccagtgagaaggccgtcaagatggcggcctcctggaggctgggctgtgatccgcggctgctgcgttatcttgtgggcttccctggccgccgaagcgtagggctggtgaagggggctcttgggtggtctgtaagccgcggagctaattggagatggtttcacagcacgcagtggcttcggggtgatcccattaagatactaatgccatcactgtctcctacaatggaagaaggaaacattgtgaaatggctgaaaaaggaaggtgaagcggtgagtgctggagatgcattatgtgaaattgagactgacaaagctgtggttaccttagatgcaagtgatgatggaatcttggccaaaatcgtggttgaagaaggaagtaaaaatatacggctaggttcactaattggtttgatagtagaagaaggagaagattggaaacatgttgaaattcccaaagacgtaggtcctccaccaccagtttcaaaaccttcagagcctcgcccctcaccagaaccacagatttccatccctgtcaagaaggaacacatacccgggacactacggttccgtttaagtccagctgcccgcaatattctggaaaaacactcactggatgctagccagggcacagccactggccctcgggggatattcactaaagaggatgctctcaaacttgtccagttgaaacaaacgggcaagattaccgagtccagaccaactccagcccccacagccactcccacagcaccttcgcccctacaggccacagctggaccatcttatccccggcctgtgatcccaccagtatcaactcctggacaacccaatgcagtgggcacattcactgaaatccccgccagcaatattcgaagagttattgccaagagattaactgaatctaaaagtactgtacctcatgcatatgctactgctgactgtgaccttggagctgttttaaaagttaggcaagatctggtcaaagatgacattaaagtatcagtaaatgattttatcatcaaggcagcagctgttacccttaaacaaatgccagatgttaatgtaagctgggatggagagggcccaaagcaactgccatttattgacatttcagtggctgtggcaacagataaaggcttacttactccaatcataaaagatgctgctgctaaaggtatccaggaaattgctgactctgtaaaggctctatcaaagaaagcaagagatggaaaattgttgcctgaagaataccaaggaggatcttttagtatttccaacttggggatgtttggcatcgacgaatttactgcagtgattaaccctcctcaggcctgcattttggcggttgggaggttccgacctgtgctgaagctcactgaggatgaagagggaaatgccaaactgcagcagcgccagctcataacagtcacaatgtcaagtgacagtcgagtggttgatgacgaactggcaaccaggtttcttaaaagttttaaagcaaacctagagaatcctatccgacttgcctagtcctcaaagataagaagttggtgttcagcttagttgattcagtagttgttaccaagaaacatatgttataggaaaacaacttggtatttaagtatgaagtggatgaaatgtttatttatttaaggtgaaagcatttgacccagggtgtcttcatcttcaatttgggtttaatgttatagaaataaatgatgataaactctaactaataaaggaaagagaatatttggttactcagatccatttttaacctctggtgctgtataaagggaatattaaactagatgtaaatcaaagtatatgtttggctcatttgagcattttggaatatttgagaatgtatgatacatgtaaaattaaaaaaactattagaactgtaccataattatgttgaaggtagaagtgatcttcaaagagatggccattaacttagcagtgggacctcacttttacaagcactgctctagatatacttgaagaatttaataggtacagaagtttattctggataataaataaataaggatcacactgtattaggggttatggcaacattattgaattttttatgtacataaagccatatgtttagggtggtttctatctgtcttgtttttcacttatataacactgtgaacttctaaagaaagaggataaaagaagcatgaatgaaaagaatgacatttcaaaaaaatggttcaatgaaaaactatagctaaaatatgtaaacctttctaggtaaaccgcttgccttcatcttgagtcggaatatatttaaataaattgtgttatctcttgcca

SEQ ID NO: 369993 - DNA, 2448 bp, Homo sapiens
agcccgggggcggggcgaacggggcgggggccggggtctggtaaggccccgccggctgagatatccagcggcgcacctgacttcccgggaggcaaggccaacgtggttggaggcggggctgggttggggggtgggggttcaagtctgagagacctaaaggcaccgctagcgtatgggggcgtggccaaccatgcgggaggcggggccttgatgctggacatcaggctgtgctgcgggcagccagtgagaaggccgtcaagatggcggcctcctggaggctgggctgtgatccgcggctgctgcgttatcttgtgggcttccctggccgccgaagcgtagggctggtgaagggggctcttgggtggtctgtaagccgcggagctaattggagatggtttcacagcacgcagtggcttcggggtgatcccattaagatactaatgccatcactgtctcctacaatggaagaaggaaacattgtgaaatggctgaaaaaggaaggtgaagcggtgagtgctggagatgcattatgtgaaattgagactgacaaagctgtggttaccttagatgcaagtgatgatggaatcttggccaaaatcgtggttgaagaaggaagtaaaaatatacggctaggttcactaattggtttgatagtagaagaaggagaagattggaaacatgttgaaattcccaaagacgtaggtcctccaccaccagtttcaaaaccttcagagcctcgcccctcaccagaaccacagatttccatccctgtcaagaaggaacacatacccgggacactacggttccgtttaagtccagctgcccgcaatattctggaaaaacactcactggatgctagccagggcacagccactggccctcgggggatattcactaaagaggatgctctcaaacttgtccagttgaaacaaacgggcaagattaccgagtccagaccaactccagcccccacagccactcccacagcaccttcgcccctacaggccacagctggaccatcttatccccggcctgtgatcccaccagtatcaactcctggacaacccaatgcagtgggcacattcactgaaatccccgccagcaatattcgaagagttattgccaagagattaactgaatctaaaagtactgtacctcatgcatatgctactgctgactgtgaccttggagctgttttaaaagttaggcaagatctggtcaaagatgacattaaagtatcagtaaatgattttatcatcaaggcagcagctgttacccttaaacaaatgccagatgttaatgtaagctgggatggagagggcccaaagcaactgccatttattgacatttcagtggctgtggcaacagataaaggcttacttactccaatcataaaagatgctgctgctaaaggtatccaggaaattgctgactctgtaaaggctctatcaaagaaagcaagagatggaaaattgttgcctgaagaataccaaggaggatcttttagtatttccaacttggggatgtttggcatcgacgaatttactgcagtgattaaccctcctcaggcctgcattttggcggttgggaggttccgacctgtgctgaagctcactgaggatgaagagggaaatgccaaactgcagcagcgccagctcataacagtcacaatgtcaagtgacagtcgagtggttgatgacgaactggcaaccaggtttcttaaaagttttaaagcaaacctagagaatcctatccgacttgcctagtcctcaaagataagaagttggtgttcagcttagttgattcagtagttgttaccaagaaacatatgttataggaaaacaacttggtatttaagtatgaagtggatgaaatgtttatttatttaaggtgaaagcatttgacccagggtgtcttcatcttcaatttgggtttaatgttatagaaataaatgatgataaactctaactaataaaggaaagagaatatttggttactcagatccatttttaacctctggtgctgtataaagggaatattaaactagatgtaaatcaaagtatatgtttggctcatttgagcattttggaatatttgagaatgtatgatacatgtaaaattaaaaaaactattagaactgtaccataattatgttgaaggtagaagtgatcttcaaagagatggccattaacttagcagtgggacctcacttttacaagcactgctctagatatacttgaagaatttaataggtacagaagtttattctggataataaataaataaggatcacactgtattaggggttatggcaacattattgaattttttatgtacataaagccatatgtttagggtggtttctatctgtcttgtttttcacttatataacactgtgaacttctaaagaaagaggataaaagaagcatgaatgaaaagaatgacatt

SEQ ID NO: 369994 - DNA, 2235 bp, Homo sapiens
agcccgggggcggggcgaacggggcgggggccggggtctggtaaggccccgccggctgagatatccagcggcgcacctgacttcccgggaggtgatcccattaagatactaatgccatcactgtctcctacaatggaagaaggaaacattgtgaaatggctgaaaaaggaaggtgaagcggtgagtgctggagatgcattatgtgaaattgagactgacaaagctgtggttaccttagatgcaagtgatgatggaatcttggccaaaatcgtggttgaagaaggaagtaaaaatatacggctaggttcactaattggtttgatagtagaagaaggagaagattggaaacatgttgaaattcccaaagacgtaggtcctccaccaccagtttcaaaaccttcagagcctcgcccctcaccagaaccacagatttccatccctgtcaagaaggaacacatacccgggacactacggttccgtttaagtccagctgcccgcaatattctggaaaaacactcactggatgctagccagggcacagccactggccctcgggggatattcactaaagaggatgctctcaaacttgtccagttgaaacaaacgggcaagattaccgagtccagaccaactccagcccccacagccactcccacagcaccttcgcccctacaggccacagctggaccatcttatccccggcctgtgatcccaccagtatcaactcctggacaacccaatgcagtgggcacattcactgaaatccccgccagcaatattcgaagagttattgccaagagattaactgaatctaaaagtactgtacctcatgcatatgctactgctgactgtgaccttggagctgttttaaaagttaggcaagatctggtcaaagatgacattaaagtatcagtaaatgattttatcatcaaggcagcagctgttacccttaaacaaatgccagatgttaatgtaagctgggatggagagggcccaaagcaactgccatttattgacatttcagtggctgtggcaacagataaaggcttacttactccaatcataaaagatgctgctgctaaaggtatccaggaaattgctgactctgtaaaggctctatcaaagaaagcaagagatggaaaattgttgcctgaagaataccaaggaggatcttttagtatttccaacttggggatgtttggcatcgacgaatttactgcagtgattaaccctcctcaggcctgcattttggcggttgggaggttccgacctgtgctgaagctcactgaggatgaagagggaaatgccaaactgcagcagcgccagctcataacagtcacaatgtcaagtgacagtcgagtggttgatgacgaactggcaaccaggtttcttaaaagttttaaagcaaacctagagaatcctatccgacttgcctagtcctcaaagataagaagttggtgttcagcttagttgattcagtagttgttaccaagaaacatatgttataggaaaacaacttggtatttaagtatgaagtggatgaaatgtttatttatttaaggtgaaagcatttgacccagggtgtcttcatcttcaatttgggtttaatgttatagaaataaatgatgataaactctaactaataaaggaaagagaatatttggttactcagatccatttttaacctctggtgctgtataaagggaatattaaactagatgtaaatcaaagtatatgtttggctcatttgagcattttggaatatttgagaatgtatgatacatgtaaaattaaaaaaactattagaactgtaccataattatgttgaaggtagaagtgatcttcaaagagatggccattaacttagcagtgggacctcacttttacaagcactgctctagatatacttgaagaatttaataggtacagaagtttattctggataataaataaataaggatcacactgtattaggggttatggcaacattattgaattttttatgtacataaagccatatgtttagggtggtttctatctgtcttgtttttcacttatataacactgtgaacttctaaagaaagaggataaaagaagcatgaatgaaaagaatgacatttcaaaaaaatggttcaatgaaaaactatagctaaaatatgtaaacctttctaggtaaaccgcttgccttcatcttgagtcggaatatatttaaataaattgtgttatctcttgcca

SEQ ID NO: 369995 - DNA, 2343 bp, Homo sapiens
agcccgggggcggggcgaacggggcgggggccggggtctggtaaggccccgccggctgagatatccagcggcgcacctgacttcccgggaggtgatcccattaagatactaatgccatcactgtctcctacaatggaagaaggaaacattgtgaaatggctgaaaaaggaaggtgaagcggtgagtgctggagatgcattatgtgaaattgagactgacaaagctgtggttaccttagatgcaagtgatgatggaatcttggccaaaatcgtggttgaagaaggaagtaaaaatatacggctaggttcactaattggtttgatagtagaagaaggagaagattggaaacatgttgaaattcccaaagacgtaggtcctccaccaccagtttcaaaggaacacatacccgggacactacggttccgtttaagtccagctgcccgcaatattctggaaaaacactcactggatgctagccagggcacagccactggccctcgggggatattcactaaagaggatgctctcaaacttgtccagttgaaacaaacgggcaagattaccgagtccagaccaactccagcccccacagccactcccacagcaccttcgcccctacaggccacagctggaccatcttatccccggcctgtgatcccaccagtatcaactcctggacaacccaatgcagtgggcacattcactgaaatccccgccagcaatattcgaagagttattgccaagagattaactgaatctaaaagtactgtacctcatgcatatgctactgctgactgtgaccttggagctgttttaaaagttaggcaagatctggtcaaagatgacattaaagtatcagtaaatgattttatcatcaaggcagcagctgttacccttaaacaaatgccagatgttaatgtaagctgggatggagagggcccaaagcaactgccatttattgacatttcagtggctgtggcaacagataaaggcttacttactccaatcataaaagatgctgctgctaaaggtatccaggaaattgctgactctgtaaaggctctatcaaagaaagcaagagatggaaaattgttgcctgaagaataccaaggaggatcttttagtatttccaacttggggatgtttggcatcgacgaatttactgcagtgattaaccctcctcaggcctgcattttggcggttgggaggttccgacctgtgctgaagctcactgaggatgaagagggaaatgccaaactgcagcagcgccagctcataacagtcacaatgtcaagtgacagtcgagtggttgatgacgaactggcaaccaggtttcttaaaagttttaaagcaaacctagagaatcctatccgacttgcctagtcctcaaagataagaagttggtgttcagcttagttgattcagtagttgttaccaagaaacatatgttataggaaaacaacttggtatttaagtatgaagtggatgaaatgtttatttatttaaggtgaaagcatttgacccagggtgtcttcatcttcaatttgggtttaatgttatagaaataaatgatgataaactctaactaataaaggaaagagaatatttggttactcagatccatttttaacctctggtgctgtataaagggaatattaaactagatgtaaatcaaagtatatgtttggctcatttgagcattttggaatatttgagaatgtatgatacatgtaaaattaaaaaaactattagaactgtaccataattatgttgaaggtagaagtgatcttcaaagagatggccattaacttagcagtgggacctcacttttacaagcactgctctagatatacttgaagaatttaataggtacagaagtttattctggataataaataaataaggatcacactgtattaggggttatggcaacattattgaattttttatgtacataaagccatatgtttagggtggtttctatctgtcttgtttttcacttatataacactgtgaacttctaaagaaagaggataaaagaagcatgaatgaaaagaatgacatttcaaaaaaatggttcaatgaaaaactatagctaaaatatgtaaacctttctaggtaaaccgcttgccttcatcttgagtcggaatatatttaaataaattgtgttatctcttgccaaacattttgttagtgtttatttaaaaacaaaatgttgtttcttaatgcatttaaatcagttttgtattgtgcagtaaaatgtgagaaaatataaacatttctattgtattttaaatgttaaaacacaaaagttcaataaaccttgaagttgattagtagttt

SEQ ID NO: 369996 - DNA, 1609 bp, Homo sapiens
ggtacacctgtttagggcacttaccgtgaatggagcttgcaagactagaagttgctctggaagaatcagtgaatgagtgaatgcttaggacatcactatacactactgtagactttataaacactgcacacttaggctacactaaatttatttttaaaataaagtaattgcaatatgatgttatgacagctatgatgccactaggcagcagaaattcctgagctccattataatcttataagaccaccgttgtatatgtgatccttcgttatgtgggacatgactcgatataaaatggattgttatattgaccttttatctgatgacttaactaaatttacttattaattttactagttatctatagtctcatttttcctgtgtacacaattaatttatttgtaaatactaaatgtttccttttttcattactcatatatttttttcttgccttactacactgcctagtaaaatatataaaatatgtgcttcacggaaaggggactttgattaaggacatgcctccttcagagctttttcttttccccctagtatttccaacttggggatgtttggcatcgacgaatttactgcagtgattaaccctcctcaggcctgcattttggcggttgggaggttccgacctgtgctgaagctcactgaggatgaagagggaaatgccaaactgcagcagcgccagctcataacagtcacaatgtcaagtgacagtcgagtggttgatgacgaactggcaaccaggtttcttaaaagttttaaagcaaacctagagaatcctatccgacttgcctagtcctcaaagataagaagttggtgttcagcttagttgattcagtagttgttaccaagaaacatatgttataggaaaacaacttggtatttaagtatgaagtggatgaaatgtttatttatttaaggtgaaagcatttgacccagggtgtcttcatcttcaatttgggtttaatgttatagaaataaatgatgataaactctaactaataaaggaaagagaatatttggttactcagatccatttttaacctctggtgctgtataaagggaatattaaactagatgtaaatcaaagtatatgtttggctcatttgagcattttggaatatttgagaatgtatgatacatgtaaaattaaaaaaactattagaactgtaccataattatgttgaaggtagaagtgatcttcaaagagatggccattaacttagcagtgggacctcacttttacaagcactgctctagatatacttgaagaatttaataggtacagaagtttattctggataataaataaataaggatcacactgtattaggggttatggcaacattattgaattttttatgtacataaagccatatgtttagggtggtttctatctgtcttgtttttcacttatataacactgtgaacttctaaagaaagaggataaaagaagcatgaatgaaaagaatgacatttcaaaaaaatggttcaatgaaaaactatagctaaaatatgtaaacctttctaggtaaaccgcttgccttcatcttgagtcggaatatatttaaataaattgtgttatctcttgcca

SEQ ID NO: 369997 - DNA, 1892 bp, Homo sapiens
agcccgggggcggggcgaacggggcgggggccggggtctggtaaggccccgccggctgagatatccagcggcgcacctgacttcccgggaggcaaggccaacgtggttggaggcggggctgggttggggggtgggggttcaagtctgagagacctaaaggcaccgctagcgtatgggggcgtggccaaccatgcgggaggcggggccttgatgctggacatcaggctgtgctgcgggcagccagtgagaaggccgtcaagatggcggcctcctggaggctgggctgtgatccgcggctgctgcgttatcttgtgggcttccctggccgccgaagcgtagggctggtgaagggggctcttgggtggtctgtaagccgcggagctaattggagatggtttcacagcacgcagtggcttcggggtgatcccattaagatactaatgccatcactgtctcctacaatggaagaaggaaacattgtgaaatggctgaaaaaggaaggtgaagcggtgagtgctggagatgcattatgtgaaattgagactgacaaagctgtggttaccttagatgcaagtgatgatggaatcttggccaaaatcgtggttgaagaaggaagtaaaaatatacggctaggttcactaattggtttgatagtagaagaaggagaagattggaaacatgttgaaattcccaaagacgtaggtcctccaccaccagtttcaaaaccttcagagcctcgcccctcaccagaaccacagatttccatccctgtcaagaaggaacacatacccgggacactacggttccgtttaagtccagctgcccgcaatattctggaaaaacactcactggatgctagccagggcacagccactggccctcgggggatattcactaaagaggatgctctcaaacttgtccagttgaaacaaacgggcaagattaccgagtccagaccaactccagcccccacagccactcccacagcaccttcgcccctacaggccacagctggaccatcttatccccggcctgtgatcccaccagtatcaactcctggacaacccaatgcagtgggcacattcactgaaatccccgccagcaatattcgaagagttattgccaagagattaactgaatctaaaagtactgtacctcatgcatatgctactgctgactgtgaccttggagctgttttaaaagttaggcaagatctggtcaaagatgacattaaagtatcagtaaatgattttatcatcaaggcagcagctgttacccttaaacaaatgccagatgttaatgtaagctgggatggagagggcccaaagcaactgccatttattgacatttcagtggctgtggcaacagataaaggcttacttactccaatcataaaagatgctgctgctaaaggtatccaggaaattgctgactctgtaaaggctctatcaaagaaagcaagagatggaaaattgttgcctgaagaataccaaggaggatcttttagatggagtctggctctgtcgcccaggctgcaatgcagtggtatgatctaggctcactgcaacctccacctcctgggttcaagtgattctcctgcctcagcctcccaagtagctgggactacaggcacccaccaccatgcctggctgatttttgtatttttagtagagacgaggtttcaccatgttgactgggctggtctcaaactcccaacctcagatgatctgcctgcctcagcctcgcaaataagaatatatttcagtgtcttcttgtttactagctttgtttctattaatggcagttctccaaaatcttcaagagctacactttgggaactttccatttattgtatactttaattaaaggtttccaactgattttaaattaaa

SEQ ID NO: 369998 - DNA, 2726 bp, Homo sapiens
agcccgggggcggggcgaacggggcgggggccggggtctggtaaggccccgccggctgagatatccagcggcgcacctgacttcccgggaggcaaggccaacgtggttggaggcggggctgggttggggggtgggggttcaagtctgagagacctaaaggcaccgctagcgtatgggggcgtggccaaccatgcgggaggcggggccttgatgctggacatcaggctgtgctgcgggcagccagtgagaaggccgtcaagatggcggcctcctggaggctgggctgtgatccgcggctgctgcgttatcttgtgggcttccctggccgccgaagcgtagggctggtgaagggggctcttgggtggtctgtaagccgcggagctaattggagatggtttcacagcacgcagtggcttcggggtgatcccattaagatactaatgccatcactgtctcctacaatggaagaaggaaacattgtgaaatggctgaaaaaggaaggtgaagcggtgagtgctggagatgcattatgtgaaattgagactgacaaagctgtggttaccttagatgcaagtgatgatggaatcttggccaaaatcgtggttgaagaaggaagtaaaaatatacggctaggttcactaattggtttgatagtagaagaaggagaagattggaaacatgttgaaattcccaaagacgtaggtcctccaccaccagtttcaaaaccttcagagcctcgcccctcaccagaaccacagatttccatccctgtcaagaaggaacacatacccgggacactacggttccgtttaagtccagctgcccgcaatattctggaaaaacactcactggatgctagccagggcacagccactggccctcgggggatattcactaaagaggatgctctcaaacttgtccagttgaaacaaacgggcaagattaccgagtccagaccaactccagcccccacagccactcccacagcaccttcgcccctacaggccacagctggaccatcttatccccggcctgtgatcccaccagtatcaactcctggacaacccaatgcagtgggcacattcactgaaatccccgccagcaatattcgaagagttattgccaagagattaactgaatctaaaagtactgtacctcatgcatatgctactgctgactgtgaccttggagctgttttaaaagttaggcaagatctggtcaaagatgacattaaagtatcagtaaatgattttatcatcaaggcagcagctgttacccttaaacaaatgccagatgttaatgtaagctgggatggagagggcccaaagcaactgccatttattgacatttcagtggctgtggcaacagataaaggcttacttactccaatcataaaagatgctgctgctaaaggtatccaggaaattgctgactctgtaaaggctctatcaaagaaagcaagagatggaaaattgttgcctgaagaataccaaggaggatcttttagtatttccaacttggggatgtttggcatcgacgaatttactgcagtgattaaccctcctcaggcctgcattttggcggttgggaggttccgacctgtgctgaagctcactgaggatgaagagggaaatgccaaactgcagcagcgccagctcataacagtcacaatgtcaagtgacagtcgagtggttgatgacgaactggcaaccaggtttcttaaaagttttaaagcaaacctagagaatcctatccgacttgcctagtcctcaaagataagaagttggtgttcagcttagttgattcagtagttgttaccaagaaacatatgttataggaaaacaacttggtatttaagtatgaagtggatgaaatgtttatttatttaaggtgaaagcatttgacccagggtgtcttcatcttcaatttgggtttaatgttatagaaataaatgatgataaactctaactaataaaggaaagagaatatttggttactcagatccatttttaacctctggtgctgtataaagggaatattaaactagatgtaaatcaaagtatatgtttggctcatttgagcattttggaatatttgagaatgtatgatacatgtaaaattaaaaaaactattagaactgtaccataattatgttgaaggtagaagtgatcttcaaagagatggccattaacttagcagtgggacctcacttttacaagcactgctctagatatacttgaagaatttaataggtacagaagtttattctggataataaataaataaggatcacactgtattaggggttatggcaacattattgaattttttatgtacataaagccatatgtttagggtggtttctatctgtcttgtttttcacttatataacactgtgaacttctaaagaaagaggataaaagaagcatgaatgaaaagaatgacatttcaaaaaaatggttcaatgaaaaactatagctaaaatatgtaaacctttctaggtaaaccgcttgccttcatcttgagtcggaatatatttaaataaattgtgttatctcttgccaaacattttgttagtgtttatttaaaaacaaaatgttgtttcttaatgcatttaaatcagttttgtattgtgcagtaaaatgtgagaaaatataaacatttctattgtattttaaatgttaaaacacaaaagttcaataaaccttgaagttgattagtagttt

SEQ ID NO: 369999 - DNA, 2511 bp, Homo sapiens
agcccgggggcggggcgaacggggcgggggccggggtctggtaaggccccgccggctgagatatccagcggcgcacctgacttcccgggaggcaaggccaacgtggttggaggcggggctgggttggggggtgggggttcaagtctgagagacctaaaggcaccgctagcgtatgggggcgtggccaaccatgcgggaggcggggccttgatgctggacatcaggctgtgctgcgggcagccagtgagaaggccgtcaagatggcggcctcctggaggctgggctgtgatccgcggctgctgcgttatcttgtgggcttccctggccgccgaagcgtagggctggtgaagggggctcttgggtggtctgtaagccgcggagctaattggagatggtttcacagcacgcagtggcttcggggtgatcccattaagatactaatgccatcactgtctcctacaatggaagaaggaaacattgtgaaatggctgaaaaaggaaggtgaagcggtgagtgctggagatgcattatgtgaaattgagactgacaaagctgtggttaccttagatgcaagtgatgatggaatcttggccaaaatcgtggttgaagaaggaagtaaaaatatacggctaggttcactaattggtttgatagtagaagaaggagaagattggaaacatgttgaaattcccaaagacgtaggtcctccaccaccagtttcaaaaccttcagagcctcgcccctcaccagaaccacagatttccatccctgtcaagaaggaacacatacccgggacactacggttccgtttaagtccagctgcccgcaatattctggaaaaacactcactggatgctagccagggcacagccactggccctcgggggatattcactaaagaggatgctctcaaacttgtccagttgaaacaaacgggcaagattaccgagtccagaccaactccagcccccacagccactcccacagcaccttcgcccctacaggccacagctggaccatcttatccccggcctgtgatcccaccagtatcaactcctggacaacccaatgcagtgggcacattcactgaaatccccgccagcaatattcgaagagttattgccaagagattaactgaatctaaaagtactgtacctcatgcatatgctactgctgactgtgaccttggagctgttttaaaagttaggcaagatctggtcaaagatgacattaaagtatcagtaaatgattttatcatcaaggcagcagctgttacccttaaacaaatgccagatgttaatgtaagctgggatggagagggcccaaagcaactgccatttattgacatttcagtggctgtggcaacagataaaggcttacttactccaatcataaaagatgctgctgctaaaggtatccaggaaattgctgactctgtaaaggctctatcaaagaaagcaagagatggaaaattgttgcctgaagaataccaaggaggatcttttagtatttccaacttggggatgtttggcatcgacgaatttactgcagtgattaaccctcctcaggcctgcattttggcggttgggaggttccgacctgtgctgaagctcactgaggatgaagagggaaatgccaaactgcagcagcgccagctcataacagtcacaatgtcaagtgacagtcgagtggttgatgacgaactggcaaccaggtttcttaaaagttttaaagcaaacctagagaatcctatccgacttgcctagtcctcaaagataagaagttggtgttcagcttagttgattcagtagttgttaccaagaaacatatgttataggtgaaagcatttgacccagggtgtcttcatcttcaatttgggtttaatgttatagaaataaatgatgataaactctaactaataaaggaaagagaatatttggttactcagatccatttttaacctctggtgctgtataaagggaatattaaactagatgtaaatcaaagtatatgtttggctcatttgagcattttggaatatttgagaatgtatgatacatgtaaaattaaaaaaactattagaactgtaccataattatgttgaaggtagaagtgatcttcaaagagatggccattaacttagcagtgggacctcacttttacaagcactgctctagatatacttgaagaatttaataggtacagaagtttattctggataataaataaataaggatcacactgtattaggggttatggcaacattattgaattttttatgtacataaagccatatgtttagggtggtttctatctgtcttgtttttcacttatataacactgtgaacttctaaagaaagaggataaaagaagcatgaatgaaaagaatgacatttcaaaaaaatggttcaatgaaaaactatagctaaaatatgtaaacctttctaggtaaaccgcttgccttcatcttgagtcggaatatatttaaataaattgtgttatctcttgcca

SEQ ID NO: 370000 - DNA, 1883 bp, Homo sapiens
agcccgggggcggggcgaacggggcgggggccggggtctggtaaggccccgccggctgagatatccagcggcgcacctgacttcccgggaggcaaggccaacgtggttggaggcggggctgggttggggggtgggggttcaagtctgagagacctaaaggcaccgctagcgtatgggggcgtggccaaccatgcgggaggcggggccttgatgctggacatcaggctgtgctgcgggcagccagtgagaaggccgtcaagatggcggcctcctggaggctgggctgtgatccgcggctgctgcgttatcttgtgggcttccctggccgccgaagcgtagggctggtgaagggggctcttgggtggtctgtaagccgcggagctaattggagatggtttcacagcacgcagtggcttcggggtgatcccattaagatactaatgccatcactgtctcctacaatggaagaaggaaacattgtgaaatggctgaaaaaggaaggtgaagcggtgagtgctggagatgcattatgtgaaattgagactgacaaagctgtggttaccttagatgcaagtgatgatggaatcttggccaaaatcgtgcaaatgccagatgttaatgtaagctgggatggagagggcccaaagcaactgccatttattgacatttcagtggctgtggcaacagataaaggcttacttactccaatcataaaagatgctgctgctaaaggtatccaggaaattgctgactctgtaaaggctctatcaaagaaagcaagagatggaaaattgttgcctgaagaataccaaggaggatcttttagtatttccaacttggggatgtttggcatcgacgaatttactgcagtgattaaccctcctcaggcctgcattttggcggttgggaggttccgacctgtgctgaagctcactgaggatgaagagggaaatgccaaactgcagcagcgccagctcataacagtcacaatgtcaagtgacagtcgagtggttgatgacgaactggcaaccaggtttcttaaaagttttaaagcaaacctagagaatcctatccgacttgcctagtcctcaaagataagaagttggtgttcagcttagttgattcagtagttgttaccaagaaacatatgttataggaaaacaacttggtatttaagtatgaagtggatgaaatgtttatttatttaaggtgaaagcatttgacccagggtgtcttcatcttcaatttgggtttaatgttatagaaataaatgatgataaactctaactaataaaggaaagagaatatttggttactcagatccatttttaacctctggtgctgtataaagggaatattaaactagatgtaaatcaaagtatatgtttggctcatttgagcattttggaatatttgagaatgtatgatacatgtaaaattaaaaaaactattagaactgtaccataattatgttgaaggtagaagtgatcttcaaagagatggccattaacttagcagtgggacctcacttttacaagcactgctctagatatacttgaagaatttaataggtacagaagtttattctggataataaataaataaggatcacactgtattaggggttatggcaacattattgaattttttatgtacataaagccatatgtttagggtggtttctatctgtcttgtttttcacttatataacactgtgaacttctaaagaaagaggataaaagaagcatgaatgaaaagaatgacatttcaaaaaaatggttcaatgaaaaactatagctaaaatatgtaaacctttctaggtaaaccgcttgccttcatcttgagtcggaatatatttaaataaattgtgttatctcttgcca

SEQ ID NO: 370001 - DNA, 5414 bp, Homo sapiens
ctctgtggacctgcgcgtctcggggatgcgggagcgggggcagggggcggcccgagggcctgatccacgcggccccggatgcccgcgtcgggaggcggcgcgtcgggccgaggaggggcttctctgtggctgcagtagtttgttctctgggtcgtctttggagtggccgagcggcgtccgggcgctggggcggccaagtggcgcgggaagggtgggaggtgccgtgagggcggcgaggacagcggcggatttaagccccactggaaaccccggcccttgtggccgtggactgggctgcgggtagcagcgtctcctggaagggctctggccccgtgagcctcggggattcaggggccgccgacgttggtgcagatgccgggcgcactgggaggcggccggaatgccaatgagattcggcggatacgcagctgtcaccggccgcagactgccctgtcgccacctccagtgcctgcactccagtagccaagcaacataggaaatcgcgctcagaacccactttgttgattgagaaatcagacacgttgaatccgaggtgacatctgtggtctggccgaaggaggctagaaggaaggcatgtgctttggatggatggaaacaggaatcaaagaggaagctgtttttggaaggaagaaagatggaaagcggtgcagttctgctggaatccaaatcctccccatttaacctactgcatgagatgcatgagcttcgcctcctgggtcacctgtgtgacgtgacagtcagcgtggagtatcagggtgtccgcaaagacttcatggcccacaaggcagtgctggctgccaccagcaagttttttaaggaagtgttccttaatgagaagagtgtggatggtactaggactaatgtctacttaaatgaagtgcaggttgctgactttgcttcatttcttgagtttgtctacactgcaaaggtacaggtggaagaagatcgggtgcagcgaatgctggaagtggctgaaaagctgaaatgtttggatttatcagaaacttgttttcaattaaagaaacagatgttagagtcagtacttttggagttgcaaaatttctcagagtctcaggaggtggaggtgagcagtggctcccaagttagtgctgctcctgcccccagggcaagtgtggccaccgatggccctcaccccagtggtctcacggattccttggactacccaggagagagagccagcaatggcatgtcttcagatttgccaccgaagaagtccaaggacaaactagacaagaagaaagaggtagttaaacctccctaccctaaaatcaggagagctagtggaaggctggctgggaggaaggtctttgtggagatccctaaaaagaaatatacgagaagactccgagagcagcagaaaactgctgagggtgatgtgggggactacaggtgtccccaggaccaaagcccggacagggtgggcacggagatggagcaggtttccaaaaatgagggttgccaggcaggtgctgagttggaggaattgtcaaagaaagcagggccggaggaggaagaggaggaggaggaggaggacgaagaaggggagaagaagaagagcaactttaagtgcagcatttgcgagaaggcgtttctgtatgagaagagcttcctgaagcacagcaagcaccgccacggcgtggccaccgaggtggtgtaccgctgcgacacctgcggccagaccttcgccaaccgctgcaacctgaagagccaccagcgccacgtgcacagcagcgagcgccatttcccatgcgagctgtgcgggaagaagttcaagcgcaagaaggacgtgaagcggcacgtgctgcaggtgcatgagggcggcggcgagcggcaccgctgcggccagtgcggcaagggcctgagttccaagacagcgctgcggctgcacgagcgcacacacacgggagaccggccctacggctgcaccgagtgcggcgccaggttctcgcagccgtccgcgctcaagacgcacatgagaattcatacaggggaaaaaccttttgtctgtgatgaatgtggtgcaagattcactcagaaccacatgctgatttatcataaaaggtgtcacacaggtgaaagaccttttatgtgtgaaacatgtggcaagagttttgcttctaaggagtacttaaaacaccacaatagaatccatactggatccaaaccctttaaatgtgaagtatgtttcaggacttttgcccagcggaattcactgtaccagcatattaaagtccacacaggggagcgtccctactgctgtgaccagtgcggcaagcagttcacccagctcaacgccctccagcgccaccgccgcatccacacaggggagaggccattcatgtgcaatgcgtgcggacggacattcaccgacaagtccactcttcggcggcacacctcaatacacgataagaatactccatggaagtctttccttgtcattgtagatggctcgcccaagaacgatgacggacacaagactgaacagcctgacgaagagtatgtgtcatccaagctttcggataaattgctgtcttttgcagaaaatggccatttccacaacctggctgcagtccaagacactgtacctaccatgcaggagaacagttctgctgacacagcctgcaaggcagatgactccgtggtgtcccaggacaccctcctggccaccaccatcagtgagcttagcgagctgaccccacagacagactcgatgcccacacagcttcactctttgagcaacatggaataagagcttcaagcagttcccatcctgttagtctgcgtgtgtggtagctgaactcaagatgatgtggggctaagaaaaataattgtccatgtgcaaagatgtgggcaagaatggcctctgcagattttcctgaacttctgctaacttgcacggctttatcacagcatttttaaagctttccctcaaaaatcctgatctgcatgatctcagctactttattgacaaaaaggcagtgaacataacctcacttaattctggtgtagggtgtatgtgctaatcgttctaattcttgattacctagtttatagataactgctggtcttaattgcagagtacagagaactgaaccagctcctgatattgtagttagcagtcttcctggcttctcactctgccttatatttccatgtgggtttacttctctcataactactttcaaggtatttttcttccaagctgaaataaaactggggccacatattttcagtcatttcttccctgttgaattgaagcaaatcagattttctgtggggaccctcaaatgcaactgaagaaatagattgttgcattcattcctccccaccccccatttgtaggcagtaaacaaagtatgactgacagattgaacacctgcaaaactgctagcgtaatctcagcacatacgcagctaggaagtttgtcataaaatcaacttagaaatgagatgaggctgttcagtttgtcttaaaaaaatcagattaggtaaaagctgtcctaccaaagagtctagcaaaacaatatagtatttttttgcagaggcatgaaaaattaagacgctttagagtacttgaaagttgtgtagtcattttatttgcaaaatgaggtgactgtggcaaattatagaacacagagtattattacttttgccaggtttttctgacttgatttctgtaatttccagaaacccagacttctcatttccacacctagagatggaaacaggcaagtaactgacatgtctatttccttgggagcatgtgagaacatagcagtagggaccaaaagtctcagcacacttacctccgattatgccttaaagagttgattgtgaagaaccagtaactttgtcccaaatgcttctttggctgtttcatgcaggacttaattattgcttttaaaaattcacaatgaaaagacgattctgctgtatttgttaaacgttgacatttggttctagggccttgagtatgtgccacgtgcttgtgaaatgctatgattcacatgtaacatttaaacattaatttaaaaagggaaccttggagaattcttttgttcactagttccttttttctctacatttttaatttattaaacttgctgtgaaaacactttgattttctaagaggaaggtactttaagttccaggatgaacatgtagctgcactatgccagaaattaatgagggaagactttcttcctaagtgcttatgttttaacttatgttagtgaaaccactacaaggtgtttcaggcgctgataacatgcttcacacctgcccttggaggtcacagtactaatttacttcaaatttagttatgacagtgtcactgtatcctagttatgtttacagcacaaataaataatgactgtcatacatccagaggagaccgaacctgcccagctgatgtactgttttatggaataaagtcacttgatcagaaggaattgaaacaatagatcattttgttacctactggagggatttttgtcttgaatttgtttccttagaaattctacaaaaaaatgttgttaataaatgtctgctttgtaaaagcagttttgcaattttttaaagatctatttctgttataatttaggttctgcagaaatatgattcttaattgaaacatataatttgcttaattacgtgaataatgaaatgtaaaatccgggtccataagcctttatttcatacagtcctaggattaagctgtttaactgcttggatcccagttggtctctggcagtgggatcctggagaggagaaatcctggcctctgctcatgcgcaggccacaaccgggctggaagtgcggttgagctctctgccactttcttcaatgtaaaaagtaggcatcaaagatacgacttctactatatacatttctctgtccctgagaacagagaaacgtaaccctgtaggggactggttacagaggacctcctggagcatctgccccattcctccaagtccaagcacagccatgctgagtggaagcgaggccaccatctgagtggattggtcccaagtgtgtaatgaggaaagtggccaggtgccggcacagtgcctctcccagagcctcaagaagggccatttaggagcttgcttcaaccattttccaaccattttctgtgaaatgctgtcagcccaaactccaaagggatgtgcagcctttcgttttaccaaattctttgctgtcgtttggaaaaaatgggccatgtggtggagacctttatttaaggtgatttttacagaaatgtgattttgctgtaggtgattatccaaacaagtaaatttgagtgtataatttaatttttaacctgttaaataaaccttgtccctccaaggagttcatttttgggaaaca

SEQ ID NO: 370002 - DNA, 4709 bp, Homo sapiens
ctctgtggacctgcgcgtctcggggatgcgggagcgggggcagggggcggcccgagggcctgatccacgcggccccggatgcccgcgtcgggaggcggcgcgtcgggccgaggaggggcttctctgtggctgcagtagtttgttctctgggtcgtctttggagtggccgagcggcgtccgggcgctggggcggccaagtggcgcgggaagggtgggaggtgccgtgagggcggcgaggacagcggcggatttaagccccactggaaaccccggcccttgtggccgtggactgggctgcgggtagcagcgtctcctggaagggctctggccccgtgagcctcggggattcaggggccgccgacgttggtgcagatgccgggcgcactgggaggcggccggaatgccaatgagattcggcggatacgcagctgtcaccggccgcagactgccctgtcgccacctccagtgcctgcactccagtagccaagcaacataggaaatcgcgctcagaacccactttgttgattgagaaatcagacacgttgaatccgaggtgacatctgtggtctggccgaaggaggctagaaggaaggcatgtgctttggatggatggaaacaggaatcaaagaggaagctgtttttggaaggaagaaagatggaaagcggtgcagttctgctggaatccaaatcctccccatttaacctactgcatgagatgcatgagcttcgcctcctgggtcacctgtgtgacgtgacagtcagcgtggagtatcagggtgtccgcaaagacttcatggcccacaaggcagtgctggctgccaccagcaagttttttaaggaagtgttccttaatgagaagagtgtggatggtactaggactaatgtctacttaaatgaagtgcaggttgctgactttgcttcatttcttgagtttgtctacactgcaaaggtacaggtggaagaagatcgggtgcagcgaatgctggaagtggctgaaaagctgaaatgtttggatttatcagaaacttgttttcaattaaagaaacagatgttagagtcagtacttttggagttgcaaaatttctcagagtctcaggaggtggaggtgagcagtggctcccaagttagtgctgctcctgcccccagggcaagtgtggccaccgatggccctcaccccagtggtctcacggattccttggactacccaggagagagagccagcaatggcatgtcttcagatttgccaccgaagaagtccaaggacaaactagacaagaagaaagaggtagttaaacctccctaccctaaaatcaggagagctagtggaaggctggctgggaggaaggtctttgtggagatccctaaaaagaaatatacgagaagactccgagagcagcagaaaactgctgagggtgatgtgggggactacaggtgtccccaggaccaaagcccggacagggtgggcacggagatggagcaggtttccaaaaatgagggttgccaggcaggtgctgagttggaggaattgtcaaagaaagcagggccggaggaggaagaggaggaggaggaggaggacgaagaaggggagaagaagaagagcaactttaagtgcagcatttgcgagaaggcgtttctgtatgagaagagcttcctgaagcacagcaagcaccgccacggcgtggccaccgaggtggtgtaccgctgcgacacctgcggccagaccttcgccaaccgctgcaacctgaagagccaccagcgccacgtgcacagcagcgagcgccatttcccatgcgagctgtgcgggaagaagttcaagcgcaagaaggacgtgaagcggcacgtgctgcaggtgcatgagggcggcggcgagcggcaccgctgcggccagtgcggcaagggcctgagttccaagacagcgctgcggctgcacgagcgcacacacacgggagaccggccctacggctgcaccgagtgcggcgccaggttctcgcagccgtccgcgctcaagacgcacatgagaattcatacaggggaaaaaccttttgtctgtgatgaatgtggtgcaagattcactcagaaccacatgctgatttatcataaaaggtgtcacacaggtgaaagaccttttatgtgtgaaacatgtggcaagagttttgcttctaaggagtacttaaaacaccacaatagaatccatactggatccaaaccctttaaatgtgaagtatgtttcaggacttttgcccagcggaattcactgtaccagcatattaaagtccacacaggggagcgtccctactgctgtgaccagtgcggcaagcagttcacccagctcaacgccctccagcgccaccgccgcatccacacaggggagaggccattcatgtgcaatgcgtgcggacggacattcaccgacaagtccactcttcggcggcacacctcaatacacgataagaatactccatggaagtctttccttgtcattgtagatggctcgcccaagaacgatgacggacacaagactgaacagcctgacgaagagtatgtgtcatccaagctttcggataaattgctgtcttttgcagaaaatggccatttccacaacctggctgcagtccaagacactgtacctaccatgcaggagaacagttctgctgacacagcctgcaaggcagatgactccgtggtgtcccaggacaccctcctggccaccaccatcagtgagcttagcgagctgaccccacagacagactcgatgcccacacagcttcactctttgagcaacatggaataagagcttcaagcagttcccatcctgttagtctgcgtgtgtggtagctgaactcaagatgatgtggggctaagaaaaataattgtccatgtgcaaagatgtgggcaagaatggcctctgcagattttcctgaacttctgctaacttgcacggctttatcacagcatttttaaagctttccctcaaaaatcctgatctgcatgatctcagctactttattgacaaaaaggcagtgaacataacctcacttaattctggtgtagggtgtatgtgctaatcgttctaattcttgattacctagtttatagataactgctggtcttaattgcagagtacagagaactgaaccagctcctgatattgtagttagcagtcttcctggcttctcactctgccttatatttccatgtgggtttacttctctcataactactttcaaggtatttttcttccaagctgaaataaaactggggccacatattttcagtcatttcttccctgttgaattgaagcaaatcagattttctgtggggaccctcaaatgcaactgaagaaatagattgttgcattcattcctccccaccccccatttgtaggcagtaaacaaagtatgactgacagattgaacacctgcaaaactgctagcgtaatctcagcacatacgcagctaggaagtttgtcataaaatcaacttagaaatgagatgaggctgttcagtttgtcttaaaaaaatcagattaggtaaaagctgtcctaccaaagagtctagcaaaacaatatagtatttttttgcagaggcatgaaaaattaagacgctttagagtacttgaaagttgtgtagtcattttatttgcaaaatgaggtgactgtggcaaattatagaacacagagtattattacttttgccaggtttttctgacttgatttctgtaatttccagaaacccagacttctcatttccacacctagagatggaaacaggcaagtaactgacatgtctatttccttgggagcatgtgagaacatagcagtagggaccaaaagtctcagcacacttacctccgattatgccttaaagagttgattgtgaagaaccagtaactttgtcccaaatgcttctttggctgtttcatgcaggacttaattattgcttttaaaaattcacaatgaaaagacgattctgctgtatttgttaaacgttgacatttggttctagggccttgagtatgtgccacgtgcttgtgaaatgctatgattcacatgtaacatttaaacattaatttaaaaagggaaccttggagaattcttttgttcactagttccttttttctctacatttttaatttattaaacttgctgtgaaaacactttgattttctaagaggaaggtactttaagttccaggatgaacatgtagctgcactatgccagaaattaatgagggaagactttcttcctaagtgcttatgttttaacttatgttagtgaaaccactacaaggtgtttcaggcgctgataacatgcttcacacctgcccttggaggtcacagtactaatttacttcaaatttagttatgacagtgtcactgtatcctagttatgtttacagcacaaataaataatgactgtcatacatccagaggagaccgaacctgcccagctgatgtactgttttatggaataaagtcacttgatcagaaggaattgaaacaatagatcattttgttacctactggagggatttttgtcttgaatttgtttccttagaaattctacaaaaaaatgttgttaataaatgtctgctttgtaaaagcagttttgcaattttttatataaatatatatataatcatatatttcttttgggtggtctcgtccgtattatctctccatatgtatttaatttattccctttggggggg

SEQ ID NO: 370003 - DNA, 3008 bp, Homo sapiens
ggacagcggctgcagcgggggcgccggctgggagatacacgataagaatactccatggaagtctttccttgtcattgtagatggctcgcccaagaacgatgacggacacaagactgaacagcctgacgaagagtatgtgtcatccaagctttcggataaattgctgtcttttgcagaaaatggccatttccacaacctggctgcagtccaagacactgtacctaccatgcaggagaacagttctgctgacacagcctgcaaggcagatgactccgtggtgtcccaggacaccctcctggccaccaccatcagtgagcttagcgagctgaccccacagacagactcgatgcccacacagcttcactctttgagcaacatggaataagagcttcaagcagttcccatcctgttagtctgcgtgtgtggtagctgaactcaagatgatgtggggctaagaaaaataattgtccatgtgcaaagatgtgggcaagaatggcctctgcagattttcctgaacttctgctaacttgcacggctttatcacagcatttttaaagctttccctcaaaaatcctgatctgcatgatctcagctactttattgacaaaaaggcagtgaacataacctcacttaattctggtgtagggtgtatgtgctaatcgttctaattcttgattacctagtttatagataactgctggtcttaattgcagagtacagagaactgaaccagctcctgatattgtagttagcagtcttcctggcttctcactctgccttatatttccatgtgggtttacttctctcataactactttcaaggtatttttcttccaagctgaaataaaactggggccacatattttcagtcatttcttccctgttgaattgaagcaaatcagattttctgtggggaccctcaaatgcaactgaagaaatagattgttgcattcattcctccccaccccccatttgtaggcagtaaacaaagtatgactgacagattgaacacctgcaaaactgctagcgtaatctcagcacatacgcagctaggaagtttgtcataaaatcaacttagaaatgagatgaggctgttcagtttgtcttaaaaaaatcagattaggtaaaagctgtcctaccaaagagtctagcaaaacaatatagtatttttttgcagaggcatgaaaaattaagacgctttagagtacttgaaagttgtgtagtcattttatttgcaaaatgaggtgactgtggcaaattatagaacacagagtattattacttttgccaggtttttctgacttgatttctgtaatttccagaaacccagacttctcatttccacacctagagatggaaacaggcaagtaactgacatgtctatttccttgggagcatgtgagaacatagcagtagggaccaaaagtctcagcacacttacctccgattatgccttaaagagttgattgtgaagaaccagtaactttgtcccaaatgcttctttggctgtttcatgcaggacttaattattgcttttaaaaattcacaatgaaaagacgattctgctgtatttgttaaacgttgacatttggttctagggccttgagtatgtgccacgtgcttgtgaaatgctatgattcacatgtaacatttaaacattaatttaaaaagggaaccttggagaattcttttgttcactagttccttttttctctacatttttaatttattaaacttgctgtgaaaacactttgattttctaagaggaaggtactttaagttccaggatgaacatgtagctgcactatgccagaaattaatgagggaagactttcttcctaagtgcttatgttttaacttatgttagtgaaaccactacaaggtgtttcaggcgctgataacatgcttcacacctgcccttggaggtcacagtactaatttacttcaaatttagttatgacagtgtcactgtatcctagttatgtttacagcacaaataaataatgactgtcatacatccagaggagaccgaacctgcccagctgatgtactgttttatggaataaagtcacttgatcagaaggaattgaaacaatagatcattttgttacctactggagggatttttgtcttgaatttgtttccttagaaattctacaaaaaaatgttgttaataaatgtctgctttgtaaaagcagttttgcaattttttaaagatctatttctgttataatttaggttctgcagaaatatgattcttaattgaaacatataatttgcttaattacgtgaataatgaaatgtaaaatccgggtccataagcctttatttcatacagtcctaggattaagctgtttaactgcttggatcccagttggtctctggcagtgggatcctggagaggagaaatcctggcctctgctcatgcgcaggccacaaccgggctggaagtgcggttgagctctctgccactttcttcaatgtaaaaagtaggcatcaaagatacgacttctactatatacatttctctgtccctgagaacagagaaacgtaaccctgtaggggactggttacagaggacctcctggagcatctgccccattcctccaagtccaagcacagccatgctgagtggaagcgaggccaccatctgagtggattggtcccaagtgtgtaatgaggaaagtggccaggtgccggcacagtgcctctcccagagcctcaagaagggccatttaggagcttgcttcaaccattttccaaccattttctgtgaaatgctgtcagcccaaactccaaagggatgtgcagcctttcgttttaccaaattctttgctgtcgtttggaaaaaatgggccatgtggtggagacctttatttaaggtgatttttacagaaatgtgattttgctgtaggtgattatccaaacaagtaaatttgagtgtataatttaatttttaacctgttaaataaaccttgtccctccaaggagttcatttttgggaaaca

SEQ ID NO: 370004 - DNA, 4619 bp, Homo sapiens
ctctgtggacctgcgcgtctcggggatgcgggagcgggggcagggggcggcccgagggcctgatccacgcggccccggatgcccgcgtcgggaggcggcgcgtcgggccgaggaggggcttctctgtggctgcagtagtttgttctctgggtcgtctttggagtggccgagcggcgtccgggcgctggggcggccaagtggcgcgggaagggtgggaggtgccgtgagggcggcgaggacagcggcggatttaagccccactggaaaccccggcccttgtggccgtggactgggctgcgggtagcagcgtctcctggaagggctctggccccgtgagcctcggggattcaggggccgccgacgttggtgcagatgccgggcgcactgggaggcggccggaatgccaatgagattcggcggatacgcagctgtcaccggccgcagactgccctgtcgccacctccagtgcctgcactccagtagccaagcaacataggaaatcgcgctcagaacccactttgttgattgagaaatcagacacgttgaatccgaggtgacatctgtggtctggccgaaggaggctagaaggaaggcatgtgctttggatggatggaaacaggaatcaaagaggaagctgtttttggaaggaagaaagatggaaagcggtgcagttctgctggaatccaaatcctccccatttaacctactgcatgagatgcatgagcttcgcctcctgggtcacctgtgtgacgtgacagtcagcgtggagtatcagggtgtccgcaaagacttcatggcccacaaggcagtgctggctgccaccagcaagttttttaaggaagtgttccttaatgagaagagtgtggatggtactaggactaatgtctacttaaatgaagtgcaggttgctgactttgcttcatttcttgagtttgtctacactgcaaaggtacaggtggaagaagatcgggtgcagcgaatgctggaagtggctgaaaagctgaaatgtttggatttatcagaaacttgttttcaattaaagaaacagatgttagagtcagtacttttggagttgcaaaatttctcagagtctcaggaggtggaggtgagcagtggctcccaagttagtgctgctcctgcccccagggcaagtgtggccaccgatggccctcaccccagtggtctcacggattccttggactacccaggagagagagccagcaatggcatgtcttcagatttgccaccgaagaagtccaaggacaaactagacaagaagaaagaggtagttaaacctccctaccctaaaatcaggagagctagtggaaggctggctgggaggaaggtctttgtggagatccctaaaaagaaatatacgagaagactccgagagcagcagaaaactgctgagggtgatgtgggggactacaggtgtccccaggaccaaagcccggacagggtgggcacggagatggagcaggtttccaaaaatgagggttgccaggcaggtgctgagttggaggaattgtcaaagaaagcagggccggaggaggaagaggaggaggaggaggaggacgaagaaggggagaagaagaagagcaactttaagtgcagcatttgcgagaaggcgtttctgtatgagaagagcttcctgaagcacagcaagcaccgccacggcgtggccaccgaggtggtgtaccgctgcgacacctgcggccagaccttcgccaaccgctgcaacctgaagagccaccagcgccacgtgcacagcagcgagcgccatttcccatgcgagctgtgcgggaagaagttcaagcgcaagaaggacgtgaagcggcacgtgctgcaggtgcatgagggcggcggcgagcggcaccgctgcggccagtgcggcaagggcctgagttccaagacagcgctgcggctgcacgagcgcacacacacgggagaccggccctacggctgcaccgagtgcggcgccaggttctcgcagccgtccgcgctcaagacgcacatgagaattcatacaggggaaaaaccttttgtctgtgatgaatgtggtgcaagattcactcagaaccacatgctgatttatcataaaaggtgtcacacaggtgaaagaccttttatgtgtgaaacatgtggcaagagttttgcttctaaggagtacttaaaacaccacaatagaatccatactggatccaaaccctttaaatgtgaagtatgtttcaggacttttgcccagcggaattcactgtaccagcatattaaagtccacacaggggagcgtccctactgctgtgaccagtgcggcaagcagttcacccagctcaacgccctccagcgccaccgccgcatccacacaggggagaggccattcatgtgcaatgcgtgcggacggacattcaccgacaagtccactcttcggcggcacacctcaatacacgataagaatactccatggaagtctttccttgtcattgtagatggctcgcccaagaacgatgacggacacaagactgaacagcctgacgaagagtatgtgtcatccaagctttcggataaattgctgtcttttgcagaaaatggccatttccacaacctggctgcagtccaagacactgtacctaccatgcaggagaacagttctgctgacacagcctgcaaggcagatgactccgtggtgtcccaggacaccctcctggccaccaccatcagtgagcttagcgagctgaccccacagacagactcgatgcccacacagcttcactctttgagcaacatggaataagagcttcaagcagttcccatcctgttagtctgcgtgtgtggtagctgaactcaagatgatgtggggctaagaaaaataattgtccatgtgcaaagatgtgggcaagaatggcctctgcagattttcctgaacttctgctaacttgcacggctttatcacagcatttttaaagctttccctcaaaaatcctgatctgcatgatctcagctactttattgacaaaaaggcagtgaacataacctcacttaattctggtgtagggtgtatgtgctaatcgttctaattcttgattacctagtttatagataactgctggtcttaattgcagagtacagagaactgaaccagctcctgatattgtagttagcagtcttcctggcttctcactctgccttatatttccatgtgggtttacttctctcataactactttcaaggtatttttcttccaagctgaaataaaactggggccacatattttcagtcatttcttccctgttgaattgaagcaaatcagattttctgtggggaccctcaaatgcaactgaagaaatagattgttgcattcattcctccccaccccccatttgtaggcagtaaacaaagtatgactgacagattgaacacctgcaaaactgctagcgtaatctcagcacatacgcagctaggaagtttgtcataaaatcaacttagaaatgagatgaggctgttcagtttgtcttaaaaaaatcagattaggtaaaagctgtcctaccaaagagtctagcaaaacaatatagtatttttttgcagaggcatgaaaaattaagacgctttagagtacttgaaagttgtgtagtcattttatttgcaaaatgaggtgactgtggcaaattatagaacacagagtattattacttttgccaggtttttctgacttgatttctgtaatttccagaaacccagacttctcatttccacacctagagatggaaacaggcaagtaactgacatgtctatttccttgggagcatgtgagaacatagcagtagggaccaaaagtctcagcacacttacctccgattatgccttaaagagttgattgtgaagaaccagtaactttgtcccaaatgcttctttggctgtttcatgcaggacttaattattgcttttaaaaattcacaatgaaaagacgattctgctgtatttgttaaacgttgacatttggttctagggccttgagtatgtgccacgtgcttgtgaaatgctatgattcacatgtaacatttaaacattaatttaaaaagggaaccttggagaattcttttgttcactagttccttttttctctacatttttaatttattaaacttgctgtgaaaacactttgattttctaagaggaaggtactttaagttccaggatgaacatgtagctgcactatgccagaaattaatgagggaagactttcttcctaagtgcttatgttttaacttatgttagtgaaaccactacaaggtgtttcaggcgctgataacatgcttcacacctgcccttggaggtcacagtactaatttacttcaaatttagttatgacagtgtcactgtatcctagttatgtttacagcacaaataaataatgactgtcatacatccagaggagaccgaacctgcccagctgatgtactgttttatggaataaagtcacttgatcagaaggaattgaaacaatagatcattttgttacctactggagggatttttgtcttgaatttgtttccttagaaattctacaaaaaaatgttgttaataaatgtctgctttgtaaaagcagttttgcaatttttta

SEQ ID NO: 370005 - DNA, 5424 bp, Homo sapiens
ctctgtggacctgcgcgtctcggggatgcgggagcgggggcagggggcggcccgagggcctgatccacgcggccccggatgcccgcgtcgggaggcggcgcgtcgggccgaggaggggcttctctgtggctgcagtagtttgttctctgggtcgtctttggagtggccgagcggcgtccgggcgctggggcggccaagtggcgcgggaagggtgggaggtgccgtgagggcggcgaggacagcggcggatttaagccccactggaaaccccggcccttgtggccgtggactgggctgcgggtagcagcgtctcctggaagggctctggccccgtgagcctcggggattcaggggccgccgacgttggtgcagatgccgggcgcactgggaggcggccggaatgccaatgagattcggcggatacgcagctgtcaccggccgcagactgccctgtcgccacctccagtgcctgcactccagtagccaagcaacataggaaatcgcgctcagaacccactttgttgattgagaaatcagacacgttgaatccgaggtgacatctgtggtctggccgaaggaggctagaaggaaggcatgtgctttggatggatggaaacaggaatcaaagaggaagctgtttttggaaggaagaaagatggaaagcggtgcagttctgctggaatccaaatcctccccatttaacctactgcatgagatgcatgagcttcgcctcctgggtcacctgtgtgacgtgacagtcagcgtggagtatcagggtgtccgcaaagacttcatggcccacaaggcagtgctggctgccaccagcaagttttttaaggaagtgttccttaatgagaagagtgtggatggtactaggactaatgtctacttaaatgaagtgcaggttgctgactttgcttcatttcttgagtttgtctacactgcaaaggtacaggtggaagaagatcgggtgcagcgaatgctggaagtggctgaaaagctgaaatgtttggatttatcagaaacttgttttcaattaaagaaacagatgttagagtcagtacttttggagttgcaaaatttctcagagtctcaggaggtggaggtgagcagtggctcccaagttagtgctgctcctgcccccagggcaagtgtggccaccgatggccctcaccccagtggtctcacggattccttggactacccaggagagagagccagcaatggcatgtcttcagatttgccaccgaagaagtccaaggacaaactagacaagaagaaagaggtagttaaacctccctaccctaaaatcaggagagctagtggaaggctggctgggaggaaggtctttgtggagatccctaaaaagaaatatacgagaagactccgagagcagcagaaaactgctgagggtgatgtgggggactacaggtgtccccaggaccaaagcccggacagggtgggcacggagatggagcaggtttccaaaaatgagggttgccaggcaggtgctgagttggaggaattgtcaaagaaagcagggccggaggaggaagaggaggaggaggaggaggacgaagaaggggagaagaagaagagcaactttaagtgcagcatttgcgagaaggcgtttctgtatgagaagagcttcctgaagcacagcaagcaccgccacggcgtggccaccgaggtggtgtaccgctgcgacacctgcggccagaccttcgccaaccgctgcaacctgaagagccaccagcgccacgtgcacagcagcgagcgccatttcccatgcgagctgtgcgggaagaagttcaagcgcaagaaggacgtgaagcggcacgtgctgcaggtgcatgagggcggcggcgagcggcaccgctgcggccagtgcggcaagggcctgagttccaagacagcgctgcggctgcacgagcgcacacacacgggagaccggccctacggctgcaccgagtgcggcgccaggttctcgcagccgtccgcgctcaagacgcacatgagaattcatacaggggaaaaaccttttgtctgtgatgaatgtggtgcaagattcactcagaaccacatgctgatttatcataaaaggtgtcacacaggtgaaagaccttttatgtgtgaaacatgtggcaagagttttgcttctaaggagtacttaaaacaccacaatagaatccatactggatccaaaccctttaaatgtgaagtatgtttcaggacttttgcccagcggaattcactgtaccagcatattaaagtccacacaggggagcgtccctactgctgtgaccagtgcggcaagcagttcacccagctcaacgccctccagcgccaccgccgcatccacacaggggagaggccattcatgtgcaatgcgtgcggacggacattcaccgacaagtccactcttcggcggcacacctcaatacacgataagaatactccatggaagtctttccttgtcattgtagatggctcgcccaagaacgatgacggacacaagactgaacagcctgacgaagagtatgtgtcatccaagctttcggataaattgctgtcttttgcagaaaatggccatttccacaacctggctgcagtccaagacactgtacctaccatgcaggagaacagttctgctgacacagcctgcaaggcagatgactccgtggtgtcccaggacaccctcctggccaccaccatcagtgagcttagcgagctgaccccacagacagactcgatgcccacacagcttcactctttgagcaacatggaataagagcttcaagcagttcccatcctgttagtctgcgtgtgtggtagctgaactcaagatgatgtggggctaagaaaaataattgtccatgtgcaaagatgtgggcaagaatggcctctgcagattttcctgaacttctgctaacttgcacggctttatcacagcatttttaaagctttccctcaaaaatcctgatctgcatgatctcagctactttattgacaaaaaggcagtgaacataacctcacttaattctggtgtagggtgtatgtgctaatcgttctaattcttgattacctagtttatagataactgctggtcttaattgcagagtacagagaactgaaccagctcctgatattgtagttagcagtcttcctggcttctcactctgccttatatttccatgtgggtttacttctctcataactactttcaaggtatttttcttccaagctgaaataaaactggggccacatattttcagtcatttcttccctgttgaattgaagcaaatcagattttctgtggggaccctcaaatgcaactgaagaaatagattgttgcattcattcctccccaccccccatttgtaggcagtaaacaaagtatgactgacagattgaacacctgcaaaactgctagcgtaatctcagcacatacgcagctaggaagtttgtcataaaatcaacttagaaatgagatgaggctgttcagtttgtcttaaaaaaatcagattaggtaaaagctgtcctaccaaagagtctagcaaaacaatatagtatttttttgcagaggcatgaaaaattaagacgctttagagtacttgaaagttgtgtagtcattttatttgcaaaatgaggtgactgtggcaaattatagaacacagagtattattacttttgccaggtttttctgacttgatttctgtaatttccagaaacccagacttctcatttccacacctagagatggaaacaggcaagtaactgacatgtctatttccttgggagcatgtgagaacatagcagtagggaccaaaagtctcagcacacttacctccgattatgccttaaagagttgattgtgaagaaccagtaactttgtcccaaatgcttctttggctgtttcatgcaggacttaattattgcttttaaaaattcacaatgaaaagacgattctgctgtatttgttaaacgttgacatttggttctagggccttgagtatgtgccacgtgcttgtgaaatgctatgattcacatgtaacatttaaacattaatttaaaaagggaaccttggagaattcttttgttcactagttccttttttctctacatttttaatttattaaacttgctgtgaaaacactttgattttctaagaggaaggtactttaagttccaggatgaacatgtagctgcactatgccagaaattaatgagggaagactttcttcctaagtgcttatgttttaacttatgttagtgaaaccactacaaggtgtttcaggcgctgataacatgcttcacacctgcccttggaggtcacagtactaatttacttcaaatttagttatgacagtgtcactgtatcctagttatgtttacagcacaaataaataatgactgtcatacatccagaggagaccgaacctgcccagctgatgtactgttttatggaataaagtcacttgatcagaaggaattgaaacaatagatcattttgttacctactggagggatttttgtcttgaatttgtttccttagaaattctacaaaaaaatgttgttaataaatgtctgctttgtaaaagcagttttgcaattttttaaagatctatttctgttataatttaggttctgcagaaatatgattcttaattgaaacatataatttgcttaattacgtgaataatgaaatgtaaaatccgggtccataagcctttatttcatacagtcctaggattaagctgtttaactgcttggatcccagttggtctctggcagtgggatcctggagaggagaaatcctggcctctgctcatgcgcaggccacaaccgggctggaagtgcggttgagctctctgccactttcttcaatgtaaaaagtaggcatcaaagatacgacttctactatatacatttctctgtccctgagaacagagaaacgtaaccctgtaggggactggttacagaggacctcctggagcatctgccccattcctccaagtccaagcacagccatgctgagtggaagcgaggccaccatctgagtggattggtcccaagtgtgtaatgagggaggggtggtgtgtgtgggtgggtggtgtgtggtgtgtgttgtgggggggggtggggggggggggggggggttcagcaatttttttttgtttcattttctgtgaaatgctgtcagcccaaactccaaagggatgtgcagcctttcgttttaccaaattctttgctgtcgtttggaaaaaatgggccatgtggtggagacctttatttaaggtgatttttacagaaatgtgattttgctgtaggtgattatccaaacaagtaaatttgagtgtataatttaatttttaacctgttaaataaaccttgtccctccaaggagttcatttttgggaaaca

SEQ ID NO: 370006 - DNA, 5319 bp, Homo sapiens
ctctgtggacctgcgcgtctcggggatgcgggagcgggggcagggggcggcccgagggcctgatccacgcggccccggatgcccgcgtcgggaggcggcgcgtcgggccgaggaggggcttctctgtggctgcagtagtttgttctctgggtcgtctttggagtggccgagcggcgtccgggcgctggggcggccaagtggcgcgggaagggtgggaggtgccgtgagggcggcgaggacagcggcggatttaagccccactggaaaccccggcccttgtggccgtggactgggctgcgggtagcagcgtctcctggaagggctctggccccgtgagcctcggggattcaggggccgccgacgttggtgcagatgccgggcgcactgggaggcggccggaatgccaatgagattcggcggatacgcagctgtcaccggccgcagactgccctgtcgccacctccagtgcctgcactccagtagccaagcaacataggaaatcgcgctcagaacccactttgttgattgagaaatcagacacgttgaatccgaggtgacatctgtggtctggccgaaggaggctagaaggaaggcatgtgctttggatggatggaaacaggaatcaaagaggaagctgtttttggaaggaagaaagatggaaagcggtgcagttctgctggaatccaaatcctccccatttaacctactgcatgagatgcatgagcttcgcctcctgggtcacctgtgtgacgtgacagtcagcgtggagtatcagggtgtccgcaaagacttcatggcccacaaggcagtgctggctgccaccagcaagttttttaaggaagtgttccttaatgagaagagtgtggatggtactaggactaatgtctacttaaatgaagtgcaggttgctgactttgcttcatttcttgagtttgtctacactgcaaaggtacaggtggaagaagatcgggtgcagcgaatgctggaagtggctgaaaagctgaaatgtttggatttatcagaaacttgttttcaattaaagaaacagatgttagagtcagtacttttggagttgcaaaatttctcagagtctcaggaggtggaggtgagcagtggctcccaagttagtgctgctcctgcccccagggcaagtgtggccaccgatggccctcaccccagtggtctcacggattccttggactacccaggagagagagccagcaatggcatgtcttcagatttgccaccgaagaagtccaaggacaaactagacaagaagaaagaggtagttaaacctccctaccctaaaatcaggagagctagtggaaggctggctgggaggaaggtctttgtggagatccctaaaaagaaatatacgagaagactccgagagcagcagaaaactgctgagggtgatgtgggggactacaggtgtccccaggaccaaagcccggacagggtgggcacggagatggagcaggtttccaaaaatgagggttgccaggcaggtgctgagttggaggaattgtcaaagaaagcagggccggaggaggaagaggaggaggaggaggaggacgaagaaggggagaagaagaagagcaactttaagtgcagcatttgcgagaaggcgtttctgtatgagaagagcttcctgaagcacagcaagcaccgccacggcgtggccaccgaggtggtgtaccgctgcgacacctgcggccagaccttcgccaaccgctgcaacctgaagagccaccagcgccacgtgcacagcagcgagcgccatttcccatgcgagctgtgcgggaagaagttcaagcgcaagaaggacgtgaagcggcacgtgctgcaggtgcatgagggcggcggcgagcggcaccgctgcggccagtgcggcaagggcctgagttccaagacagcgctgcggctgcacgagcgcacacacacgggagaccggccctacggctgcaccgagtgcggcgccaggttctcgcagccgtccgcgctcaagacgcacatgaggtgaaagaccttttatgtgtgaaacatgtggcaagagttttgcttctaaggagtacttaaaacaccacaatagaatccatactggatccaaaccctttaaatgtgaagtatgtttcaggacttttgcccagcggaattcactgtaccagcatattaaagtccacacaggggagcgtccctactgctgtgaccagtgcggcaagcagttcacccagctcaacgccctccagcgccaccgccgcatccacacaggggagaggccattcatgtgcaatgcgtgcggacggacattcaccgacaagtccactcttcggcggcacacctcaatacacgataagaatactccatggaagtctttccttgtcattgtagatggctcgcccaagaacgatgacggacacaagactgaacagcctgacgaagagtatgtgtcatccaagctttcggataaattgctgtcttttgcagaaaatggccatttccacaacctggctgcagtccaagacactgtacctaccatgcaggagaacagttctgctgacacagcctgcaaggcagatgactccgtggtgtcccaggacaccctcctggccaccaccatcagtgagcttagcgagctgaccccacagacagactcgatgcccacacagcttcactctttgagcaacatggaataagagcttcaagcagttcccatcctgttagtctgcgtgtgtggtagctgaactcaagatgatgtggggctaagaaaaataattgtccatgtgcaaagatgtgggcaagaatggcctctgcagattttcctgaacttctgctaacttgcacggctttatcacagcatttttaaagctttccctcaaaaatcctgatctgcatgatctcagctactttattgacaaaaaggcagtgaacataacctcacttaattctggtgtagggtgtatgtgctaatcgttctaattcttgattacctagtttatagataactgctggtcttaattgcagagtacagagaactgaaccagctcctgatattgtagttagcagtcttcctggcttctcactctgccttatatttccatgtgggtttacttctctcataactactttcaaggtatttttcttccaagctgaaataaaactggggccacatattttcagtcatttcttccctgttgaattgaagcaaatcagattttctgtggggaccctcaaatgcaactgaagaaatagattgttgcattcattcctccccaccccccatttgtaggcagtaaacaaagtatgactgacagattgaacacctgcaaaactgctagcgtaatctcagcacatacgcagctaggaagtttgtcataaaatcaacttagaaatgagatgaggctgttcagtttgtcttaaaaaaatcagattaggtaaaagctgtcctaccaaagagtctagcaaaacaatatagtatttttttgcagaggcatgaaaaattaagacgctttagagtacttgaaagttgtgtagtcattttatttgcaaaatgaggtgactgtggcaaattatagaacacagagtattattacttttgccaggtttttctgacttgatttctgtaatttccagaaacccagacttctcatttccacacctagagatggaaacaggcaagtaactgacatgtctatttccttgggagcatgtgagaacatagcagtagggaccaaaagtctcagcacacttacctccgattatgccttaaagagttgattgtgaagaaccagtaactttgtcccaaatgcttctttggctgtttcatgcaggacttaattattgcttttaaaaattcacaatgaaaagacgattctgctgtatttgttaaacgttgacatttggttctagggccttgagtatgtgccacgtgcttgtgaaatgctatgattcacatgtaacatttaaacattaatttaaaaagggaaccttggagaattcttttgttcactagttccttttttctctacatttttaatttattaaacttgctgtgaaaacactttgattttctaagaggaaggtactttaagttccaggatgaacatgtagctgcactatgccagaaattaatgagggaagactttcttcctaagtgcttatgttttaacttatgttagtgaaaccactacaaggtgtttcaggcgctgataacatgcttcacacctgcccttggaggtcacagtactaatttacttcaaatttagttatgacagtgtcactgtatcctagttatgtttacagcacaaataaataatgactgtcatacatccagaggagaccgaacctgcccagctgatgtactgttttatggaataaagtcacttgatcagaaggaattgaaacaatagatcattttgttacctactggagggatttttgtcttgaatttgtttccttagaaattctacaaaaaaatgttgttaataaatgtctgctttgtaaaagcagttttgcaattttttaaagatctatttctgttataatttaggttctgcagaaatatgattcttaattgaaacatataatttgcttaattacgtgaataatgaaatgtaaaatccgggtccataagcctttatttcatacagtcctaggattaagctgtttaactgcttggatcccagttggtctctggcagtgggatcctggagaggagaaatcctggcctctgctcatgcgcaggccacaaccgggctggaagtgcggttgagctctctgccactttcttcaatgtaaaaagtaggcatcaaagatacgacttctactatatacatttctctgtccctgagaacagagaaacgtaaccctgtaggggactggttacagaggacctcctggagcatctgccccattcctccaagtccaagcacagccatgctgagtggaagcgaggccaccatctgagtggattggtcccaagtgtgtaatgaggaaagtggccaggtgccggcacagtgcctctcccagagcctcaagaagggccatttaggagcttgcttcaaccattttccaaccattttctgtgaaatgctgtcagcccaaactccaaagggatgtgcagcctttcgttttaccaaattctttgctgtcgtttggaaaaaatgggccatgtggtggagacctttatttaaggtgatttttacagaaatgtgattttgctgtaggtgattatccaaacaagtaaatttgagtgtataatttaatttttaacctgttaaataaaccttgtccctccaaggagttcatttttgggaaaca

SEQ ID NO: 370007 - DNA, 5161 bp, Homo sapiens
ctctgtggacctgcgcgtctcggggatgcgggagcgggggcagggggcggcccgagggcctgatccacgcggccccggatgcccgcgtcgggaggcggcgcgtcgggccgaggaggggcttctctgtggctgcagtagtttgttctctgggtcgtctttggagtggccgagcggcgtccgggcgctggggcggccaagtggcgcgggaagggtgggaggtgccgtgagggcggcgaggacagcggcggatttaagccccactggaaaccccggcccttgtggccgtggactgggctgcgggtagcagcgtctcctggaagggctctggccccgtgagcctcggggattcaggggccgccgacgttggtgcagatgccgggcgcactgggaggcggccggaatgccaatgagattcggcggatacgcagctgtcaccggccgcagactgccctgtcgccacctccagtgcctgcactccagtagccaagcaacataggaaatcgcgctcagaacccactttgttgattgagaaatcagacacgttgaatccgaggtgacatctgtggtctggccgaaggaggctagaaggaaggcatgtgctttggatggatggaaacaggaatcaaagaggaagctgtttttggaaggaagaaagatggaaagcggtgcagttctgctggaatccaaatcctccccatttaacctactgcatgagatgcatgagcttcgcctcctgggtcacctgtgtgacgtgacagtcagcgtggagtatcagggtgtccgcaaagacttcatggcccacaaggcagtgctggctgccaccagcaagttttttaaggaagtgttccttaatgagaagagtgtggatggtactaggactaatgtctacttaaatgaagtgcaggttgctgactttgcttcatttcttgagtttgtctacactgcaaaggtacaggtggaagaagatcgggtgcagcgaatgctggaagtggctgaaaagctgaaatgtttggatttatcagaaacttgttttcaattaaagaaacagatgttagagtcagtacttttggagttgcaaaatttctcagagtctcaggaggtggaggtgagcagtggctcccaagttagtgctgctcctgcccccagggcaagtgtggccaccgatggccctcaccccagtggtctcacggattccttggactacccaggagagagagccagcaatggcatgtcttcagatttgccaccgaagaagtccaaggacaaactagacaagaagaaagaggtagttaaacctccctaccctaaaatcaggagagctagtggaaggctggctgggaggaaggtctttgtggagatccctaaaaagaaatatacgagaagactccgagagcagcagaaaactgctgagggtgatgtgggggactacaggtgtccccaggaccaaagcccggacagggtgggcacggagatggagcaggtttccaaaaatgagggttgccaggcaggtgctgagttggaggaattgtcaaagaaagcagggccggaggaggaagaggaggaggaggaggaggacgaagaaggggagaagaagaagagcaactttaagtgcagcatttgcgagaaggcgtttctgtatgagaagagcttcctgaagcacagcaagcaccgccacggcgtggccaccgaggtggtgtaccgctgcgacacctgcggccagaccttcgccaaccgctgcaacctgaagagccaccagcgccacgtgcacagcagcgagcgccatttcccatgcgagctgtgcgggaagaagttcaagcgcaagaaggacgtgaagcggcacgtgctgcaggtgcatgagggcggcggcgagcggcaccgctgcggccagtgcggcaagggcctgagttccaagacagcgctgcggctgcacgagcgcacacacacgggagaccggccctacggctgcaccgagtgcggcgccaggttctcgcagccgtccgcgctcaagacgcacatgaggtgaaagaccttttatgtgtgaaacatgtggcaagagttttgcttctaaggagtacttaaaacaccacaatagaatccatactggatccaaaccctttaaatgtgaagtatgtttcaggacttttgcccagcggaattcactgtaccagcatattaaagtccacacagatacacgataagaatactccatggaagtctttccttgtcattgtagatggctcgcccaagaacgatgacggacacaagactgaacagcctgacgaagagtatgtgtcatccaagctttcggataaattgctgtcttttgcagaaaatggccatttccacaacctggctgcagtccaagacactgtacctaccatgcaggagaacagttctgctgacacagcctgcaaggcagatgactccgtggtgtcccaggacaccctcctggccaccaccatcagtgagcttagcgagctgaccccacagacagactcgatgcccacacagcttcactctttgagcaacatggaataagagcttcaagcagttcccatcctgttagtctgcgtgtgtggtagctgaactcaagatgatgtggggctaagaaaaataattgtccatgtgcaaagatgtgggcaagaatggcctctgcagattttcctgaacttctgctaacttgcacggctttatcacagcatttttaaagctttccctcaaaaatcctgatctgcatgatctcagctactttattgacaaaaaggcagtgaacataacctcacttaattctggtgtagggtgtatgtgctaatcgttctaattcttgattacctagtttatagataactgctggtcttaattgcagagtacagagaactgaaccagctcctgatattgtagttagcagtcttcctggcttctcactctgccttatatttccatgtgggtttacttctctcataactactttcaaggtatttttcttccaagctgaaataaaactggggccacatattttcagtcatttcttccctgttgaattgaagcaaatcagattttctgtggggaccctcaaatgcaactgaagaaatagattgttgcattcattcctccccaccccccatttgtaggcagtaaacaaagtatgactgacagattgaacacctgcaaaactgctagcgtaatctcagcacatacgcagctaggaagtttgtcataaaatcaacttagaaatgagatgaggctgttcagtttgtcttaaaaaaatcagattaggtaaaagctgtcctaccaaagagtctagcaaaacaatatagtatttttttgcagaggcatgaaaaattaagacgctttagagtacttgaaagttgtgtagtcattttatttgcaaaatgaggtgactgtggcaaattatagaacacagagtattattacttttgccaggtttttctgacttgatttctgtaatttccagaaacccagacttctcatttccacacctagagatggaaacaggcaagtaactgacatgtctatttccttgggagcatgtgagaacatagcagtagggaccaaaagtctcagcacacttacctccgattatgccttaaagagttgattgtgaagaaccagtaactttgtcccaaatgcttctttggctgtttcatgcaggacttaattattgcttttaaaaattcacaatgaaaagacgattctgctgtatttgttaaacgttgacatttggttctagggccttgagtatgtgccacgtgcttgtgaaatgctatgattcacatgtaacatttaaacattaatttaaaaagggaaccttggagaattcttttgttcactagttccttttttctctacatttttaatttattaaacttgctgtgaaaacactttgattttctaagaggaaggtactttaagttccaggatgaacatgtagctgcactatgccagaaattaatgagggaagactttcttcctaagtgcttatgttttaacttatgttagtgaaaccactacaaggtgtttcaggcgctgataacatgcttcacacctgcccttggaggtcacagtactaatttacttcaaatttagttatgacagtgtcactgtatcctagttatgtttacagcacaaataaataatgactgtcatacatccagaggagaccgaacctgcccagctgatgtactgttttatggaataaagtcacttgatcagaaggaattgaaacaatagatcattttgttacctactggagggatttttgtcttgaatttgtttccttagaaattctacaaaaaaatgttgttaataaatgtctgctttgtaaaagcagttttgcaattttttaaagatctatttctgttataatttaggttctgcagaaatatgattcttaattgaaacatataatttgcttaattacgtgaataatgaaatgtaaaatccgggtccataagcctttatttcatacagtcctaggattaagctgtttaactgcttggatcccagttggtctctggcagtgggatcctggagaggagaaatcctggcctctgctcatgcgcaggccacaaccgggctggaagtgcggttgagctctctgccactttcttcaatgtaaaaagtaggcatcaaagatacgacttctactatatacatttctctgtccctgagaacagagaaacgtaaccctgtaggggactggttacagaggacctcctggagcatctgccccattcctccaagtccaagcacagccatgctgagtggaagcgaggccaccatctgagtggattggtcccaagtgtgtaatgaggaaagtggccaggtgccggcacagtgcctctcccagagcctcaagaagggccatttaggagcttgcttcaaccattttccaaccattttctgtgaaatgctgtcagcccaaactccaaagggatgtgcagcctttcgttttaccaaattctttgctgtcgtttggaaaaaatgggccatgtggtggagacctttatttaaggtgatttttacagaaatgtgattttgctgtaggtgattatccaaacaagtaaatttgagtgtataatttaatttttaacctgttaaataaaccttgtccctccaaggagttcatttttgggaaaca

SEQ ID NO: 370008 - DNA, 524 bp, Homo sapiens
atagggaatcaagacaccaagccacttcagccataaatcttattcttgcacctttttttcttgctagtaattttatatagcaggttgagaaagctactctatgctagtatagactatacaccaataattttgataatgagttctaggatgtatttttcttgtatctttttcttcctactatgatactagtaattcataagggatctgtgtaatctgaatgtatttgaataactttagctctactgtttgatttgacccaaagaagccaagatgatataagtattcccatgtgtcttagaagcccaaagtcagtgagatgaaacccaacatcaagaaattgaagcaaagttacttatggataaagaaagcattaggtagttgggctatagcataattagattttctggctttcaaaaatttggattgcaatcacagcaaactttgttatttttacagttttcagtacaaaagtgtttatatagaaacaataaagttgacatttgagtaccttttaaaaattgttc

SEQ ID NO: 370009 - DNA, 531 bp, Homo sapiens
cctcagtgcagtttattcctgggtaacggagcccttgccctgccagtaccaccctgggagctcctctgctctatggtgctcatcactggatcccttcctttagtggggccaaacttagttggtcaccaaatcttagtctaccacagaaatggtttttgcttttgaatctggtttcccctctctttctccactgccttttgttttttcgggtccctgttatctctcacctggtgtcttgccacaaacttctgactgttctgtttcttttcttcctcttttccttccaagtctgtcctcagcataatcaccagagtgatcatcttaaaaaaaaaaaaaaagaaaaaaaaaacctggccaagttatgttaatgctttaaaacctggctacgtgttgtctgtagatttaagtccaagtgtgacatacaagtaagtttttttgggatctggaggatgaggagagatgtaggtaagtttcctgtccctggagtaaaacctggcacactttttgctatgggtgttatgtagaagacaa

SEQ ID NO: 370010 - DNA, 471 bp, Homo sapiens
aggtttttccccagtcccgccgttgtaaaccgccgcccagtgatttgtaatccccctcccctatagggcgatttgggacccgggcccccccctcaagttttttttctttttcgtccttttccccggttgctgcttgctgtgagtgtctctagggtgatacgtgggtgagaaaggtcctggtccgcgccagagcccagcgcgcctcgtcgccatgcctcggaaaattgaggaaatcaaggacttcctgctcacagcccgacgaaaggatgccaaatctgtcaagatcaagaaaaataaggacaacgtgaagtttaaagttcgatgcagcagatacctttacaccctggtcatcactgacaaagagaaggcagagaaactgaagcagtccctgccccccggtttggcagtgaaggaactgaaatgaaccagacacactgattggaactgtattatattaaaatactaaaaatc

SEQ ID NO: 370011 - DNA, 365 bp, Homo sapiens
agtaggtctagtacgaggctgggtgggctgctgtgagtgtctctagggtgatacgtgggtgagaaaggtcctggtccgcgccagagcccagcgcgcctcgtcgccatgcctcggaaaattgaggaaatcaaggacttcctgctcacagcccgacgaaaggatgccaaatctgtcaagatcaagaaaaataaggacaacgtgaagtttaaagttcgatgcagcagatacctttacaccctggtcatcactgacaaagagaaggcagagaaactgaagcagtccctgccccccggtttggcagtgaaggaactgaaatgaaccagacacactgattggaactgtattatattaaaatactaaaaatc

SEQ ID NO: 370012 - DNA, 427 bp, Homo sapiens
agtggaacgcctacatgagtcttgatcctcggcaggcaccgtacccagtttcctccgttgggagggtttaactgcccggaaacggaagtctcgttcctttttcgtccttttccccggttgctgcttgctgtcctggtccgcgccagagcccagcgcgcctcgtcgccatgcctcggaaaattgaggaaatcaaggacttcctgctcacagcccgacgaaaggatgccaaatctgtcaagatcaagaaaaataaggacaacgtgaagtttaaagttcgatgcagcagatacctttacaccctggtcatcactgacaaagagaaggcagagaaactgaagcagtccctgccccccggtttggcagtgaaggaactgaaatgaaccagacacactgattggaactgtattatattaaaatactaaaaatc

SEQ ID NO: 370013 - DNA, 356 bp, Homo sapiens
gctgcaggaattcggacgaggctgtgagtgtctctagggtgatacgtgggtgagaaaggtcctggtccgcgccagagcccagcgcgcctcgtcgccatgcctcggaaaattgaggaaatcaaggacttcctgctcacagcccgacgaaaggatgccaaatctgtcaagatcaagaaaaataaggacaacgtgaagtttaaagttcgatgcagcagatacctttacaccctggtcatcactgacaaagagaaggcagagaaactgaagcagtccctgccccccggtttggcagtgaaggaactgaaatgaaccagacacactgattggaactgtattatattaaaatactaaaaatc

SEQ ID NO: 370014 - DNA, 570 bp, Homo sapiens
  misc_feature (11)..(11): n is a, c, g, or t
  misc_feature (22)..(22): n is a, c, g, or t
ggagcactccncccaggctggnagtgtagtggcatgatctcggctcactgcaatctctgcctcccgggttcaagcttgtccaggttgatcttgaactcctgacctcgtgatctacccactcggcctcccaaaatgctgggattacaggggtgagccaccgtgcccaacctcacttgcttcttatccttacactcccacagtaatcttcctcacttctgcgagaagacgacagaaggggagagtgtctctagggtgatacgtgggtgagaaaggtcctggtccgcgccagagcccagcgcgcctcgtcgccatgcctcggaaaattgaggaaatcaaggacttcctgctcacagcccgacgaaaggatgccaaatctgtcaagatcaagaaaaataaggacaacgtgaagtttaaagttcgatgcagcagatacctttacaccctggtcatcactgacaaagagaaggcagagaaactgaagcagtccctgccccccggtttggcagtgaaggaactgaaatgaaccagacacactgattggaactgtattatattaaaatactaaaaatc

SEQ ID NO: 370015 - DNA, 378 bp, Homo sapiens
  misc_feature (34)..(34): n is a, c, g, or t
ttcttttcggacctttattttctgtttgctgctnggctagagagagaactcggggggtgtatactgtgggtcgagataaggtcctggtccgcgccagagcccagcgcgcctcgtcgccatgcctcggaaaattgaggaaatcaaggacttcctgctcacagcccgacgaaaggatgccaaatctgtcaagatcaagaaaaataaggacaacgtgaagtttaaagttcgatgcagcagatacctttacaccctggtcatcactgacaaagagaaggcagagaaactgaagcagtccctgccccccggtttggcagtgaaggaactgaaatgaaccagacacactgattggaactgtattatattaaaatactaaaaatc

SEQ ID NO: 370016 - DNA, 319 bp, Homo sapiens
gcggccgcctactactactactactgctcgaattcaagcttctaacgatgtacggggacatgcctcggaaaattgaggaaatcaaggacttcctgctcacagcccgacgaaaggatgccaaatctgtcaagatcaagaaaaataaggacaacgtgaagtttaaagttcgatgcagcagatacctttacaccctggtcatcactgacaaagagaaggcagagaaactgaagcagtccctgccccccggtttggcagtgaaggaactgaaatgaaccagacacactgattggaactgtattatattaaaatactaaaaatc

SEQ ID NO: 370017 - DNA, 498 bp, Homo sapiens
tctctccccttttccttcagagtgaatcatccagactcctcatggataggtcgggtgttaaagttgttttgattatgtaccttttgatcgatccacataaaaagaaatgtgaagtcttcttttactatctttcatttatcaagcagagacctttgttgggaggcggtttgggagaacacatttctaatttgaatgaaatgaaatctattttcagtgaaaacttgttgactttgaaaaaaagcctcggaaaattgaggaaatcaaggacttcctgctcacagcccgacgaaaggatgccaaatctgtcaagatcaagaaaaataaggacaacgtgaagtttaaagttcgatgcagcagatacctttacaccctggtcatcactgacaaagagaaggcagagaaactgaagcagtccctgccccccggtttggcagtgaaggaactgaaatgaaccagacacactgattggaactgtattatattaaaatactaaaaatc

SEQ ID NO: 370018 - DNA, 397 bp, Homo sapiens
gcggccgcctactactactactactgctcgaattcaagcttctaacgatgtacggggacatggtagtttcaaaaaataaatattcaaggccccagttttaaattttcctccaatgtaatccacaaagttgataatacatgcctcggaaaattgaggaaatcaaggacttcctgctcacagcccgacgaaaggatgccaaatctgtcaagatcaagaaaaataaggacaacgtgaagtttaaagttcgatgcagcagatacctttacaccctggtcatcactgacaaagagaaggcagagaaactgaagcagtccctgccccccggtttggcagtgaaggaactgaaatgaaccagacacactgattggaactgtattatattaaaatactaaaaatc

SEQ ID NO: 370019 - DNA, 247 bp, Homo sapiens
cgcctactactactatacgggtgcgagaagacgacagaagggatgccaaatctgtcaagatcaagaaaaataaggacaacgtgaagtttaaagttcgatgcagcagatacctttacaccctggtcatcactgacaaagagaaggcagagaaactgaagcagtccctgccccccggtttggcagtgaaggaactgaaatgaaccagacacactgattggaactgtattatattaaaatactaaaaatc

SEQ ID NO: 370020 - DNA, 850 bp, Homo sapiens
  misc_feature (850)..(850): n is a, c, g, or t
agtaggtctagtacgaggctgggtgggctgctgtgagtgtctctagggtgatacgtgggtgagaaaggtcctggtccgcgccagagcccagcgcgcctcgtcgccatgcctcggaaaattgaggaaatcaaggacttcctgctcacagcccgacgaaaggatgccaaatctgtcaagatcaagaaaaataaggacaacgtgaagtttaaagttcgatgcagcagatacctttacaccctggtcatcactgacaaagagaaggcagagaaactgaagcagtccctgccccccggtttggcagtgaaggaactgaaatgaaccagacacactgattggaactgtattatattaaaatactaaaaatcaaaaaaaaaaaaaaaaaaaaaaaaaaaaaaaaagaaaaaaaaaaaaaaaaaaaaaaaaaaaaaaaaaaaaaaaaaagaaacaagggggggggggcaaaaaatcccccgggggggcccattggccccttttttgtgtgtacccagggtggcgcccctaaaggggggccgcgaattttaaagcgaaggagcggggggcgcggcgcgttaaaaacaaaacgcgcgcggtgataggggggaaaagaccgtgctctactctggggacacttctttgggggaagaggcacccccttaacttttcgggggggcggggccactcatctggggcacaaacctcacctcatgagaaatttaaagcgactcacaggaacaatctacacaatttcaagctggctctaaggggtggaacccaacggaatatgctgccgctgaaaaaattgggcaacgaaatatgattcagaaaaattacgagctttgtaaaataaagn

SEQ ID NO: 370021 - DNA, 227 bp, Homo sapiens
ttcggctggagagacacgagtgatgccaaatctgtcaagatcaagaaaaataaggacaacgtgaagtttaaagttcgatgcagcagatacctttacaccctggtcatcactgacaaagagaaggcagagaaactgaagcagtccctgccccccggtttggcagtgaaggaactgaaatgaaccagacacactgattggaactgtattatattaaaatactaaaaatc

SEQ ID NO: 370022 - DNA, 298 bp, Homo sapiens
  misc_feature (37)..(37): n is a, c, g, or t
  misc_feature (74)..(75): n is a, c, g, or t
  misc_feature (79)..(80): n is a, c, g, or t
  misc_feature (91)..(91): n is a, c, g, or t
  misc_feature (99)..(99): n is a, c, g, or t
atcccccggggggttaaaaccccccccaaaagggggnaaaaaaaaaagggggggggggggaaaaattttggggnncccnncccaaaaaaanaaattttnccgctgtcaagatcaagaaaaataaggacaacgtgaagtttaaagttcgatgcagcagatacctttacaccctggtcatcactgacaaagagaaggcagagaaactgaagcagtccctgccccccggtttggcagtgaaggaactgaaatgaaccagacacactgattggaactgtattatattaaaatactaaaaatc

SEQ ID NO: 370023 - DNA, 244 bp, Homo sapiens
cggcacgaggctggcctccaaacactgcccgccgaaaggatgccaaatctgtcaagatcaagaaaaataaggacaacgtgaagtttaaagttcgatgcagcagatacctttacaccctggtcatcactgacaaagagaaggcagagaaactgaagcagtccctgccccccggtttggcagtgaaggaactgaaatgaaccagacacactgattggaactgtattatattaaaatactaaaaatc

SEQ ID NO: 370024 - DNA, 601 bp, Homo sapiens
cttcgataccatattgtgagcggtataataagtattgttacacagtggtagtgcaatcccccgacctgaagcatttttgaaaattcaattggtctgtcctgtggagcaggcagtgatttggttccaaaacttggtatacacatttggagaaaagtactttatatttccagtgttttgtctgattttaatgtccgttcttagccaagctgctagcaggtgttaattggatccctttccttcactgaaatggaagagtttataagcttacgttagtattgtaatatgtaaagtaagcccaacaaaaatttttaaaaatttgatgatccccaatatatctaccattgtatgttaaataaatcaccatttttgtagaaaagctcacagcccgacgaaaggatgccaaatctgtcaagatcaagaaaaataaggacaacgtgaagtttaaagttcgatgcagcagatacctttacaccctggtcatcactgacaaagagaaggcagagaaactgaagcagtccctgccccccggtttggcagtgaaggaactgaaatgaaccagacacactgattggaactgtattatattaaaatactaaaaatc

SEQ ID NO: 370025 - DNA, 435 bp, Homo sapiens
  misc_feature (405)..(406): n is a, c, g, or t
  misc_feature (414)..(415): n is a, c, g, or t
  misc_feature (420)..(420): n is a, c, g, or t
gctgcaggaattcggacgaggctgtgagtgtctctagggtgatacgtgggtgagaaaggtcctggtccgcgccagagcccagcgcgcctcgtcgccatgcctcggaaaattgaggaaatcaaggacttcctgctcacagcccgacgaaaggatgccaaatctgtcaagatcaagaaaaataaggacaacgtgaagtttaaagttcgatgcagcagatacctttacaccctggtcatcactgacaaagagaaggcagagaaactgaagcagtccctgccccccggtttggcagtgaaggaactgaaatgaaccagacacactgattggaactgtattatattaaaatactaaaaatcaaaaaaaaaaaaaaaaaaaaaaaaaaaaaaaaaaaaaaagaacgggggnnttttttgnnggggngggagaaaaaagagg

SEQ ID NO: 370026 - DNA, 503 bp, Homo sapiens
  misc_feature (34)..(34): n is a, c, g, or t
  misc_feature (402)..(403): n is a, c, g, or t
ttcttttcggacctttattttctgtttgctgctnggctagagagagaactcggggggtgtatactgtgggtcgagataaggtcctggtccgcgccagagcccagcgcgcctcgtcgccatgcctcggaaaattgaggaaatcaaggacttcctgctcacagcccgacgaaaggatgccaaatctgtcaagatcaagaaaaataaggacaacgtgaagtttaaagttcgatgcagcagatacctttacaccctggtcatcactgacaaagagaaggcagagaaactgaagcagtccctgccccccggtttggcagtgaaggaactgaaatgaaccagacacactgattggaactgtattatattaaaatactaaaaatctaaaacatgaatctaaatggctgnnggagaggtcaggtttgggccccccgttactgcagatgaaggcagaagtcattctctcccccacccctcaacttcttcagagatgtggagataggaggctt

SEQ ID NO: 370027 - DNA, 974 bp, Homo sapiens
  misc_feature (655)..(655): n is a, c, g, or t
  misc_feature (675)..(675): n is a, c, g, or t
  misc_feature (681)..(682): n is a, c, g, or t
  misc_feature (784)..(784): n is a, c, g, or t
  misc_feature (860)..(860): n is a, c, g, or t
  misc_feature (907)..(907): n is a, c, g, or t
  misc_feature (971)..(971): n is a, c, g, or t
cttcgataccatattgtgagcggtataataagtattgttacacagtggtagtgcaatcccccgacctgaagcatttttgaaaattcaattggtctgtcctgtggagcaggcagtgatttggttccaaaacttggtatacacatttggagaaaagtactttatatttccagtgttttgtctgattttaatgtccgttcttagccaagctgctagcaggtgttaattggatccctttccttcactgaaatggaagagtttataagcttacgttagtattgtaatatgtaaagtaagcccaacaaaaatttttaaaaatttgatgatccccaatatatctaccattgtatgttaaataaatcaccatttttgtagaaaagctcacagcccgacgaaaggatgccaaatctgtcaagatcaagaaaaataaggacaacgtgaagtttaaagttcgatgcagcagatacctttacaccctggtcatcactgacaaagagaaggcagagaaactgaagcagtccctgccccccggtttggcagtgaaggaactgaaatgaaccagacacactgattggaactgtattatattaaaatactaaaaatcaaaaaaaaaaaaaaaaaaaaaaaaaaaaaaaaagaaagcggccgctcgaatggnggacgcggccgcgaattcgngcggcnnaggggctgcgagaagacgacagaagggctccacactagcagagaccaaccgaacccccttcgaccttgccgaagggagtccgaactagtctcaggcttcaanatcgaatacgccgcaggcccttcgccctattcttcatagccgaatacacaaacattattataataaacaccctcancactacaatcttcctaggaacaacgtatgacgcactctcccctgaantctacacaacatattttgtcaccaagaccctacttctcctccctattcttatgaattcgcagcntcc

SEQ ID NO: 370028 - DNA, 971 bp, Homo sapiens
  misc_feature (237)..(237): n is a, c, g, or t
  misc_feature (276)..(276): n is a, c, g, or t
  misc_feature (295)..(295): n is a, c, g, or t
  misc_feature (321)..(321): n is a, c, g, or t
  misc_feature (330)..(330): n is a, c, g, or t
  misc_feature (333)..(333): n is a, c, g, or t
  misc_feature (354)..(354): n is a, c, g, or t
  misc_feature (380)..(380): n is a, c, g, or t
  misc_feature (382)..(382): n is a, c, g, or t
  misc_feature (388)..(389): n is a, c, g, or t
  misc_feature (458)..(458): n is a, c, g, or t
  misc_feature (474)..(474): n is a, c, g, or t
gcttgatcttgacagattggcatcctttcgtcgggctgtgagcagtgaagtttaaagttcgatgcagcagatacctttacaccctggtcatcactgacaaagagaaggcagagaaactgaagcagtccctgccccccggtttggcagtgaaggaactgaaatgaaccagacacactgattggaactgtattatattaaaatactaaaaatcaaaaaaaaaaaaaaaaaaaaaaaacncgagagtagtttcttcttcctcttctttttcttcccccntgttaaagcaagagatggnttagtgcttcattccagccaaagagnctcgaaggnggnttctggaaccttggggggggncgggaggtggttcggggggaatgacnancttcgnncgggaggaaacttcaggggcggggtgggctttgggtgggcagcccgtgggtgggtggggtgggatcatnggtgggcagggggganggcgtcataacgggctttgggtcactcgctgagacacgcccacttgccggcagggtgggctgggaccgctcacaaatgcttttgggcacttacacacaatccagtctcccaactttgtggcccctcgaaagggcggcactctgtcggcggcagacagctctggccccctattgcgggtggacggcccaattacctgtggcaaatacgccaggaaaccaagggtggcaatggggggtccccgccgggcccagtagcttatggcacgtgggcgcacaacttttattcggcacacccacgctttgcagggggagggctaccccgagagtgccggccgctcacggttccccggttgtgacctcggccagccggttggcggctcgttcacagcacctgtctgcgccatccctggttggcacacccggcgttggctctggtacgggttgccgcggagggacccacagtcgcatttgccgcgtgtcgcacgtcgacgttacaac

SEQ ID NO: 370029 - DNA, 292 bp, Homo sapiens
cgcctactactactatacgggtgcgagaagacgacagaagggatgccaaatctgtcaagatcaagaaaaataaggacaacgtgaagtttaaagttcgatgcagcagatacctttacaccctggtcatcactgacaaagagaaggcagagaaactgaagcagtccctgccccccggtttggcagtgaaggaactgaaatgaaccagacacactgattggaactgtattatattaaaatactaaaaatcaaagaaaaaatattaactaaataaaaaaaaaaaagtcgtatcgat

SEQ ID NO: 370030 - DNA, 468 bp, Homo sapiens
  misc_feature (390)..(390): n is a, c, g, or t
taataaggttgatagaagatattctgtaatgttgtgttcagtgtacccaataaaagtcccaagttggaggaacgggtaatagtgttttctgtttgcacagagggatggtactggaggtgggtgctgtctcctgcatgctgcttactgcttgagtgtatttgcacatggactgtgtcacatctgttttctgtgatacaatttaattcctgattctggtctccggtagctgtcaagatcaagaaaaataaggacaacgtgaagtttaaagttcgatgcagcagatacctttacaccctggtcatcactgacaaagagaaggcagagaaactgaagcagtccctgccccccgtttggcagtgaaggaactgaaatgaaccagacactttgcanccaggacactttgcatccagagacactttgcatccagagacactagcatccggagacacttgcatccgagtcagtcct

SEQ ID NO: 370031 - DNA, 198 bp, Homo sapiens
  misc_feature (36)..(37): n is a, c, g, or t
tattcctattatacacgagcacgaagaggatgccanntctgtcaagatcaagaaaaataaggacaacgtgaagtttaaagttcgatgcagcagatacctttacaccctggtcatcactgacaaagagaaggcagagcctgcagtgagcccagatcgcgccactgcactccagcttgggcgacagtgagactccaccac

SEQ ID NO: 370032 - DNA, 210 bp, Homo sapiens
aaagtgtttccttccaggaacttttttttggggggggacagagtctcgctctgtcgcccaggctggaatgcagtggcgcgacctggtcatcactgacaaagagaaggcagagaaactgaagcagtccctgccccccggtttggcagtgaaggaactgaaatgaaccagacacactgattggaactgtattatattaaaatactaaaaatc

SEQ ID NO: 370033 - DNA, 3017 bp, Homo sapiens
  misc_feature (1211)..(1211): n is a, c, g, or t
  misc_feature (2090)..(2091): n is a, c, g, or t
  misc_feature (2139)..(2139): n is a, c, g, or t
aactcaggggcgagctgcaactaactcaggagccatctcgatctcactcaggtactgagcagacactttttcgtccttttccccggttgctgcttgctgtgagtgtctctagggtgatacgtgggtgagaaaggtcctggtccgcgccagagcccagcgcgcctcgtcgccatgcctcggaaaattgaggaaatcaaggacttcctgctcacagcccgacgaaaggatgccaaatctgtcaagatcaagaaaaataaggacaacgtgaagtttaaagttcgatgcagcagatacctttacaccctggtcatcactgacaaagagaaggcagagaaactgaagcagtccctgccccccggtttggcagtgaaggaactgaaatgaaccagacacactgattggaactgtattatattaaaatactaaaaatcctaagtgtctttcgtctttgcggatgggaaagggaaaaatgctacctcgtagtggcttctgatgggaacaggacgcgggttctgttgctgccttcctgtgtcttttttttttttttttttttcctttctttgagacggagtcttgctctgtggctcatcctggagcacagtggtgcgatatcagctcactaccacctccgcctcctgggttcaagcgactgtcctgcctcagcctcccgagtggctgggattacaggcacacatcaccacgcctggccaatttttgtatttgtagtagagacagggtttcactgcctgcctcagcctcccatagtgctgggattacaggcatgagcctccgtgcccggtgcatccctaatcttgagcatgatctcagtcggcaaatgaggccatctgttttcagcctgtttgaaaataagatgtggggaggccatgatggaaatagcacgtggggttaaacataactggcagatgtgggagcgatggtggggcatgccattcaaacaggtcccaaaatgggtgcaacaaggtatagcacatctaccactcgctaacttgactgacttggagaaatgactacacttttgcctgtttcctcagttggaaaatagccatattaacacctctttcattggcttgctgtcagggtactgggatggggggaggtgcatgggttggggtggccaccaggtggtgctgtgccacagcgggcagcccctctggaaatgactggcatcataaaatctgtcttcatacccnaggtagtgttttttgtttttttaagatctctaccttttaaaagcgtggcatacagtgtgcttggtattgtgttaggcatttagacgtgctcaggttgtaaggttgaagtgccagtctttgaatattctgtaaggattgtgagggtgtgaggtggttttgagtctggtcacgggtcttgtttcctccgggagagggtgggtacaccagccctcaggcccaggtgcggcactgtgggcggctttcagcctttcccgttctgtaagcattgcagattcccaaggaaaagcgagcctttaccatgtgggttttctttgttcccagcacatcgtccagagtttcatcccagctcctaggagacaggccttgcaggggtgtgtccagccttgtctagagaaggccgcctttcatgcagtgcttcccagccctggcttgtgactcagtcatctggggcacttaggcagttcactgtggtggccagggctgactggagattgcgattgcggtggtctggggcataggtgtgtttccaagctctcaggtgggcctctgctttgctgggcttcagcaagcccttaagtgctgcataccaggtgaatggggaggggggaggtgatgggctacagctgctggtgtgccgactgtcctccaactccctgctgagtctgtgggaggtctgtctgttgtgcttcagctttttgacacctctctgggtcagcaggcctccggggaagcagctagaatggtcgctgtctggctgggtgcaggtgggctgacaggtttggatattccaggccgcattccggtggctgtggagatagccctgagggacagcctttgcagtttgtttcttccagtgccgtgtgcagcctccagccttcnngggctcccttgccccgggttcaaagtcagtcctcggtgaccacccatncctaggagcagcccttcccacctggggggcctctgagggcaggggctgtaaaagcagctaccagaagagtccactttccccagcaactgcagggaccctgactcctgcttgtcctgcagcctgggctcctccctccgctggccaaagtcacgccaagcagtttgcggttaacaggacgggtgggggcctctgcatatgtgcagagtacggagggcccagggacgcgaggctccccgatgggcaacctcccctgcctttgcttttccccagagccccctcctggcctgcgttcggcatcttctcgggtcgtcatcgccctctgcggtgcctgcgctcggggtgagggtttttgtcggcttttgttacatcaccgatgtaacagtgcctggacgtagtaggtgctcaataaatatgttgttgaatgcgcttcagtctccccgaatgcttgtcccttccgggcgctctcatcgctctcctaccttccccgctacacagctcgaaggtcccctcctccgggaagctcaccctgtcccacttgccaggaagaatcaagcaaattttctgagtgagacaccttgtcctcactcaggcgtcctgcaggcggcttcagcgagttgttggggcagatgcgccgggagctcccgagggcagggacggcgtcttatttctctttttaagtccacagggcttgcacaatagatgcccaaaaaatgagagtgaatttagaatgagtgaccgagtggctgaagattgcctccttcctttcccagtctgtcggttacttaccctgtgacaagcccttgggacgggcagtcgcccctctctggcctatgactgctggctgcccccactgacaccttatacccttgcctcgtgcc

SEQ ID NO: 370034 - DNA, 2996 bp, Homo sapiens
  misc_feature (1190)..(1190): n is a, c, g, or t
  misc_feature (2069)..(2070): n is a, c, g, or t
  misc_feature (2118)..(2118): n is a, c, g, or t
ggaccgacactttactatatgcccaccacctctcatgccacctcctttttcgtccttttccccggttgctgcttgctgtgagtgtctctagggtgatacgtgggtgagaaaggtcctggtccgcgccagagcccagcgcgcctcgtcgccatgcctcggaaaattgaggaaatcaaggacttcctgctcacagcccgacgaaaggatgccaaatctgtcaagatcaagaaaaataaggacaacgtgaagtttaaagttcgatgcagcagatacctttacaccctggtcatcactgacaaagagaaggcagagaaactgaagcagtccctgccccccggtttggcagtgaaggaactgaaatgaaccagacacactgattggaactgtattatattaaaatactaaaaatcctaagtgtctttcgtctttgcggatgggaaagggaaaaatgctacctcgtagtggcttctgatgggaacaggacgcgggttctgttgctgccttcctgtgtcttttttttttttttttttttcctttctttgagacggagtcttgctctgtggctcatcctggagcacagtggtgcgatatcagctcactaccacctccgcctcctgggttcaagcgactgtcctgcctcagcctcccgagtggctgggattacaggcacacatcaccacgcctggccaatttttgtatttgtagtagagacagggtttcactgcctgcctcagcctcccatagtgctgggattacaggcatgagcctccgtgcccggtgcatccctaatcttgagcatgatctcagtcggcaaatgaggccatctgttttcagcctgtttgaaaataagatgtggggaggccatgatggaaatagcacgtggggttaaacataactggcagatgtgggagcgatggtggggcatgccattcaaacaggtcccaaaatgggtgcaacaaggtatagcacatctaccactcgctaacttgactgacttggagaaatgactacacttttgcctgtttcctcagttggaaaatagccatattaacacctctttcattggcttgctgtcagggtactgggatggggggaggtgcatgggttggggtggccaccaggtggtgctgtgccacagcgggcagcccctctggaaatgactggcatcataaaatctgtcttcatacccnaggtagtgttttttgtttttttaagatctctaccttttaaaagcgtggcatacagtgtgcttggtattgtgttaggcatttagacgtgctcaggttgtaaggttgaagtgccagtctttgaatattctgtaaggattgtgagggtgtgaggtggttttgagtctggtcacgggtcttgtttcctccgggagagggtgggtacaccagccctcaggcccaggtgcggcactgtgggcggctttcagcctttcccgttctgtaagcattgcagattcccaaggaaaagcgagcctttaccatgtgggttttctttgttcccagcacatcgtccagagtttcatcccagctcctaggagacaggccttgcaggggtgtgtccagccttgtctagagaaggccgcctttcatgcagtgcttcccagccctggcttgtgactcagtcatctggggcacttaggcagttcactgtggtggccagggctgactggagattgcgattgcggtggtctggggcataggtgtgtttccaagctctcaggtgggcctctgctttgctgggcttcagcaagcccttaagtgctgcataccaggtgaatggggaggggggaggtgatgggctacagctgctggtgtgccgactgtcctccaactccctgctgagtctgtgggaggtctgtctgttgtgcttcagctttttgacacctctctgggtcagcaggcctccggggaagcagctagaatggtcgctgtctggctgggtgcaggtgggctgacaggtttggatattccaggccgcattccggtggctgtggagatagccctgagggacagcctttgcagtttgtttcttccagtgccgtgtgcagcctccagccttcnngggctcccttgccccgggttcaaagtcagtcctcggtgaccacccatncctaggagcagcccttcccacctggggggcctctgagggcaggggctgtaaaagcagctaccagaagagtccactttccccagcaactgcagggaccctgactcctgcttgtcctgcagcctgggctcctccctccgctggccaaagtcacgccaagcagtttgcggttaacaggacgggtgggggcctctgcatatgtgcagagtacggagggcccagggacgcgaggctccccgatgggcaacctcccctgcctttgcttttccccagagccccctcctggcctgcgttcggcatcttctcgggtcgtcatcgccctctgcggtgcctgcgctcggggtgagggtttttgtcggcttttgttacatcaccgatgtaacagtgcctggacgtagtaggtgctcaataaatatgttgttgaatgcgcttcagtctccccgaatgcttgtcccttccgggcgctctcatcgctctcctaccttccccgctacacagctcgaaggtcccctcctccgggaagctcaccctgtcccacttgccaggaagaatcaagcaaattttctgagtgagacaccttgtcctcactcaggcgtcctgcaggcggcttcagcgagttgttggggcagatgcgccgggagctcccgagggcagggacggcgtcttatttctctttttaagtccacagggcttgcacaatagatgcccaaaaaatgagagtgaatttagaatgagtgaccgagtggctgaagattgcctccttcctttcccagtctgtcggttacttaccctgtgacaagcccttgggacgggcagtcgcccctctctggcctatgactgctggctgcccccactgacaccttatacccttgcctcgtgcc

SEQ ID NO: 370035 - DNA, 3169 bp, Homo sapiens
  misc_feature (1363)..(1363): n is a, c, g, or t
  misc_feature (2242)..(2243): n is a, c, g, or t
  misc_feature (2291)..(2291): n is a, c, g, or t
ggaccgacactttactatatgcccaccacctctcatgccacctcctttttcgtccttttccccggttgctgcttgctgtgagtgtctctagggtgatacgtgggtgagaaaggtaatctggggcaatccactgccaggtgaaatctggggaccccaggtccgcgtggagggtgtcggggaggagaaggggagtgcgatggggccgatatttcgggggagagcgggaaaacggggttcgctgccagcccccgcgccgtgttaacgccgaggactgtttcccgcagggtcctggtccgcgccagagcccagcgcgcctcgtcgccatgcctcggaaaattgaggaaatcaaggacttcctgctcacagcccgacgaaaggatgccaaatctgtcaagatcaagaaaaataaggacaacgtgaagtttaaagttcgatgcagcagatacctttacaccctggtcatcactgacaaagagaaggcagagaaactgaagcagtccctgccccccggtttggcagtgaaggaactgaaatgaaccagacacactgattggaactgtattatattaaaatactaaaaatcctaagtgtctttcgtctttgcggatgggaaagggaaaaatgctacctcgtagtggcttctgatgggaacaggacgcgggttctgttgctgccttcctgtgtcttttttttttttttttttttcctttctttgagacggagtcttgctctgtggctcatcctggagcacagtggtgcgatatcagctcactaccacctccgcctcctgggttcaagcgactgtcctgcctcagcctcccgagtggctgggattacaggcacacatcaccacgcctggccaatttttgtatttgtagtagagacagggtttcactgcctgcctcagcctcccatagtgctgggattacaggcatgagcctccgtgcccggtgcatccctaatcttgagcatgatctcagtcggcaaatgaggccatctgttttcagcctgtttgaaaataagatgtggggaggccatgatggaaatagcacgtggggttaaacataactggcagatgtgggagcgatggtggggcatgccattcaaacaggtcccaaaatgggtgcaacaaggtatagcacatctaccactcgctaacttgactgacttggagaaatgactacacttttgcctgtttcctcagttggaaaatagccatattaacacctctttcattggcttgctgtcagggtactgggatggggggaggtgcatgggttggggtggccaccaggtggtgctgtgccacagcgggcagcccctctggaaatgactggcatcataaaatctgtcttcatacccnaggtagtgttttttgtttttttaagatctctaccttttaaaagcgtggcatacagtgtgcttggtattgtgttaggcatttagacgtgctcaggttgtaaggttgaagtgccagtctttgaatattctgtaaggattgtgagggtgtgaggtggttttgagtctggtcacgggtcttgtttcctccgggagagggtgggtacaccagccctcaggcccaggtgcggcactgtgggcggctttcagcctttcccgttctgtaagcattgcagattcccaaggaaaagcgagcctttaccatgtgggttttctttgttcccagcacatcgtccagagtttcatcccagctcctaggagacaggccttgcaggggtgtgtccagccttgtctagagaaggccgcctttcatgcagtgcttcccagccctggcttgtgactcagtcatctggggcacttaggcagttcactgtggtggccagggctgactggagattgcgattgcggtggtctggggcataggtgtgtttccaagctctcaggtgggcctctgctttgctgggcttcagcaagcccttaagtgctgcataccaggtgaatggggaggggggaggtgatgggctacagctgctggtgtgccgactgtcctccaactccctgctgagtctgtgggaggtctgtctgttgtgcttcagctttttgacacctctctgggtcagcaggcctccggggaagcagctagaatggtcgctgtctggctgggtgcaggtgggctgacaggtttggatattccaggccgcattccggtggctgtggagatagccctgagggacagcctttgcagtttgtttcttccagtgccgtgtgcagcctccagccttcnngggctcccttgccccgggttcaaagtcagtcctcggtgaccacccatncctaggagcagcccttcccacctggggggcctctgagggcaggggctgtaaaagcagctaccagaagagtccactttccccagcaactgcagggaccctgactcctgcttgtcctgcagcctgggctcctccctccgctggccaaagtcacgccaagcagtttgcggttaacaggacgggtgggggcctctgcatatgtgcagagtacggagggcccagggacgcgaggctccccgatgggcaacctcccctgcctttgcttttccccagagccccctcctggcctgcgttcggcatcttctcgggtcgtcatcgccctctgcggtgcctgcgctcggggtgagggtttttgtcggcttttgttacatcaccgatgtaacagtgcctggacgtagtaggtgctcaataaatatgttgttgaatgcgcttcagtctccccgaatgcttgtcccttccgggcgctctcatcgctctcctaccttccccgctacacagctcgaaggtcccctcctccgggaagctcaccctgtcccacttgccaggaagaatcaagcaaattttctgagtgagacaccttgtcctcactcaggcgtcctgcaggcggcttcagcgagttgttggggcagatgcgccgggagctcccgagggcagggacggcgtcttatttctctttttaagtccacagggcttgcacaatagatgcccaaaaaatgagagtgaatttagaatgagtgaccgagtggctgaagattgcctccttcctttcccagtctgtcggttacttaccctgtgacaagcccttgggacgggcagtcgcccctctctggcctatgactgctggctgcccccactgacaccttatacccttgcctcgtgcc

SEQ ID NO: 370036 - DNA, 2917 bp, Homo sapiens
  misc_feature (1111)..(1111): n is a, c, g, or t
  misc_feature (1990)..(1991): n is a, c, g, or t
  misc_feature (2039)..(2039): n is a, c, g, or t
taaattcgcggccgcgtcgactgggtgagaaaggtcctggtccgcgccagagcccagcgcgcctcgtcgccatgcctcggaaaattgaggaaatcaaggacttcctgctcacagcccgacgaaaggatgccaaatctgtcaagatcaagaaaaataaggacaacgtgaagtttaaagttcgatgcagcagatacctttacaccctggtcatcactgacaaagagaaggcagagaaactgaagcagtccctgccccccggtttggcagtgaaggaactgaaatgaaccagacacactgattggaactgtattatattaaaatactaaaaatcctaagtgtctttcgtctttgcggatgggaaagggaaaaatgctacctcgtagtggcttctgatgggaacaggacgcgggttctgttgctgccttcctgtgtcttttttttttttttttttttcctttctttgagacggagtcttgctctgtggctcatcctggagcacagtggtgcgatatcagctcactaccacctccgcctcctgggttcaagcgactgtcctgcctcagcctcccgagtggctgggattacaggcacacatcaccacgcctggccaatttttgtatttgtagtagagacagggtttcactgcctgcctcagcctcccatagtgctgggattacaggcatgagcctccgtgcccggtgcatccctaatcttgagcatgatctcagtcggcaaatgaggccatctgttttcagcctgtttgaaaataagatgtggggaggccatgatggaaatagcacgtggggttaaacataactggcagatgtgggagcgatggtggggcatgccattcaaacaggtcccaaaatgggtgcaacaaggtatagcacatctaccactcgctaacttgactgacttggagaaatgactacacttttgcctgtttcctcagttggaaaatagccatattaacacctctttcattggcttgctgtcagggtactgggatggggggaggtgcatgggttggggtggccaccaggtggtgctgtgccacagcgggcagcccctctggaaatgactggcatcataaaatctgtcttcatacccnaggtagtgttttttgtttttttaagatctctaccttttaaaagcgtggcatacagtgtgcttggtattgtgttaggcatttagacgtgctcaggttgtaaggttgaagtgccagtctttgaatattctgtaaggattgtgagggtgtgaggtggttttgagtctggtcacgggtcttgtttcctccgggagagggtgggtacaccagccctcaggcccaggtgcggcactgtgggcggctttcagcctttcccgttctgtaagcattgcagattcccaaggaaaagcgagcctttaccatgtgggttttctttgttcccagcacatcgtccagagtttcatcccagctcctaggagacaggccttgcaggggtgtgtccagccttgtctagagaaggccgcctttcatgcagtgcttcccagccctggcttgtgactcagtcatctggggcacttaggcagttcactgtggtggccagggctgactggagattgcgattgcggtggtctggggcataggtgtgtttccaagctctcaggtgggcctctgctttgctgggcttcagcaagcccttaagtgctgcataccaggtgaatggggaggggggaggtgatgggctacagctgctggtgtgccgactgtcctccaactccctgctgagtctgtgggaggtctgtctgttgtgcttcagctttttgacacctctctgggtcagcaggcctccggggaagcagctagaatggtcgctgtctggctgggtgcaggtgggctgacaggtttggatattccaggccgcattccggtggctgtggagatagccctgagggacagcctttgcagtttgtttcttccagtgccgtgtgcagcctccagccttcnngggctcccttgccccgggttcaaagtcagtcctcggtgaccacccatncctaggagcagcccttcccacctggggggcctctgagggcaggggctgtaaaagcagctaccagaagagtccactttccccagcaactgcagggaccctgactcctgcttgtcctgcagcctgggctcctccctccgctggccaaagtcacgccaagcagtttgcggttaacaggacgggtgggggcctctgcatatgtgcagagtacggagggcccagggacgcgaggctccccgatgggcaacctcccctgcctttgcttttccccagagccccctcctggcctgcgttcggcatcttctcgggtcgtcatcgccctctgcggtgcctgcgctcggggtgagggtttttgtcggcttttgttacatcaccgatgtaacagtgcctggacgtagtaggtgctcaataaatatgttgttgaatgcgcttcagtctccccgaatgcttgtcccttccgggcgctctcatcgctctcctaccttccccgctacacagctcgaaggtcccctcctccgggaagctcaccctgtcccacttgccaggaagaatcaagcaaattttctgagtgagacaccttgtcctcactcaggcgtcctgcaggcggcttcagcgagttgttggggcagatgcgccgggagctcccgagggcagggacggcgtcttatttctctttttaagtccacagggcttgcacaatagatgcccaaaaaatgagagtgaatttagaatgagtgaccgagtggctgaagattgcctccttcctttcccagtctgtcggttacttaccctgtgacaagcccttgggacgggcagtcgcccctctctggcctatgactgctggctgcccccactgacaccttatacccttgcctcgtgcc

SEQ ID NO: 370037 - DNA, 2942 bp, Homo sapiens
  misc_feature (1136)..(1136): n is a, c, g, or t
  misc_feature (2015)..(2016): n is a, c, g, or t
  misc_feature (2064)..(2064): n is a, c, g, or t
gctgcaggaattcggacgaggctgtgagtgtctctagggtgatacgtgggtgagaaaggtcctggtccgcgccagagcccagcgcgcctcgtcgccatgcctcggaaaattgaggaaatcaaggacttcctgctcacagcccgacgaaaggatgccaaatctgtcaagatcaagaaaaataaggacaacgtgaagtttaaagttcgatgcagcagatacctttacaccctggtcatcactgacaaagagaaggcagagaaactgaagcagtccctgccccccggtttggcagtgaaggaactgaaatgaaccagacacactgattggaactgtattatattaaaatactaaaaatcctaagtgtctttcgtctttgcggatgggaaagggaaaaatgctacctcgtagtggcttctgatgggaacaggacgcgggttctgttgctgccttcctgtgtcttttttttttttttttttttcctttctttgagacggagtcttgctctgtggctcatcctggagcacagtggtgcgatatcagctcactaccacctccgcctcctgggttcaagcgactgtcctgcctcagcctcccgagtggctgggattacaggcacacatcaccacgcctggccaatttttgtatttgtagtagagacagggtttcactgcctgcctcagcctcccatagtgctgggattacaggcatgagcctccgtgcccggtgcatccctaatcttgagcatgatctcagtcggcaaatgaggccatctgttttcagcctgtttgaaaataagatgtggggaggccatgatggaaatagcacgtggggttaaacataactggcagatgtgggagcgatggtggggcatgccattcaaacaggtcccaaaatgggtgcaacaaggtatagcacatctaccactcgctaacttgactgacttggagaaatgactacacttttgcctgtttcctcagttggaaaatagccatattaacacctctttcattggcttgctgtcagggtactgggatggggggaggtgcatgggttggggtggccaccaggtggtgctgtgccacagcgggcagcccctctggaaatgactggcatcataaaatctgtcttcatacccnaggtagtgttttttgtttttttaagatctctaccttttaaaagcgtggcatacagtgtgcttggtattgtgttaggcatttagacgtgctcaggttgtaaggttgaagtgccagtctttgaatattctgtaaggattgtgagggtgtgaggtggttttgagtctggtcacgggtcttgtttcctccgggagagggtgggtacaccagccctcaggcccaggtgcggcactgtgggcggctttcagcctttcccgttctgtaagcattgcagattcccaaggaaaagcgagcctttaccatgtgggttttctttgttcccagcacatcgtccagagtttcatcccagctcctaggagacaggccttgcaggggtgtgtccagccttgtctagagaaggccgcctttcatgcagtgcttcccagccctggcttgtgactcagtcatctggggcacttaggcagttcactgtggtggccagggctgactggagattgcgattgcggtggtctggggcataggtgtgtttccaagctctcaggtgggcctctgctttgctgggcttcagcaagcccttaagtgctgcataccaggtgaatggggaggggggaggtgatgggctacagctgctggtgtgccgactgtcctccaactccctgctgagtctgtgggaggtctgtctgttgtgcttcagctttttgacacctctctgggtcagcaggcctccggggaagcagctagaatggtcgctgtctggctgggtgcaggtgggctgacaggtttggatattccaggccgcattccggtggctgtggagatagccctgagggacagcctttgcagtttgtttcttccagtgccgtgtgcagcctccagccttcnngggctcccttgccccgggttcaaagtcagtcctcggtgaccacccatncctaggagcagcccttcccacctggggggcctctgagggcaggggctgtaaaagcagctaccagaagagtccactttccccagcaactgcagggaccctgactcctgcttgtcctgcagcctgggctcctccctccgctggccaaagtcacgccaagcagtttgcggttaacaggacgggtgggggcctctgcatatgtgcagagtacggagggcccagggacgcgaggctccccgatgggcaacctcccctgcctttgcttttccccagagccccctcctggcctgcgttcggcatcttctcgggtcgtcatcgccctctgcggtgcctgcgctcggggtgagggtttttgtcggcttttgttacatcaccgatgtaacagtgcctggacgtagtaggtgctcaataaatatgttgttgaatgcgcttcagtctccccgaatgcttgtcccttccgggcgctctcatcgctctcctaccttccccgctacacagctcgaaggtcccctcctccgggaagctcaccctgtcccacttgccaggaagaatcaagcaaattttctgagtgagacaccttgtcctcactcaggcgtcctgcaggcggcttcagcgagttgttggggcagatgcgccgggagctcccgagggcagggacggcgtcttatttctctttttaagtccacagggcttgcacaatagatgcccaaaaaatgagagtgaatttagaatgagtgaccgagtggctgaagattgcctccttcctttcccagtctgtcggttacttaccctgtgacaagcccttgggacgggcagtcgcccctctctggcctatgactgctggctgcccccactgacaccttatacccttgcctcgtgcc

SEQ ID NO: 370038 - DNA, 2988 bp, Homo sapiens
  misc_feature (8)..(9): n is a, c, g, or t
  misc_feature (15)..(15): n is a, c, g, or t
  misc_feature (17)..(17): n is a, c, g, or t
  misc_feature (25)..(25): n is a, c, g, or t
  misc_feature (1182)..(1182): n is a, c, g, or t
  misc_feature (2061)..(2062): n is a, c, g, or t
  misc_feature (2110)..(2110): n is a, c, g, or t
catcgacnncccttngnatgggccncgcgccattgtgttgaaacccgcgaattcggccattatggccggggctttttcgtccttttccccggttgctgcttgctgtcctggtccgcgccagagcccagcgcgcctcgtcgccatgcctcggaaaattgaggaaatcaaggacttcctgctcacagcccgacgaaaggatgccaaatctgtcaagatcaagaaaaataaggacaacgtgaagtttaaagttcgatgcagcagatacctttacaccctggtcatcactgacaaagagaaggcagagaaactgaagcagtccctgccccccggtttggcagtgaaggaactgaaatgaaccagacacactgattggaactgtattatattaaaatactaaaaatcctaagtgtctttcgtctttgcggatgggaaagggaaaaatgctacctcgtagtggcttctgatgggaacaggacgcgggttctgttgctgccttcctgtgtcttttttttttttttttttttcctttctttgagacggagtcttgctctgtggctcatcctggagcacagtggtgcgatatcagctcactaccacctccgcctcctgggttcaagcgactgtcctgcctcagcctcccgagtggctgggattacaggcacacatcaccacgcctggccaatttttgtatttgtagtagagacagggtttcactgcctgcctcagcctcccatagtgctgggattacaggcatgagcctccgtgcccggtgcatccctaatcttgagcatgatctcagtcggcaaatgaggccatctgttttcagcctgtttgaaaataagatgtggggaggccatgatggaaatagcacgtggggttaaacataactggcagatgtgggagcgatggtggggcatgccattcaaacaggtcccaaaatgggtgcaacaaggtatagcacatctaccactcgctaacttgactgacttggagaaatgactacacttttgcctgtttcctcagttggaaaatagccatattaacacctctttcattggcttgctgtcagggtactgggatggggggaggtgcatgggttggggtggccaccaggtggtgctgtgccacagcgggcagcccctctggaaatgactggcatcataaaatctgtcttcatacccnaggtagtgttttttgtttttttaagatctctaccttttaaaagcgtggcatacagtgtgcttggtattgtgttaggcatttagacgtgctcaggttgtaaggttgaagtgccagtctttgaatattctgtaaggattgtgagggtgtgaggtggttttgagtctggtcacgggtcttgtttcctccgggagagggtgggtacaccagccctcaggcccaggtgcggcactgtgggcggctttcagcctttcccgttctgtaagcattgcagattcccaaggaaaagcgagcctttaccatgtgggttttctttgttcccagcacatcgtccagagtttcatcccagctcctaggagacaggccttgcaggggtgtgtccagccttgtctagagaaggccgcctttcatgcagtgcttcccagccctggcttgtgactcagtcatctggggcacttaggcagttcactgtggtggccagggctgactggagattgcgattgcggtggtctggggcataggtgtgtttccaagctctcaggtgggcctctgctttgctgggcttcagcaagcccttaagtgctgcataccaggtgaatggggaggggggaggtgatgggctacagctgctggtgtgccgactgtcctccaactccctgctgagtctgtgggaggtctgtctgttgtgcttcagctttttgacacctctctgggtcagcaggcctccggggaagcagctagaatggtcgctgtctggctgggtgcaggtgggctgacaggtttggatattccaggccgcattccggtggctgtggagatagccctgagggacagcctttgcagtttgtttcttccagtgccgtgtgcagcctccagccttcnngggctcccttgccccgggttcaaagtcagtcctcggtgaccacccatncctaggagcagcccttcccacctggggggcctctgagggcaggggctgtaaaagcagctaccagaagagtccactttccccagcaactgcagggaccctgactcctgcttgtcctgcagcctgggctcctccctccgctggccaaagtcacgccaagcagtttgcggttaacaggacgggtgggggcctctgcatatgtgcagagtacggagggcccagggacgcgaggctccccgatgggcaacctcccctgcctttgcttttccccagagccccctcctggcctgcgttcggcatcttctcgggtcgtcatcgccctctgcggtgcctgcgctcggggtgagggtttttgtcggcttttgttacatcaccgatgtaacagtgcctggacgtagtaggtgctcaataaatatgttgttgaatgcgcttcagtctccccgaatgcttgtcccttccgggcgctctcatcgctctcctaccttccccgctacacagctcgaaggtcccctcctccgggaagctcaccctgtcccacttgccaggaagaatcaagcaaattttctgagtgagacaccttgtcctcactcaggcgtcctgcaggcggcttcagcgagttgttggggcagatgcgccgggagctcccgagggcagggacggcgtcttatttctctttttaagtccacagggcttgcacaatagatgcccaaaaaatgagagtgaatttagaatgagtgaccgagtggctgaagattgcctccttcctttcccagtctgtcggttacttaccctgtgacaagcccttgggacgggcagtcgcccctctctggcctatgactgctggctgcccccactgacaccttatacccttgcctcgtgcc

SEQ ID NO: 370039 - DNA, 583 bp, Homo sapiens
ggaccgacactttactatatgcccaccacctctcatgccacctcctttttcgtccttttccccggttgctgcttgctgtgagtgtctctagggtgatacgtgggtgagaaaggtaatctggggcaatccactgccaggtgaaatctggggaccccaggtccgcgtggagggtgtcggggaggagaaggggagtgcgatggggccgatatttcgggggagagcgggaaaacggggttcgctgccagcccccgcgccgtgttaacgccgaggactgtttcccgcagggtcctggtccgcgccagagcccagcgcgcctcgtcgccatgcctcggaaaattgaggaaatcaaggacttcctgctcacagcccgacgaaaggatgccaaatctgtcaagatcaagaaaaataaggacaacgtgaagtttaaagttcgatgcagcagatacctttacaccctggtcatcactgacaaagagaaggcagagaaactgaagcagtccctgccccccggtttggcagtgaaggaactgaaatgaaccagacacactgattggaactgtattatattaaaatactaaaaatc

SEQ ID NO: 370040 - DNA, 958 bp, Homo sapiens
  misc_feature (958)..(958): n is a, c, g, or t
aactcaggggcgagctgcaactaactcaggagccatctcgatctcactcaggtactgagcagacactttttcgtccttttccccggttgctgcttgctgtgagtgtctctagggtgatacgtgggtgagaaaggtcctggtccgcgccagagcccagcgcgcctcgtcgccatgcctcggaaaattgaggaaatcaaggacttcctgctcacagcccgacgaaaggatgccaaatctgtcaagatcaagaaaaataaggacaacgtgaagtttaaagttcgatgcagcagatacctttacaccctggtcatcactgacaaagagaaggcagagaaactgaagcagtccctgccccccggtttggcagtgaaggaactgaaatgaaccagacacactgattggaactgtattatattaaaatactaaaaatcaaaaaaaaaaaaaaaaaaaaaaaaaaaaaaaaaaaaaaaaaaaaaaaaaaaaaaaaaaaaaaaaaaaaaaaaaaagaaaaaaaaaaaaaaaaaaaaaaaaaaaaaaaaaaaaaaaaaagaaacaagggggggggggcaaaaaatcccccgggggggcccattggccccttttttgtgtgtacccagggtggcgcccctaaaggggggccgcgaattttaaagcgaaggagcggggggcgcggcgcgttaaaaacaaaacgcgcgcggtgataggggggaaaagaccgtgctctactctggggacacttctttgggggaagaggcacccccttaacttttcgggggggcggggccactcatctggggcacaaacctcacctcatgagaaatttaaagcgactcacaggaacaatctacacaatttcaagctggctctaaggggtggaacccaacggaatatgctgccgctgaaaaaattgggcaacgaaatatgattcagaaaaattacgagctttgtaaaataaagn

SEQ ID NO: 370041 - DNA, 512 bp, Homo sapiens
  misc_feature (482)..(483): n is a, c, g, or t
  misc_feature (491)..(492): n is a, c, g, or t
  misc_feature (497)..(497): n is a, c, g, or t
aactcaggggcgagctgcaactaactcaggagccatctcgatctcactcaggtactgagcagacactttttcgtccttttccccggttgctgcttgctgtgagtgtctctagggtgatacgtgggtgagaaaggtcctggtccgcgccagagcccagcgcgcctcgtcgccatgcctcggaaaattgaggaaatcaaggacttcctgctcacagcccgacgaaaggatgccaaatctgtcaagatcaagaaaaataaggacaacgtgaagtttaaagttcgatgcagcagatacctttacaccctggtcatcactgacaaagagaaggcagagaaactgaagcagtccctgccccccggtttggcagtgaaggaactgaaatgaaccagacacactgattggaactgtattatattaaaatactaaaaatcaaaaaaaaaaaaaaaaaaaaaaaaaaaaaaaaaaaaaaaaaaaacgggggnnttttttgnnggggngggagaaaaaagagg

SEQ ID NO: 370042 - DNA, 605 bp, Homo sapiens
  misc_feature (490)..(490): n is a, c, g, or t
  misc_feature (510)..(510): n is a, c, g, or t
  misc_feature (516)..(517): n is a, c, g, or t
aactcaggggcgagctgcaactaactcaggagccatctcgatctcactcaggtactgagcagacactttttcgtccttttccccggttgctgcttgctgtgagtgtctctagggtgatacgtgggtgagaaaggtcctggtccgcgccagagcccagcgcgcctcgtcgccatgcctcggaaaattgaggaaatcaaggacttcctgctcacagcccgacgaaaggatgccaaatctgtcaagatcaagaaaaataaggacaacgtgaagtttaaagttcgatgcagcagatacctttacaccctggtcatcactgacaaagagaaggcagagaaactgaagcagtccctgccccccggtttggcagtgaaggaactgaaatgaaccagacacactgattggaactgtattatattaaaatactaaaaatcaaaaaaaaaaaaaaaaaaaaaaaaaaaaaaaaaaaaaaaaaagcggccgctcgaatggnggacgcggccgcgaattcgngcggcnnaggggctgcgagaagacgacagggggcagtacccatgctgatgcctctgccctgaggattctgttttcttccctgatcctgtctcttg

SEQ ID NO: 370043 - DNA, 3510 bp, Homo sapiens
  misc_feature (1704)..(1704): n is a, c, g, or t
  misc_feature (2583)..(2584): n is a, c, g, or t
  misc_feature (2632)..(2632): n is a, c, g, or t
aactcaggggcgagctgcaactaactcaggagccatctcgatctcactcaggtactgagcagacactttttcgtccttttccccggttgctgcttgctgtgagtgtctctagggtgatacgtgggtgagaaaggtcctggtccgcgccagagcccagcgcgcctcgtcgccatgcctcggaaaattgaggaaatcaaggacttcctgctcacagcccgacgaaaggatgccaaatctgtcaagatcaagaaaaataaggacaacgtgaagtttaaagttcgatgcagcagatacctttacaccctggtcatcactgacaaagagaaggcagagaaactgaagcagtccctgccccccgtgagtgagcctgaagtcacttcaggggcgggtggggtttggaaggttgctgtgtgtggccatgttgtatcttgttttgaatccctctcagatttcagagcccattttatggtctaagaatctgctcttgctgttgggagtgtgaggaatagttgtgattctcagattatatacagtaccagaaatcatttccttagccagaagagcggttagagctcatttaatcctgttcacgacccttcgaggttggtgctagtactgatagtccccattttttacaggggaacagatgaaatataatagaccaagtctttttatcgaatataatagaccaagtctttttatcaaacactaaatattttaaccgaaacttcgctggtggatctaatttctgaaccttgtgtgctctctttagcttaagtacaaaatttagacaagcagcagcaactcagatgtgtcttctggatggcttacttttgtctctttccctctaggtttggcagtgaaggaactgaaatgaaccagacacactgattggaactgtattatattaaaatactaaaaatcctaagtgtctttcgtctttgcggatgggaaagggaaaaatgctacctcgtagtggcttctgatgggaacaggacgcgggttctgttgctgccttcctgtgtcttttttttttttttttttttcctttctttgagacggagtcttgctctgtggctcatcctggagcacagtggtgcgatatcagctcactaccacctccgcctcctgggttcaagcgactgtcctgcctcagcctcccgagtggctgggattacaggcacacatcaccacgcctggccaatttttgtatttgtagtagagacagggtttcactgcctgcctcagcctcccatagtgctgggattacaggcatgagcctccgtgcccggtgcatccctaatcttgagcatgatctcagtcggcaaatgaggccatctgttttcagcctgtttgaaaataagatgtggggaggccatgatggaaatagcacgtggggttaaacataactggcagatgtgggagcgatggtggggcatgccattcaaacaggtcccaaaatgggtgcaacaaggtatagcacatctaccactcgctaacttgactgacttggagaaatgactacacttttgcctgtttcctcagttggaaaatagccatattaacacctctttcattggcttgctgtcagggtactgggatggggggaggtgcatgggttggggtggccaccaggtggtgctgtgccacagcgggcagcccctctggaaatgactggcatcataaaatctgtcttcatacccnaggtagtgttttttgtttttttaagatctctaccttttaaaagcgtggcatacagtgtgcttggtattgtgttaggcatttagacgtgctcaggttgtaaggttgaagtgccagtctttgaatattctgtaaggattgtgagggtgtgaggtggttttgagtctggtcacgggtcttgtttcctccgggagagggtgggtacaccagccctcaggcccaggtgcggcactgtgggcggctttcagcctttcccgttctgtaagcattgcagattcccaaggaaaagcgagcctttaccatgtgggttttctttgttcccagcacatcgtccagagtttcatcccagctcctaggagacaggccttgcaggggtgtgtccagccttgtctagagaaggccgcctttcatgcagtgcttcccagccctggcttgtgactcagtcatctggggcacttaggcagttcactgtggtggccagggctgactggagattgcgattgcggtggtctggggcataggtgtgtttccaagctctcaggtgggcctctgctttgctgggcttcagcaagcccttaagtgctgcataccaggtgaatggggaggggggaggtgatgggctacagctgctggtgtgccgactgtcctccaactccctgctgagtctgtgggaggtctgtctgttgtgcttcagctttttgacacctctctgggtcagcaggcctccggggaagcagctagaatggtcgctgtctggctgggtgcaggtgggctgacaggtttggatattccaggccgcattccggtggctgtggagatagccctgagggacagcctttgcagtttgtttcttccagtgccgtgtgcagcctccagccttcnngggctcccttgccccgggttcaaagtcagtcctcggtgaccacccatncctaggagcagcccttcccacctggggggcctctgagggcaggggctgtaaaagcagctaccagaagagtccactttccccagcaactgcagggaccctgactcctgcttgtcctgcagcctgggctcctccctccgctggccaaagtcacgccaagcagtttgcggttaacaggacgggtgggggcctctgcatatgtgcagagtacggagggcccagggacgcgaggctccccgatgggcaacctcccctgcctttgcttttccccagagccccctcctggcctgcgttcggcatcttctcgggtcgtcatcgccctctgcggtgcctgcgctcggggtgagggtttttgtcggcttttgttacatcaccgatgtaacagtgcctggacgtagtaggtgctcaataaatatgttgttgaatgcgcttcagtctccccgaatgcttgtcccttccgggcgctctcatcgctctcctaccttccccgctacacagctcgaaggtcccctcctccgggaagctcaccctgtcccacttgccaggaagaatcaagcaaattttctgagtgagacaccttgtcctcactcaggcgtcctgcaggcggcttcagcgagttgttggggcagatgcgccgggagctcccgagggcagggacggcgtcttatttctctttttaagtccacagggcttgcacaatagatgcccaaaaaatgagagtgaatttagaatgagtgaccgagtggctgaagattgcctccttcctttcccagtctgtcggttacttaccctgtgacaagcccttgggacgggcagtcgcccctctctggcctatgactgctggctgcccccactgacaccttatacccttgcctcgtgcc

SEQ ID NO: 370044 - DNA, 479 bp, Homo sapiens
aactcaggggcgagctgcaactaactcaggagccatctcgatctcactcaggtactgagcagacactttttcgtccttttccccggttgctgcttgctgtgagtgtctctagggtgatacgtgggtgagaaaggtcctggtccgcgccagagcccagcgcgcctcgtcgccatgcctcggaaaattgaggaaatcaaggacttcctgctcacagcccgacgaaaggatgccaaatctgtcaagatcaagaaaaataaggacaacgtgaagtttaaagttcgatgcagcagatacctttacaccctggtcatcactgacaaagagaaggcagagaaactgaagcagtccctgccccccggtttggcagtgaaggaactgaaatgaaccagacacactgattggaactgtattatattaaaatactaaaaatcaaaaaaaaaaaagaaaaaaaaaaagtcgtatcgatgtcgagcgatcat

SEQ ID NO: 370045 - DNA, 2833 bp, Homo sapiens
  misc_feature (1027)..(1027): n is a, c, g, or t
  misc_feature (1906)..(1907): n is a, c, g, or t
  misc_feature (1955)..(1955): n is a, c, g, or t
cgcctactactactatacgggtgcgagaagacgacagaagggatgccaaatctgtcaagatcaagaaaaataaggacaacgtgaagtttaaagttcgatgcagcagatacctttacaccctggtcatcactgacaaagagaaggcagagaaactgaagcagtccctgccccccggtttggcagtgaaggaactgaaatgaaccagacacactgattggaactgtattatattaaaatactaaaaatcctaagtgtctttcgtctttgcggatgggaaagggaaaaatgctacctcgtagtggcttctgatgggaacaggacgcgggttctgttgctgccttcctgtgtcttttttttttttttttttttcctttctttgagacggagtcttgctctgtggctcatcctggagcacagtggtgcgatatcagctcactaccacctccgcctcctgggttcaagcgactgtcctgcctcagcctcccgagtggctgggattacaggcacacatcaccacgcctggccaatttttgtatttgtagtagagacagggtttcactgcctgcctcagcctcccatagtgctgggattacaggcatgagcctccgtgcccggtgcatccctaatcttgagcatgatctcagtcggcaaatgaggccatctgttttcagcctgtttgaaaataagatgtggggaggccatgatggaaatagcacgtggggttaaacataactggcagatgtgggagcgatggtggggcatgccattcaaacaggtcccaaaatgggtgcaacaaggtatagcacatctaccactcgctaacttgactgacttggagaaatgactacacttttgcctgtttcctcagttggaaaatagccatattaacacctctttcattggcttgctgtcagggtactgggatggggggaggtgcatgggttggggtggccaccaggtggtgctgtgccacagcgggcagcccctctggaaatgactggcatcataaaatctgtcttcatacccnaggtagtgttttttgtttttttaagatctctaccttttaaaagcgtggcatacagtgtgcttggtattgtgttaggcatttagacgtgctcaggttgtaaggttgaagtgccagtctttgaatattctgtaaggattgtgagggtgtgaggtggttttgagtctggtcacgggtcttgtttcctccgggagagggtgggtacaccagccctcaggcccaggtgcggcactgtgggcggctttcagcctttcccgttctgtaagcattgcagattcccaaggaaaagcgagcctttaccatgtgggttttctttgttcccagcacatcgtccagagtttcatcccagctcctaggagacaggccttgcaggggtgtgtccagccttgtctagagaaggccgcctttcatgcagtgcttcccagccctggcttgtgactcagtcatctggggcacttaggcagttcactgtggtggccagggctgactggagattgcgattgcggtggtctggggcataggtgtgtttccaagctctcaggtgggcctctgctttgctgggcttcagcaagcccttaagtgctgcataccaggtgaatggggaggggggaggtgatgggctacagctgctggtgtgccgactgtcctccaactccctgctgagtctgtgggaggtctgtctgttgtgcttcagctttttgacacctctctgggtcagcaggcctccggggaagcagctagaatggtcgctgtctggctgggtgcaggtgggctgacaggtttggatattccaggccgcattccggtggctgtggagatagccctgagggacagcctttgcagtttgtttcttccagtgccgtgtgcagcctccagccttcnngggctcccttgccccgggttcaaagtcagtcctcggtgaccacccatncctaggagcagcccttcccacctggggggcctctgagggcaggggctgtaaaagcagctaccagaagagtccactttccccagcaactgcagggaccctgactcctgcttgtcctgcagcctgggctcctccctccgctggccaaagtcacgccaagcagtttgcggttaacaggacgggtgggggcctctgcatatgtgcagagtacggagggcccagggacgcgaggctccccgatgggcaacctcccctgcctttgcttttccccagagccccctcctggcctgcgttcggcatcttctcgggtcgtcatcgccctctgcggtgcctgcgctcggggtgagggtttttgtcggcttttgttacatcaccgatgtaacagtgcctggacgtagtaggtgctcaataaatatgttgttgaatgcgcttcagtctccccgaatgcttgtcccttccgggcgctctcatcgctctcctaccttccccgctacacagctcgaaggtcccctcctccgggaagctcaccctgtcccacttgccaggaagaatcaagcaaattttctgagtgagacaccttgtcctcactcaggcgtcctgcaggcggcttcagcgagttgttggggcagatgcgccgggagctcccgagggcagggacggcgtcttatttctctttttaagtccacagggcttgcacaatagatgcccaaaaaatgagagtgaatttagaatgagtgaccgagtggctgaagattgcctccttcctttcccagtctgtcggttacttaccctgtgacaagcccttgggacgggcagtcgcccctctctggcctatgactgctggctgcccccactgacaccttatacccttgcctcgtgcc

SEQ ID NO: 370046 - DNA, 3008 bp, Homo sapiens
  misc_feature (1202)..(1202): n is a, c, g, or t
  misc_feature (2081)..(2082): n is a, c, g, or t
  misc_feature (2130)..(2130): n is a, c, g, or t
taataaggttgatagaagatattctgtaatgttgtgttcagtgtacccaataaaagtcccaagttggaggaacgggtaatagtgttttctgtttgcacagagggatggtactggaggtgggtgctgtctcctgcatgctgcttactgcttgagtgtatttgcacatggactgtgtcacatctgttttctgtgatacaatttaattcctgattctggtctccggtagctgtcaagatcaagaaaaataaggacaacgtgaagtttaaagttcgatgcagcagatacctttacaccctggtcatcactgacaaagagaaggcagagaaactgaagcagtccctgccccccggtttggcagtgaaggaactgaaatgaaccagacacactgattggaactgtattatattaaaatactaaaaatcctaagtgtctttcgtctttgcggatgggaaagggaaaaatgctacctcgtagtggcttctgatgggaacaggacgcgggttctgttgctgccttcctgtgtcttttttttttttttttttttcctttctttgagacggagtcttgctctgtggctcatcctggagcacagtggtgcgatatcagctcactaccacctccgcctcctgggttcaagcgactgtcctgcctcagcctcccgagtggctgggattacaggcacacatcaccacgcctggccaatttttgtatttgtagtagagacagggtttcactgcctgcctcagcctcccatagtgctgggattacaggcatgagcctccgtgcccggtgcatccctaatcttgagcatgatctcagtcggcaaatgaggccatctgttttcagcctgtttgaaaataagatgtggggaggccatgatggaaatagcacgtggggttaaacataactggcagatgtgggagcgatggtggggcatgccattcaaacaggtcccaaaatgggtgcaacaaggtatagcacatctaccactcgctaacttgactgacttggagaaatgactacacttttgcctgtttcctcagttggaaaatagccatattaacacctctttcattggcttgctgtcagggtactgggatggggggaggtgcatgggttggggtggccaccaggtggtgctgtgccacagcgggcagcccctctggaaatgactggcatcataaaatctgtcttcatacccnaggtagtgttttttgtttttttaagatctctaccttttaaaagcgtggcatacagtgtgcttggtattgtgttaggcatttagacgtgctcaggttgtaaggttgaagtgccagtctttgaatattctgtaaggattgtgagggtgtgaggtggttttgagtctggtcacgggtcttgtttcctccgggagagggtgggtacaccagccctcaggcccaggtgcggcactgtgggcggctttcagcctttcccgttctgtaagcattgcagattcccaaggaaaagcgagcctttaccatgtgggttttctttgttcccagcacatcgtccagagtttcatcccagctcctaggagacaggccttgcaggggtgtgtccagccttgtctagagaaggccgcctttcatgcagtgcttcccagccctggcttgtgactcagtcatctggggcacttaggcagttcactgtggtggccagggctgactggagattgcgattgcggtggtctggggcataggtgtgtttccaagctctcaggtgggcctctgctttgctgggcttcagcaagcccttaagtgctgcataccaggtgaatggggaggggggaggtgatgggctacagctgctggtgtgccgactgtcctccaactccctgctgagtctgtgggaggtctgtctgttgtgcttcagctttttgacacctctctgggtcagcaggcctccggggaagcagctagaatggtcgctgtctggctgggtgcaggtgggctgacaggtttggatattccaggccgcattccggtggctgtggagatagccctgagggacagcctttgcagtttgtttcttccagtgccgtgtgcagcctccagccttcnngggctcccttgccccgggttcaaagtcagtcctcggtgaccacccatncctaggagcagcccttcccacctggggggcctctgagggcaggggctgtaaaagcagctaccagaagagtccactttccccagcaactgcagggaccctgactcctgcttgtcctgcagcctgggctcctccctccgctggccaaagtcacgccaagcagtttgcggttaacaggacgggtgggggcctctgcatatgtgcagagtacggagggcccagggacgcgaggctccccgatgggcaacctcccctgcctttgcttttccccagagccccctcctggcctgcgttcggcatcttctcgggtcgtcatcgccctctgcggtgcctgcgctcggggtgagggtttttgtcggcttttgttacatcaccgatgtaacagtgcctggacgtagtaggtgctcaataaatatgttgttgaatgcgcttcagtctccccgaatgcttgtcccttccgggcgctctcatcgctctcctaccttccccgctacacagctcgaaggtcccctcctccgggaagctcaccctgtcccacttgccaggaagaatcaagcaaattttctgagtgagacaccttgtcctcactcaggcgtcctgcaggcggcttcagcgagttgttggggcagatgcgccgggagctcccgagggcagggacggcgtcttatttctctttttaagtccacagggcttgcacaatagatgcccaaaaaatgagagtgaatttagaatgagtgaccgagtggctgaagattgcctccttcctttcccagtctgtcggttacttaccctgtgacaagcccttgggacgggcagtcgcccctctctggcctatgactgctggctgcccccactgacaccttatacccttgcctcgtgcc

SEQ ID NO: 370047 - DNA, 2820 bp, Homo sapiens
  misc_feature (36)..(37): n is a, c, g, or t
  misc_feature (1014)..(1014): n is a, c, g, or t
  misc_feature (1893)..(1894): n is a, c, g, or t
  misc_feature (1942)..(1942): n is a, c, g, or t
tattcctattatacacgagcacgaagaggatgccanntctgtcaagatcaagaaaaataaggacaacgtgaagtttaaagttcgatgcagcagatacctttacaccctggtcatcactgacaaagagaaggcagagaaactgaagcagtccctgccccccggtttggcagtgaaggaactgaaatgaaccagacacactgattggaactgtattatattaaaatactaaaaatcctaagtgtctttcgtctttgcggatgggaaagggaaaaatgctacctcgtagtggcttctgatgggaacaggacgcgggttctgttgctgccttcctgtgtcttttttttttttttttttttcctttctttgagacggagtcttgctctgtggctcatcctggagcacagtggtgcgatatcagctcactaccacctccgcctcctgggttcaagcgactgtcctgcctcagcctcccgagtggctgggattacaggcacacatcaccacgcctggccaatttttgtatttgtagtagagacagggtttcactgcctgcctcagcctcccatagtgctgggattacaggcatgagcctccgtgcccggtgcatccctaatcttgagcatgatctcagtcggcaaatgaggccatctgttttcagcctgtttgaaaataagatgtggggaggccatgatggaaatagcacgtggggttaaacataactggcagatgtgggagcgatggtggggcatgccattcaaacaggtcccaaaatgggtgcaacaaggtatagcacatctaccactcgctaacttgactgacttggagaaatgactacacttttgcctgtttcctcagttggaaaatagccatattaacacctctttcattggcttgctgtcagggtactgggatggggggaggtgcatgggttggggtggccaccaggtggtgctgtgccacagcgggcagcccctctggaaatgactggcatcataaaatctgtcttcatacccnaggtagtgttttttgtttttttaagatctctaccttttaaaagcgtggcatacagtgtgcttggtattgtgttaggcatttagacgtgctcaggttgtaaggttgaagtgccagtctttgaatattctgtaaggattgtgagggtgtgaggtggttttgagtctggtcacgggtcttgtttcctccgggagagggtgggtacaccagccctcaggcccaggtgcggcactgtgggcggctttcagcctttcccgttctgtaagcattgcagattcccaaggaaaagcgagcctttaccatgtgggttttctttgttcccagcacatcgtccagagtttcatcccagctcctaggagacaggccttgcaggggtgtgtccagccttgtctagagaaggccgcctttcatgcagtgcttcccagccctggcttgtgactcagtcatctggggcacttaggcagttcactgtggtggccagggctgactggagattgcgattgcggtggtctggggcataggtgtgtttccaagctctcaggtgggcctctgctttgctgggcttcagcaagcccttaagtgctgcataccaggtgaatggggaggggggaggtgatgggctacagctgctggtgtgccgactgtcctccaactccctgctgagtctgtgggaggtctgtctgttgtgcttcagctttttgacacctctctgggtcagcaggcctccggggaagcagctagaatggtcgctgtctggctgggtgcaggtgggctgacaggtttggatattccaggccgcattccggtggctgtggagatagccctgagggacagcctttgcagtttgtttcttccagtgccgtgtgcagcctccagccttcnngggctcccttgccccgggttcaaagtcagtcctcggtgaccacccatncctaggagcagcccttcccacctggggggcctctgagggcaggggctgtaaaagcagctaccagaagagtccactttccccagcaactgcagggaccctgactcctgcttgtcctgcagcctgggctcctccctccgctggccaaagtcacgccaagcagtttgcggttaacaggacgggtgggggcctctgcatatgtgcagagtacggagggcccagggacgcgaggctccccgatgggcaacctcccctgcctttgcttttccccagagccccctcctggcctgcgttcggcatcttctcgggtcgtcatcgccctctgcggtgcctgcgctcggggtgagggtttttgtcggcttttgttacatcaccgatgtaacagtgcctggacgtagtaggtgctcaataaatatgttgttgaatgcgcttcagtctccccgaatgcttgtcccttccgggcgctctcatcgctctcctaccttccccgctacacagctcgaaggtcccctcctccgggaagctcaccctgtcccacttgccaggaagaatcaagcaaattttctgagtgagacaccttgtcctcactcaggcgtcctgcaggcggcttcagcgagttgttggggcagatgcgccgggagctcccgagggcagggacggcgtcttatttctctttttaagtccacagggcttgcacaatagatgcccaaaaaatgagagtgaatttagaatgagtgaccgagtggctgaagattgcctccttcctttcccagtctgtcggttacttaccctgtgacaagcccttgggacgggcagtcgcccctctctggcctatgactgctggctgcccccactgacaccttatacccttgcctcgtgcc

SEQ ID NO: 370048 - DNA, 631 bp, Homo sapiens
ggaccgacactttactatatgcccaccacctctcatgccacctcctttttcgtccttttccccggttgctgcttgctgtgagtgtctctagggtgatacgtgggtgagaaaggtaatctggggcaatccactgccaggtgaaatctggggaccccaggtccgcgtggagggtgtcggggaggagaaggggagtgcgatggggccgatatttcgggggagagcgggaaaacggggttcgctgccagcccccgcgccgtgttaacgccgaggactgtttcccgcagggtcctggtccgcgccagagcccagcgcgcctcgtcgccatgcctcggaaaattgaggaaatcaaggacttcctgctcacagcccgacgaaaggatgccaaatctgtcaagatcaagaaaaataaggacaacgtgaagtttaaagttcgatgcagcagatacctttacaccctggtcatcactgacaaagagaaggcagagaaactgaagcagtccctgccccccggtttggcagtgaaggaactgaaatgaaccagacacactgattggaactgtattatattaaaatactaaaaatcaaaaaaaaaaaagaaaaaaaaaaagtcgtatcgatgtcgagcgatcat

SEQ ID NO: 370049 - DNA, 464 bp, Homo sapiens
aactcaggggcgagctgcaactaactcaggagccatctcgatctcactcaggtactgagcagacactttttcgtccttttccccggttgctgcttgctgtgagtgtctctagggtgatacgtgggtgagaaaggtcctggtccgcgccagagcccagcgcgcctcgtcgccatgcctcggaaaattgaggaaatcaaggacttcctgctcacagcccgacgaaaggatgccaaatctgtcaagatcaagaaaaataaggacaacgtgaagtttaaagttcgatgcagcagatacctttacaccctggtcatcactgacaaagagaaggcagagaaactgaagcagtccctgccccccggtttggcagtgaaggaactgaaatgaaccagacacactgattggaactgtattatattaaaatactaaaaatcataaaaaatgctcatatttagataaaaaaagcg

SEQ ID NO: 370050 - DNA, 556 bp, Homo sapiens
  misc_feature (455)..(456): n is a, c, g, or t
aactcaggggcgagctgcaactaactcaggagccatctcgatctcactcaggtactgagcagacactttttcgtccttttccccggttgctgcttgctgtgagtgtctctagggtgatacgtgggtgagaaaggtcctggtccgcgccagagcccagcgcgcctcgtcgccatgcctcggaaaattgaggaaatcaaggacttcctgctcacagcccgacgaaaggatgccaaatctgtcaagatcaagaaaaataaggacaacgtgaagtttaaagttcgatgcagcagatacctttacaccctggtcatcactgacaaagagaaggcagagaaactgaagcagtccctgccccccggtttggcagtgaaggaactgaaatgaaccagacacactgattggaactgtattatattaaaatactaaaaatctaaaacatgaatctaaatggctgnnggagaggtcaggtttgggccccccgttactgcagatgaaggcagaagtcattctctcccccacccctcaacttcttcagagatgtggagataggaggctt

SEQ ID NO: 370051 - DNA, 473 bp, Homo sapiens
  misc_feature (433)..(433): n is a, c, g, or t
aactcaggggcgagctgcaactaactcaggagccatctcgatctcactcaggtactgagcagacactttttcgtccttttccccggttgctgcttgctgtgagtgtctctagggtgatacgtgggtgagaaaggtcctggtccgcgccagagcccagcgcgcctcgtcgccatgcctcggaaaattgaggaaatcaaggacttcctgctcacagcccgacgaaaggatgccaaatctgtcaagatcaagaaaaataaggacaacgtgaagtttaaagttcgatgcagcagatacctttacaccctggtcatcactgacaaagagaaggcagagaaactgaagcagtccctgccccccggtttggcagtgaaggaactgaaatgaaccagacacactgattggaactgtattatattaaaatactaaaaatcanaaagcatggattacgagaaagaacaacaaagtcgtatcga

SEQ ID NO: 370052 - DNA, 787 bp, Homo sapiens
aactcaggggcgagctgcaactaactcaggagccatctcgatctcactcaggtactgagcagacactttttcgtccttttccccggttgctgcttgctgtgagtgtctctagggtgatacgtgggtgagaaaggtcctggtccgcgccagagcccagcgcgcctcgtcgccatgcctcggaaaattgaggaaatcaaggacttcctgctcacagcccgacgaaaggatgccaaatctgtcaagatcaagaaaaataaggacaacgtgaagtttaaagttcgatgcagcagatacctttacaccctggtcatcactgacaaagagaaggcagagaaactgaagcagtccctgccccccggtttggcagtgaaggaactgaaatgaaccagacacactgattggaactgtattatattaaaatactaaaaatcaaaaaaaaaaaaaaaggggacgggatccaaccgaaaaactttggggcatcaacgggggctaccaagagtataacagtatgcgggtgacaagtcctagccagagcaatcaggcgagagacacagagggcattcaaacagaaagagggctgcatgcagaagttgggacctgtaatcacatcacggggggaggccagggggagagggtagttggagtccaggagttcgagaccaacaggggcaacatagtgagactcggtctctatttttaagcaacgacaacaaaaacaacaaacgaaagggaaaggggggaagtcaaattatctctctgagagggatatgatctgttctaaaaaaca

SEQ ID NO: 370053 - DNA, 806 bp, Homo sapiens
aactcaggggcgagctgcaactaactcaggagccatctcgatctcactcaggtactgagcagacactttttcgtccttttccccggttgctgcttgctgtgagtgtctctagggtgatacgtgggtgagaaaggtcctggtccgcgccagagcccagcgcgcctcgtcgccatgcctcggaaaattgaggaaatcaaggacttcctgctcacagcccgacgaaaggatgccaaatctgtcaagatcaagaaaaataaggacaacgtgaagtttaaagttcgatgcagcagatacctttacaccctggtcatcactgacaaagagaaggcagagaaactgaagcagtccctgccccccggtttggcagtgaaggaactgaaatgaaccagacacactgattggaactgtattatattaaaatactaaaaatcaaaaaaaaaaaaaaaaaaaaaaaaaaaaaaaaaaaaaaagccaggaaatgaggggtttgggttaaagaaaccctcatgaaacagatttagaatagtctgccataccaatagcagatttaatgatgctgagctttgggctattagccagagaagggagctgagcttgaactcctctagtctacactctcgggcgtcccatcaacccactgtaaatttaggacgtttcttcaacccactggttaaaatttagcttaaaattagtttaagctaccgtcagagaattaccttaggggaacaagccaccataagcagaggtttgcccataaggagacagatttgtaccttttgagcacgttagtgccgcgggggaccctc

SEQ ID NO: 370054 - DNA, 469 bp, Homo sapiens
  misc_feature (451)..(451): n is a, c, g, or t
aactcaggggcgagctgcaactaactcaggagccatctcgatctcactcaggtactgagcagacactttttcgtccttttccccggttgctgcttgctgtgagtgtctctagggtgatacgtgggtgagaaaggtcctggtccgcgccagagcccagcgcgcctcgtcgccatgcctcggaaaattgaggaaatcaaggacttcctgctcacagcccgacgaaaggatgccaaatctgtcaagatcaagaaaaataaggacaacgtgaagtttaaagttcgatgcagcagatacctttacaccctggtcatcactgacaaagagaaggcagagaaactgaagcagtccctgccccccggtttggcagtgaaggaactgaaatgaaccagacacactgattggaactgtattatattaaaatactaaaaatcctcgtgccgaatcggcagtnggggggggcccggtaccc

SEQ ID NO: 370055 - DNA, 456 bp, Homo sapiens
aactcaggggcgagctgcaactaactcaggagccatctcgatctcactcaggtactgagcagacactttttcgtccttttccccggttgctgcttgctgtgagtgtctctagggtgatacgtgggtgagaaaggtcctggtccgcgccagagcccagcgcgcctcgtcgccatgcctcggaaaattgaggaaatcaaggacttcctgctcacagcccgacgaaaggatgccaaatctgtcaagatcaagaaaaataaggacaacgtgaagtttaaagttcgatgcagcagatacctttacaccctggtcatcactgacaaagagaaggcagagaaactgaagcagtccctgccccccggtttggcagtgaaggaactgaaatgaaccagacacactgattggaactgtattatattaaaatactaaaaatcagatagaaggcaaaaaaagtcgacg

SEQ ID NO: 370056 - DNA, 924 bp, Homo sapiens
aactcaggggcgagctgcaactaactcaggagccatctcgatctcactcaggtactgagcagacactttttcgtccttttccccggttgctgcttgctgtgagtgtctctagggtgatacgtgggtgagaaaggtcctggtccgcgccagagcccagcgcgcctcgtcgccatgcctcggaaaattgaggaaatcaaggacttcctgctcacagcccgacgaaaggatgccaaatctgtcaagatcaagaaaaataaggacaacgtgaagtttaaagttcgatgcagcagatacctttacaccctggtcatcactgacaaagagaaggcagagaaactgaagcagtccctgccccccgtgagtgagcctgaagtcacttcaggggcgggtggggtttggaaggttgctgtgtgtggccatgttgtatcttgttttgaatccctctcagatttcagagcccattttatggtctaagaatctgctcttgctgttgggagtgtgaggaatagttgtgattctcagattatatacagtaccagaaatcatttccttagccagaagagcggttagagctcatttaatcctgttcacgacccttcgaggttggtgctagtactgatagtccccattttttacaggggaacagatgaaatataatagaccaagtctttttatcgaatataatagaccaagtctttttatcaaacactaaatattttaaccgaaacttcgctggtggatctaatttctgaaccttgtgtgctctctttagcttaagtacaaaatttagacaagcagcagcaactcagatgtgtcttctggatggcttacttttgtctctttccctctaggtttggcagtgaaggaactgaaatgaaccagacacactgattggaactgtattatattaaaatactaaaaatc

SEQ ID NO: 370057 - DNA, 782 bp, Homo sapiens
ggaccgacactttactatatgcccaccacctctcatgccacctcctttttcgtccttttccccggttgctgcttgctgtgagtgtctctagggtgatacgtgggtgagaaaggtaatctggggcaatccactgccaggtgaaatctggggaccccaggtccgcgtggagggtgtcggggaggagaaggggagtgcgatggggccgatatttcgggggagagcgggaaaacggggttcgctgccagcccccgcgccgtgttaacgccgaggactgtttcccgcagggtcctggtccgcgccagagcccagcgcgcctcgtcgccatgcctcggaaaattgaggaaatcaaggacttcctgctcacagcccgacgaaaggatgccaaatctgtcaagatcaagaaaaataaggacaacgtgaagtttaaagttcgatgcagcagatacctttacaccctggtcatcactgacaaagagaaggcagagaaactgaagcagtccctgccccccggtttggcagtgaaggaactgaaatgaaccagacacactgattggaactgtattatattaaaatactaaaaatctccaaattaaatattttctactcatatctttctactctctctttcttactaaaaaaaactatgggggggcctgtccccattgcctcctttaggagtcatttacaatccacggccgcgttttcaactttttgattggaccaaagcccccactgtccctttccaactttgccacctcatgcgaatgcattctaactctatt

SEQ ID NO: 370058 - DNA, 477 bp, Homo sapiens
  misc_feature (399)..(399): n is a, c, g, or t
aactcaggggcgagctgcaactaactcaggagccatctcgatctcactcaggtactgagcagacactttttcgtccttttccccggttgctgcttgctgtgagtgtctctagggtgatacgtgggtgagaaaggtcctggtccgcgccagagcccagcgcgcctcgtcgccatgcctcggaaaattgaggaaatcaaggacttcctgctcacagcccgacgaaaggatgccaaatctgtcaagatcaagaaaaataaggacaacgtgaagtttaaagttcgatgcagcagatacctttacaccctggtcatcactgacaaagagaaggcagagaaactgaagcagtccctgccccccgtttggcagtgaaggaactgaaatgaaccagacactttgcanccaggacactttgcatccagagacactttgcatccagagacactagcatccggagacacttgcatccgagtcagtcct

SEQ ID NO: 370059 - DNA, 793 bp, Homo sapiens
gctgcaggaattcggacgaggctgtgagtgtctctagggtgatacgtgggtgagaaaggtcctggtccgcgccagagcccagcgcgcctcgtcgccatgcctcggaaaattgaggaaatcaaggacttcctgctcacagcccgacgaaaggatgccaaatctgtcaagatcaagaaaaataaggacaacgtgaagtttaaagttcgatgcagcagatacctttacaccctggtcatcactgacaaagagaaggcagagaaactgaagcagtccctgccccccggtttggcagtgaaggaactgaaatgaaccagacacactgattggaactgtattatattaaaatactaaaaatcgctctccgggcggcaatgggggcttgagagccgggtccccagcgccgggaagggagcgcggtggccgccaccgccaccgccccggagtccggcgccgaagctgcgggcgggcgggcgggcaccagctcggtcaggggctgcttggcgcggcactgtgcggtgcagcggcggcgcggcgcggtgcgggcttttcccaggcgccccggggtcgggtggccaacggcgcggccgcgggcgctgagcgcgaccggttcgcggtagcggtggcggcggcgtgcgtgccagggctgggggctccgccgcctctcttgcggctcaccgagctcccggcttccctctctccaggacaggcggttctcagagcacaaagctccagctggagatcacttcccgcaattatccatttgccaaggtctgatgcacaagtgaggctgatc

SEQ ID NO: 370060 - DNA, 804 bp, Homo sapiens
  misc_feature (804)..(804): n is a, c, g, or t
gctgcaggaattcggacgaggctgtgagtgtctctagggtgatacgtgggtgagaaaggtcctggtccgcgccagagcccagcgcgcctcgtcgccatgcctcggaaaattgaggaaatcaaggacttcctgctcacagcccgacgaaaggatgccaaatctgtcaagatcaagaaaaataaggacaacgtgaagtttaaagttcgatgcagcagatacctttacaccctggtcatcactgacaaagagaaggcagagaaactgaagcagtccctgccccccggtttggcagtgaaggaactgaaatgaaccagacacactgattggaactgtattatattaaaatactaaaaatcaaaaaaaaaaaaaaaaaaaaaaaaaaaaaaaaaaaaaaagaaacaagggggggggggcaaaaaatcccccgggggggcccattggccccttttttgtgtgtacccagggtggcgcccctaaaggggggccgcgaattttaaagcgaaggagcggggggcgcggcgcgttaaaaacaaaacgcgcgcggtgataggggggaaaagaccgtgctctactctggggacacttctttgggggaagaggcacccccttaacttttcgggggggcggggccactcatctggggcacaaacctcacctcatgagaaatttaaagcgactcacaggaacaatctacacaatttcaagctggctctaaggggtggaacccaacggaatatgctgccgctgaaaaaattgggcaacgaaatatgattcagaaaaattacgagctttgtaaaataaagn

SEQ ID NO: 370061 - DNA, 402 bp, Homo sapiens
  misc_feature (8)..(9): n is a, c, g, or t
  misc_feature (15)..(15): n is a, c, g, or t
  misc_feature (17)..(17): n is a, c, g, or t
  misc_feature (25)..(25): n is a, c, g, or t
catcgacnncccttngnatgggccncgcgccattgtgttgaaacccgcgaattcggccattatggccggggctttttcgtccttttccccggttgctgcttgctgtcctggtccgcgccagagcccagcgcgcctcgtcgccatgcctcggaaaattgaggaaatcaaggacttcctgctcacagcccgacgaaaggatgccaaatctgtcaagatcaagaaaaataaggacaacgtgaagtttaaagttcgatgcagcagatacctttacaccctggtcatcactgacaaagagaaggcagagaaactgaagcagtccctgccccccggtttggcagtgaaggaactgaaatgaaccagacacactgattggaactgtattatattaaaatactaaaaatc

SEQ ID NO: 370062 - DNA, 340 bp, Homo sapiens
ctactactactaaattcgcggcgtcgacggttgctgcttgctgtcctggtccgcgccagagcccagcgcgcctcgtcgccatgcctcggaaaattgaggaaatcaaggacttcctgctcacagcccgacgaaaggatgccaaatctgtcaagatcaagaaaaataaggacaacgtgaagtttaaagttcgatgcagcagatacctttacaccctggtcatcactgacaaagagaaggcagagaaactgaagcagtccctgccccccggtttggcagtgaaggaactgaaatgaaccagacacactgattggaactgtattatattaaaatactaaaaatc

SEQ ID NO: 370063 - DNA, 331 bp, Homo sapiens
taaattcgcggccgcgtcgactgggtgagaaaggtcctggtccgcgccagagcccagcgcgcctcgtcgccatgcctcggaaaattgaggaaatcaaggacttcctgctcacagcccgacgaaaggatgccaaatctgtcaagatcaagaaaaataaggacaacgtgaagtttaaagttcgatgcagcagatacctttacaccctggtcatcactgacaaagagaaggcagagaaactgaagcagtccctgccccccggtttggcagtgaaggaactgaaatgaaccagacacactgattggaactgtattatattaaaatactaaaaatc

SEQ ID NO: 370064 - DNA, 384 bp, Homo sapiens
agtttctctgccttctctttgtcagtgatgaccagggtgtaaaggtatctgctgcatcgaactttaaacttcacgttgtccttatttttcttgatcttgacagatttggcatcgcctcgtcgccatgcctcggaaaattgaggaaatcaaggacttcctgctcacagcccgacgaaaggatgccaaatctgtcaagatcaagaaaaataaggacaacgtgaagtttaaagttcgatgcagcagatacctttacaccctggtcatcactgacaaagagaaggcagagaaactgaagcagtccctgccccccggtttggcagtgaaggaactgaaatgaaccagacacactgattggaactgtattatattaaaatactaaaaatc

SEQ ID NO: 370065 - DNA, 312 bp, Homo sapiens
ccttgtaatccaagcagtcgtacgtgggtgagaaaggtcctggtccgcgccagagcccagcgcgcctcgtcgccatgcctcggaaaattgaggaaatcaaggacttcctgctcacagcccgacgaaaggatgccaaatctgtcaagatcaagaaaaataaggacaacgtgaagtttaaagttcgatgcagcagatacctttacaccctggtcatcactgacaaagagaaggcagagaaactgaagcagtccctgccccccgttgctgagtgaagaactgaaatgacagacgctgcttgattacagaggatat

SEQ ID NO: 370066 - DNA, 2926 bp, Homo sapiens
  misc_feature (1120)..(1120): n is a, c, g, or t
  misc_feature (1999)..(2000): n is a, c, g, or t
  misc_feature (2048)..(2048): n is a, c, g, or t
ctagtacttacaggatccttagcgtgtcagtgggtgagaaaggtcctggtccgcgccagagcccagcgcgcctcgtcgccatgcctcggaaaattgaggaaatcaaggacttcctgctcacagcccgacgaaaggatgccaaatctgtcaagatcaagaaaaataaggacaacgtgaagtttaaagttcgatgcagcagatacctttacaccctggtcatcactgacaaagagaaggcagagaaactgaagcagtccctgccccccggtttggcagtgaaggaactgaaatgaaccagacacactgattggaactgtattatattaaaatactaaaaatcctaagtgtctttcgtctttgcggatgggaaagggaaaaatgctacctcgtagtggcttctgatgggaacaggacgcgggttctgttgctgccttcctgtgtcttttttttttttttttttttcctttctttgagacggagtcttgctctgtggctcatcctggagcacagtggtgcgatatcagctcactaccacctccgcctcctgggttcaagcgactgtcctgcctcagcctcccgagtggctgggattacaggcacacatcaccacgcctggccaatttttgtatttgtagtagagacagggtttcactgcctgcctcagcctcccatagtgctgggattacaggcatgagcctccgtgcccggtgcatccctaatcttgagcatgatctcagtcggcaaatgaggccatctgttttcagcctgtttgaaaataagatgtggggaggccatgatggaaatagcacgtggggttaaacataactggcagatgtgggagcgatggtggggcatgccattcaaacaggtcccaaaatgggtgcaacaaggtatagcacatctaccactcgctaacttgactgacttggagaaatgactacacttttgcctgtttcctcagttggaaaatagccatattaacacctctttcattggcttgctgtcagggtactgggatggggggaggtgcatgggttggggtggccaccaggtggtgctgtgccacagcgggcagcccctctggaaatgactggcatcataaaatctgtcttcatacccnaggtagtgttttttgtttttttaagatctctaccttttaaaagcgtggcatacagtgtgcttggtattgtgttaggcatttagacgtgctcaggttgtaaggttgaagtgccagtctttgaatattctgtaaggattgtgagggtgtgaggtggttttgagtctggtcacgggtcttgtttcctccgggagagggtgggtacaccagccctcaggcccaggtgcggcactgtgggcggctttcagcctttcccgttctgtaagcattgcagattcccaaggaaaagcgagcctttaccatgtgggttttctttgttcccagcacatcgtccagagtttcatcccagctcctaggagacaggccttgcaggggtgtgtccagccttgtctagagaaggccgcctttcatgcagtgcttcccagccctggcttgtgactcagtcatctggggcacttaggcagttcactgtggtggccagggctgactggagattgcgattgcggtggtctggggcataggtgtgtttccaagctctcaggtgggcctctgctttgctgggcttcagcaagcccttaagtgctgcataccaggtgaatggggaggggggaggtgatgggctacagctgctggtgtgccgactgtcctccaactccctgctgagtctgtgggaggtctgtctgttgtgcttcagctttttgacacctctctgggtcagcaggcctccggggaagcagctagaatggtcgctgtctggctgggtgcaggtgggctgacaggtttggatattccaggccgcattccggtggctgtggagatagccctgagggacagcctttgcagtttgtttcttccagtgccgtgtgcagcctccagccttcnngggctcccttgccccgggttcaaagtcagtcctcggtgaccacccatncctaggagcagcccttcccacctggggggcctctgagggcaggggctgtaaaagcagctaccagaagagtccactttccccagcaactgcagggaccctgactcctgcttgtcctgcagcctgggctcctccctccgctggccaaagtcacgccaagcagtttgcggttaacaggacgggtgggggcctctgcatatgtgcagagtacggagggcccagggacgcgaggctccccgatgggcaacctcccctgcctttgcttttccccagagccccctcctggcctgcgttcggcatcttctcgggtcgtcatcgccctctgcggtgcctgcgctcggggtgagggtttttgtcggcttttgttacatcaccgatgtaacagtgcctggacgtagtaggtgctcaataaatatgttgttgaatgcgcttcagtctccccgaatgcttgtcccttccgggcgctctcatcgctctcctaccttccccgctacacagctcgaaggtcccctcctccgggaagctcaccctgtcccacttgccaggaagaatcaagcaaattttctgagtgagacaccttgtcctcactcaggcgtcctgcaggcggcttcagcgagttgttggggcagatgcgccgggagctcccgagggcagggacggcgtcttatttctctttttaagtccacagggcttgcacaatagatgcccaaaaaatgagagtgaatttagaatgagtgaccgagtggctgaagattgcctccttcctttcccagtctgtcggttacttaccctgtgacaagcccttgggacgggcagtcgcccctctctggcctatgactgctggctgcccccactgacaccttatacccttgcctcgtgcc

SEQ ID NO: 370067 - DNA, 2958 bp, Homo sapiens
  misc_feature (1152)..(1152): n is a, c, g, or t
  misc_feature (2031)..(2032): n is a, c, g, or t
  misc_feature (2080)..(2080): n is a, c, g, or t
acactgcaggcctactgggagaaaagccgaaagctggttaggcagccgtttagcggccaagaagaggggggagctttaggggccgttccagagcccagcgcgccccggcgccatgcctcggaaaattgaggaaatcaaggacttcctgctcacagcccgacgaaaggatgccaaatctgtcaagatcaagaaaaataaggacaacgtgaagtttaaagttcgatgcagcagatacctttacaccctggtcatcactgacaaagagaaggcagagaaactgaagcagtccctgccccccggtttggcagtgaaggaactgaaatgaaccagacacactgattggaactgtattatattaaaatactaaaaatcctaagtgtctttcgtctttgcggatgggaaagggaaaaatgctacctcgtagtggcttctgatgggaacaggacgcgggttctgttgctgccttcctgtgtcttttttttttttttttttttcctttctttgagacggagtcttgctctgtggctcatcctggagcacagtggtgcgatatcagctcactaccacctccgcctcctgggttcaagcgactgtcctgcctcagcctcccgagtggctgggattacaggcacacatcaccacgcctggccaatttttgtatttgtagtagagacagggtttcactgcctgcctcagcctcccatagtgctgggattacaggcatgagcctccgtgcccggtgcatccctaatcttgagcatgatctcagtcggcaaatgaggccatctgttttcagcctgtttgaaaataagatgtggggaggccatgatggaaatagcacgtggggttaaacataactggcagatgtgggagcgatggtggggcatgccattcaaacaggtcccaaaatgggtgcaacaaggtatagcacatctaccactcgctaacttgactgacttggagaaatgactacacttttgcctgtttcctcagttggaaaatagccatattaacacctctttcattggcttgctgtcagggtactgggatggggggaggtgcatgggttggggtggccaccaggtggtgctgtgccacagcgggcagcccctctggaaatgactggcatcataaaatctgtcttcatacccnaggtagtgttttttgtttttttaagatctctaccttttaaaagcgtggcatacagtgtgcttggtattgtgttaggcatttagacgtgctcaggttgtaaggttgaagtgccagtctttgaatattctgtaaggattgtgagggtgtgaggtggttttgagtctggtcacgggtcttgtttcctccgggagagggtgggtacaccagccctcaggcccaggtgcggcactgtgggcggctttcagcctttcccgttctgtaagcattgcagattcccaaggaaaagcgagcctttaccatgtgggttttctttgttcccagcacatcgtccagagtttcatcccagctcctaggagacaggccttgcaggggtgtgtccagccttgtctagagaaggccgcctttcatgcagtgcttcccagccctggcttgtgactcagtcatctggggcacttaggcagttcactgtggtggccagggctgactggagattgcgattgcggtggtctggggcataggtgtgtttccaagctctcaggtgggcctctgctttgctgggcttcagcaagcccttaagtgctgcataccaggtgaatggggaggggggaggtgatgggctacagctgctggtgtgccgactgtcctccaactccctgctgagtctgtgggaggtctgtctgttgtgcttcagctttttgacacctctctgggtcagcaggcctccggggaagcagctagaatggtcgctgtctggctgggtgcaggtgggctgacaggtttggatattccaggccgcattccggtggctgtggagatagccctgagggacagcctttgcagtttgtttcttccagtgccgtgtgcagcctccagccttcnngggctcccttgccccgggttcaaagtcagtcctcggtgaccacccatncctaggagcagcccttcccacctggggggcctctgagggcaggggctgtaaaagcagctaccagaagagtccactttccccagcaactgcagggaccctgactcctgcttgtcctgcagcctgggctcctccctccgctggccaaagtcacgccaagcagtttgcggttaacaggacgggtgggggcctctgcatatgtgcagagtacggagggcccagggacgcgaggctccccgatgggcaacctcccctgcctttgcttttccccagagccccctcctggcctgcgttcggcatcttctcgggtcgtcatcgccctctgcggtgcctgcgctcggggtgagggtttttgtcggcttttgttacatcaccgatgtaacagtgcctggacgtagtaggtgctcaataaatatgttgttgaatgcgcttcagtctccccgaatgcttgtcccttccgggcgctctcatcgctctcctaccttccccgctacacagctcgaaggtcccctcctccgggaagctcaccctgtcccacttgccaggaagaatcaagcaaattttctgagtgagacaccttgtcctcactcaggcgtcctgcaggcggcttcagcgagttgttggggcagatgcgccgggagctcccgagggcagggacggcgtcttatttctctttttaagtccacagggcttgcacaatagatgcccaaaaaatgagagtgaatttagaatgagtgaccgagtggctgaagattgcctccttcctttcccagtctgtcggttacttaccctgtgacaagcccttgggacgggcagtcgcccctctctggcctatgactgctggctgcccccactgacaccttatacccttgcctcgtgcc

SEQ ID NO: 370068 - DNA, 2970 bp, Homo sapiens
  misc_feature (1164)..(1164): n is a, c, g, or t
  misc_feature (2043)..(2044): n is a, c, g, or t
  misc_feature (2092)..(2092): n is a, c, g, or t
agtttctctgccttctctttgtcagtgatgaccagggtgtaaaggtatctgctgcatcgaactttaaacttcacgttgtccttatttttcttgatcttgacagatttggcatcgcctcgtcgccatgcctcggaaaattgaggaaatcaaggacttcctgctcacagcccgacgaaaggatgccaaatctgtcaagatcaagaaaaataaggacaacgtgaagtttaaagttcgatgcagcagatacctttacaccctggtcatcactgacaaagagaaggcagagaaactgaagcagtccctgccccccggtttggcagtgaaggaactgaaatgaaccagacacactgattggaactgtattatattaaaatactaaaaatcctaagtgtctttcgtctttgcggatgggaaagggaaaaatgctacctcgtagtggcttctgatgggaacaggacgcgggttctgttgctgccttcctgtgtcttttttttttttttttttttcctttctttgagacggagtcttgctctgtggctcatcctggagcacagtggtgcgatatcagctcactaccacctccgcctcctgggttcaagcgactgtcctgcctcagcctcccgagtggctgggattacaggcacacatcaccacgcctggccaatttttgtatttgtagtagagacagggtttcactgcctgcctcagcctcccatagtgctgggattacaggcatgagcctccgtgcccggtgcatccctaatcttgagcatgatctcagtcggcaaatgaggccatctgttttcagcctgtttgaaaataagatgtggggaggccatgatggaaatagcacgtggggttaaacataactggcagatgtgggagcgatggtggggcatgccattcaaacaggtcccaaaatgggtgcaacaaggtatagcacatctaccactcgctaacttgactgacttggagaaatgactacacttttgcctgtttcctcagttggaaaatagccatattaacacctctttcattggcttgctgtcagggtactgggatggggggaggtgcatgggttggggtggccaccaggtggtgctgtgccacagcgggcagcccctctggaaatgactggcatcataaaatctgtcttcatacccnaggtagtgttttttgtttttttaagatctctaccttttaaaagcgtggcatacagtgtgcttggtattgtgttaggcatttagacgtgctcaggttgtaaggttgaagtgccagtctttgaatattctgtaaggattgtgagggtgtgaggtggttttgagtctggtcacgggtcttgtttcctccgggagagggtgggtacaccagccctcaggcccaggtgcggcactgtgggcggctttcagcctttcccgttctgtaagcattgcagattcccaaggaaaagcgagcctttaccatgtgggttttctttgttcccagcacatcgtccagagtttcatcccagctcctaggagacaggccttgcaggggtgtgtccagccttgtctagagaaggccgcctttcatgcagtgcttcccagccctggcttgtgactcagtcatctggggcacttaggcagttcactgtggtggccagggctgactggagattgcgattgcggtggtctggggcataggtgtgtttccaagctctcaggtgggcctctgctttgctgggcttcagcaagcccttaagtgctgcataccaggtgaatggggaggggggaggtgatgggctacagctgctggtgtgccgactgtcctccaactccctgctgagtctgtgggaggtctgtctgttgtgcttcagctttttgacacctctctgggtcagcaggcctccggggaagcagctagaatggtcgctgtctggctgggtgcaggtgggctgacaggtttggatattccaggccgcattccggtggctgtggagatagccctgagggacagcctttgcagtttgtttcttccagtgccgtgtgcagcctccagccttcnngggctcccttgccccgggttcaaagtcagtcctcggtgaccacccatncctaggagcagcccttcccacctggggggcctctgagggcaggggctgtaaaagcagctaccagaagagtccactttccccagcaactgcagggaccctgactcctgcttgtcctgcagcctgggctcctccctccgctggccaaagtcacgccaagcagtttgcggttaacaggacgggtgggggcctctgcatatgtgcagagtacggagggcccagggacgcgaggctccccgatgggcaacctcccctgcctttgcttttccccagagccccctcctggcctgcgttcggcatcttctcgggtcgtcatcgccctctgcggtgcctgcgctcggggtgagggtttttgtcggcttttgttacatcaccgatgtaacagtgcctggacgtagtaggtgctcaataaatatgttgttgaatgcgcttcagtctccccgaatgcttgtcccttccgggcgctctcatcgctctcctaccttccccgctacacagctcgaaggtcccctcctccgggaagctcaccctgtcccacttgccaggaagaatcaagcaaattttctgagtgagacaccttgtcctcactcaggcgtcctgcaggcggcttcagcgagttgttggggcagatgcgccgggagctcccgagggcagggacggcgtcttatttctctttttaagtccacagggcttgcacaatagatgcccaaaaaatgagagtgaatttagaatgagtgaccgagtggctgaagattgcctccttcctttcccagtctgtcggttacttaccctgtgacaagcccttgggacgggcagtcgcccctctctggcctatgactgctggctgcccccactgacaccttatacccttgcctcgtgcc

SEQ ID NO: 370069 - DNA, 399 bp, Homo sapiens
agtttctctgccttctctttgtcagtgatgaccagggtgtaaaggtatctgctgcatcgaactttaaacttcacgttgtccttatttttcttgatcttgacagatttggcatcgcctcgtcgccatgcctcggaaaattgaggaaatcaaggacttcctgctcacagcccgacgaaaggatgccaaatctgtcaggatcaatataatacagttccaatcagtgtgtctggttcatttcagttccttcactgccaaaccggggggcagggactgcttcagtttctctgccttctctttgtcagtgatgaccagggtgtaaaggtatctgctgcatcgaactttaaactttacgttgtccttatttttcttgatcttggtcgacgggccgcgaatttagta

SEQ ID NO: 370070 - DNA, 1760 bp, Homo sapiens
  misc_feature (1753)..(1753): n is a, c, g, or t
  misc_feature (1760)..(1760): n is a, c, g, or t
caggaggacgggggcgcgcttcccataacattaccctggctgagcgtgaggctccagggctgggcaccgggttgacctcttattcctcgctgagggcatcgttaccgcctgtggctgcaagccgaggcgcgcgggtggaaactgggtcgaggtctgggtagacgtctgagcgatctgcacaaggagtggcgcagtctggaatttgattgaggattcctaacgccctccgcttgatgttctggtgattcccgggggctcggcttcggaggaaggcaccaagaaactgataatgttcctttgaattggcttctgtatttgcttcatcaatgtctctcatactgaatatcttaagagagatgctggaatattttggcgttcctgtagaacaggttttgctgatttgggaaaataaagactatggatcaactaggagtattgttcgtattattgggaaaatgcttccactggaaccttgtcgaagacctaattttgagttgatcccgctcttgaactctgtagactctgataattgtggatctatggttccatcttttgctgatattttgtatgtggcaaatgatgaagaagccagttatctcagatttcgaaatagtatatggaaaaatgaagaagagaaagtggaaatttttcatcctttgcgactagttcgggatccactgtcacctgctgtaagacagaaagaaactgtgaaaaatgacctgcctgtaaatgaagctgcaattagaaaaatagctgcccttgaaaatgagctgacttttcttcgctctcagattgcagcaattgtggaaatgcaggaactgaaaaatagtacaaattctagttcctttggcttgagtgacgagcgcattagtttgggtcagctgtcatcatcgcgggctgcccatctgagtgtggacccagatcagcttccaggttcagtgctttctcctcctcctcctccaccacttcctcctcagttttcatctctccagccaccgtgttttcctcccgtacaaccaggatctaataatatttgtgactcagataatccagcaactgaaatgagcaaacagaacccggctgctaataagaccaattatagtcatcattcaaaaagccagagaaataaagatattccaaacatgttggacgttctaaaggatatgaataaggttaagcttcgtgcaattgagcggtcacctggcggtagacccattcataagaggaaaagacagaattcacattgggatccagtttctttaatatctcatgcacttaaacagaaatttgcatttcaagaagatgattcttttgagaaagagaatagatcttgggaatcttccccattttctagtccagaaacttcaaggtttggacatcacatttcacagtcagaaggacagcgaactaaagaagaaatggtcaacacaaaagctgttgaccaaggtatcagcaacacaagccttctaaactcaaggatttaaactcaacttaaggttgagctttaaacttccaaaacttcttcctggatgataaattattcttagaaactgatttggactgttaaaggctaaaagtagatgtatttaaagactcttcttgacacattttgcctacacttgctatgtaaatatgtatgcctgtcatttttgtttcctttgttcctttttacgtttatactctgttcttctgtacatagagcttaaaataaacattctattggcctcgttggcctcagcggtggagctctgcngccggan

SEQ ID NO: 370071 - DNA, 241 bp, Homo sapiens
ttaataccatggggcatgtgtcttctcctgactccctgcagagctctgactatttttttctttttttactttagttgatcccgctcttgaactctgtagactctgataattgtggatctatggttccatcttttgctgatattttgtatgtggcaaatgatgaagaagccagttatctcagatttcggtaattttatatgcttatcttgggaagtgggctataaactgaattcttgcatgt

SEQ ID NO: 370072 - DNA, 1550 bp, Homo sapiens
  misc_feature (1543)..(1543): n is a, c, g, or t
  misc_feature (1550)..(1550): n is a, c, g, or t
tgggatgcggaagtagcagtcctgtcatgcggaagtagcagtccggtcctagggactagcaggcaccaagaaactgataatgttcctttgaattggcttctgtatttgcttcatcaatgtctctcatactgaatatcttaagagagatgctggaatattttggcgttcctgtagaacaggttttgctgatttgggaaaataaagactatggatcaactaggagtattgttcgtattattgggaaaatgcttccactggaaccttgtcgaagacctaattttgagttgatcccgctcttgaactctgtagactctgataattgtggatctatggttccatcttttgctgatattttgtatgtggcaaatgatgaagaagccagttatctcagatttcgaaatagtatatggaaaaatgaagaagagaaagtggaaatttttcatcctttgcgactagttcgggatccactgtcacctgctgtaagacagaaagaaactgtgaaaaatgacctgcctgtaaatgaagctgcaattagaaaaatagctgcccttgaaaatgagctgacttttcttcgctctcagattgcagcaattgtggaaatgcaggaactgaaaaatagtacaaattctagttcctttggcttgagtgacgagcgcattagtttgggtcagctgtcatcatcgcgggctgcccatctgagtgtggacccagatcagcttccaggttcagtgctttctcctcctcctcctccaccacttcctcctcagttttcatctctccagccaccgtgttttcctcccgtacaaccaggatctaataatatttgtgactcagataatccagcaactgaaatgagcaaacagaacccggctgctaataagaccaattatagtcatcattcaaaaagccagagaaataaagatattccaaacatgttggacgttctaaaggatatgaataaggttaagcttcgtgcaattgagcggtcacctggcggtagacccattcataagaggaaaagacagaattcacattgggatccagtttctttaatatctcatgcacttaaacagaaatttgcatttcaagaagatgattcttttgagaaagagaatagatcttgggaatcttccccattttctagtccagaaacttcaaggtttggacatcacatttcacagtcagaaggacagcgaactaaagaagaaatggtcaacacaaaagctgttgaccaaggtatcagcaacacaagccttctaaactcaaggatttaaactcaacttaaggttgagctttaaacttccaaaacttcttcctggatgataaattattcttagaaactgatttggactgttaaaggctaaaagtagatgtatttaaagactcttcttgacacattttgcctacacttgctatgtaaatatgtatgcctgtcatttttgtttcctttgttcctttttacgtttatactctgttcttctgtacatagagcttaaaataaacattctattggcctcgttggcctcagcggtggagctctgcngccggan

SEQ ID NO: 370073 - DNA, 703 bp, Homo sapiens
tgtctgcagctctggcagaggactgttccactagacacgctgaagggactgggtacgtgttttccttcaggaccagagctgagaggagctgggatcgcggcggcaatggaacgggcctcagaaaggcgcacggccagcgcgctttttgcggggttccgggccttgggacttttcagcaacgacattccacacgtggtgcggttcagcgcgctcaagcgccggttctatgtaacaacctgcgtgggcaagagtttccacacctatgacgttcagaaacttagtctggttgcagtaagtaattctgttccacaggatatctgctgtatggcagctgatggcagattagtctttgctgcttatggaaatgttttctctgcatttgcccgtaataaagagatagtacatacctttaagggtcataaggcagaaatccatttcttgcaaccctttggagaccacattatctctgttgatactgatggcattcttattatttggcacatatattcagaagaagaatacctgcagttgacttttgataaatcagtatttaaaatttctgcaattttgcatccaagtacctacttgaataaaatacttctgggcagtgaacaaggaagcctgcagttgtggaatgtaaaatccaataaacttctatatacatttccaggatggaaagttggagtgacagctcttcagcagg

SEQ ID NO: 370074 - DNA, 399 bp, Homo sapiens
tgtctgcagctctggcagaggactgttccactagacacgctgaagggactgggtacgtgttttccttcaggaccagagctgagaggagctgggatcgcggcggcaatggaacgggcctcagaaaggcgcacggccagcgcgctttttgcggggttccgggccttgggacttttcagcaacgacattccacacgtggtgcggttcagcgcgctcaagcgccggttctatgtaacaacctgcgtgggcaagagtttccacacctatgacgtgagtgacttcttttgttagcttcccaggcccatttaccacgggcttcccttctttaacccctccctgtcctattaatatttcgccatccggtcacgtccacgtgctgatttggcacttgcagtcctcctg

SEQ ID NO: 370075 - DNA, 472 bp, Homo sapiens
ctgcaagggccactcctgccagatttgcagatttagccaggtcggcagggctgcgggtgggccaaagtcatgggcctcattccaagccgtggccgctgcactgaccaccctgggtgtgaaggccactcgcatatagaggtgacaggcgacccctctgttgcctttgctctgcctccctggagggctggggagagcaggtaagtggggccatgggggcacttggcatggtgcatggagcacaggggctggggtcgggtccttccaggccacctgccgagagctaaaacatgtgctttgaacgactgccagcaggatgcggtagcacgcacctgcaatcccagcgctttgggaggccaaagccggaggatcacttgaggccaggagtttgaaaccagcctgggcaacatagcaagaccacacgcctacaagaaaaaataaataaaatgtctggaataaggaattcaaaaaaaaa

SEQ ID NO: 370076 - DNA, 655 bp, Homo sapiens
  misc_feature (552)..(552): n is a, c, g, or t
ctggggccctgggcccctcgtaggatagacagagcctgtcctaaccttccggaagtgcatgctggggaggccccttgcctgctgaccttctgtgctcaggacgactaatcggccacatgaccaccactctgtcccatgggattcctagagaagtctcactaagagcccagcacactcacatcacaactaacctcctgggatctgctcacacctccggcagtaacctcgcccactcagagatgtcagtgggaccccttgcttctttgtttcagaacaagagccccaagacccgggacatccaggaggaggagctggaggtgctgctggaggaggaggcagccggcggcgatgaggaccgggaaaaggagattctcattgaacggatccagtccatcaaggaggagaaggaggacatcacctaccggctgccggagctggacccaaggggctcggacgaggagaacctggactcggagacgtcggccagcaccgagagcctgctggaggagcgggccgggcggggggcctcggaagggccccctgcgcctgctntcccttgccccggcgcgcaccaaacccagaagacccataaaataaacgtgaaaagacaaacacgaggaaaaacgaaaacaaagttaaagagaaaaaaatgaga

SEQ ID NO: 370077 - DNA, 257 bp, Homo sapiens
cgtaagcatagctgaagtctggcctcagcctggtcccatggggagctctagtgggttcatagcgccacagagctcatcctgcccgtcttgagagctttcacttctgcaacttcatttcctcctccttcccactatctccccctccctccaagaaaaaaaaaatgttctcgtgttgagatgatttagagctgtctctttatgggtttcccagaagcagggtctgagatggggtatttgcacacacagcggcttatgga

SEQ ID NO: 370078 - DNA, 282 bp, Homo sapiens
tgttttgttttgttttgcttgagaccaggctattgtgcagtggtgtaatcacagctcactgcagcctcaacctcctgggctcaagcaatccccccacctcagcctcccaagtagctgggacaacaggcacacgccaccacgcctggcttattttttcttttataaagacagggtctgattatgttgcccaggctaatctcaaactcctgggcaacatagcaagaccacacgcctacaagaaaaaataaataaaatgtctggaataaggaattcaaaaaaaaa

SEQ ID NO: 370079 - DNA, 6221 bp, Homo sapiens
cggggcggagcggctcgagcagcggcgggctggcaggcggtcgtccggccggggacccggcccgggaccggcggcgcgcggcggccgaggccagctccaggacacgcgcgccccgagcctgggaggcatgctgaagccaggcggccggcaggatgagtgtgaaagaggcaggcagctcgggccgccgggagcaggcggcctaccacctgcacatctacccccagctgtccaccaccgagagccaggcctcgtgccgcgtgactgccaccaaggacagcaccacctcggacgtcatcaaggacgccattgccagcctgcggctggacggcaccaaatgttatgtgctggtggaggtcaaagagtcgggaggcgaggaatgggtgctggacgccaacgactcgcctgtgcaccgggtgctgctatggccccggcgggcacaggacgagcaccctcaggaggatggctactacttcctgctgcaggagcgcaacgcagatggaaccatcaagtacgtgcatatgcagctggtggcgcaggccacagccacccggcgcctagtggagcgtggcctcctgccacggcagcaggcggactttgatgacctgtgtaacctccccgagctaaccgagggcaacctcctgaagaacctcaagcaccgcttcctgcaacaaaagatctacacgtacgcggggagcatcctggtggccatcaacccctttaagttcctgcccatctacaaccccaagtacgtgaagatgtatgagaaccagcagctgggcaagctggagccacacgtcttcgcgctggccgacgtggcctactacaccatgctcaggaagcgcgtgaaccagtgcatcgtgatctcgggtgagagcggctccggcaagacccagagcaccaacttcctcatccactgcctcaccgccctcagccagaagggctacgccagcggcgtcgagaggaccatcctgggtgctggccctgtgctggaggcttttggaaatgccaagacagcccacaacaacaactccagccggtttgggaaattcatccaagtcagctacctagagagtggcatcgtgagaggagctgtcgtcgagaaatatctgcttgaaaagtctcgcctggtgtctcaggagaaggatgagaggaactaccatgtgttttattatttgttacttggggtcagcgaggaagagcgccaagaatttcagctcaagcagcctgaagattatttctacctcaaccagcataacttgaagattgaagatggggaggacctgaagcatgactttgagaggctcaagcaggccatggagatggtgggcttcctccccgccaccaagaagcagatttttgccgtcctctcggccatcctgtacctgggcaacgtcacttataagaagagagctacaggccgagaggaagggttggaggtcgggccacccgaggtgctggacaccctgtcgcagcttctgaaggtgaagcgagaaatcttggtggaggttctgaccaaaagaaaaacggtgaccgtcaacgacaagcttatccttccctacagcctcagcgaggccatcactgcccgcgactccatggccaagtctctgtacagcgccctgttcgactggattgtgctgcggatcaaccacgcactcctcaacaagaaggacgtggaagaggcagtctcgtgcctgtccattggggtcctggacatcttcgggtttgaagacttcgagaggaacagctttgagcagttctgcatcaactacgccaatgagcagctgcagtattacttcaaccagcacatcttcaagctggagcaggaggaatatcagggcgaggggatcacgtggcacaacatcggctacacagacaatgtcggctgcatccatctcatcagcaagaaacccacgggcctcttctacctgctggacgaggagagcaacttcccccacgccacgagccagaccctgctggccaagttcaaacagcaacatgaggacaataagtacttcctgggcaccccggtcatggagccagctttcatcatccagcacttcgcagggaaggtgaaatatcagatcaaggacttccgggagaagaacatggactacatgcggccagacatcgtggccctgctgcggggcagtgacagctcctacgtgcgggagctcatcggcatggaccccgtggccgtgttccgctgggccgtgctccgggctgctatccgggccatggcagtgcttcgggaggccggacgcctgcgggccgagagggccgaaaaggctgcaggtatgagcagccctggtgcccaaagtcacccagaagagctgccaagaggagccagcaccccttcggaaaaactttaccgcgatttgcataaccaaatgatcaagagcatcaaaggattgccctggcagggcgaggacccccgtagccttctccagtccctcagtcggctccagaaaccccgcgccttcatcctgaaaagtaaaggtatcaaacaaaagcagatcattccaaagaacctactggactccaagtccctgaaactcatcatcagcatgactctgcacgaccgcaccaccaagtccctactgcacctgcacaagaagaaaaagccaccaagcatcagcgcccagttccagacatcccttaacaagctcttggaggcactggggaaggcggagcccttctttatccgctgcatccgttccaatgctgaaaagaaagagctgtgctttgacgacgagctggtcctgcagcagctgcgctacaccggcatgctggagaccgtgcgcatccggaggtcagggtacagcgccaagtacacgttccaggatttcaccgagcagttccaggtgctcctgcccaaggatgcccagccctgcagggaggtcatctccaccctcctggagaaaatgaagatagacaagaggaactaccagatcgggaagaccaaggtcttcctgaaggagacggagcggcaagccctgcaggagacgctgcaccgggaggtggtgcggaaaatcctgctgctgcagagctggttccggatggtgctggagcgtcggcacttcctgcagatgaagcgggccgccgtcaccatccaggcctgctggcggtcctaccgggtccggagggcgctggagaggacgcaggctgccgtgtacctccaggcctcatggaggggctactggcagcggaagctctaccggcaccagaaacagagcatcatccgcctgcagagcctgtgtcgggggcacctgcagcgcaagagcttcagccagatgatctcggagaagcagaaggcagaagagaaggagagggaagccctggaagccgcaagagcaggtgctgaggagggcggacagggtcaggcggctggagggcagcaggtagctgagcaggggccggagccagcggaggatggcgggcacctggcatcggagcctgaggtgcagccaagtgacaggtcccccctagagcactcctcacctgagaaggaggccccaagcccagagaagactctcccaccccagaaaaccgtggcggctgaaagtcacgagaaagtccccagcagccgggagaagcgtgagtcgcgtcggcaaagagggctggagcacgtcaagttccagaacaaacacatccagtcctgcaaggaggagagtgccctcagagaaccttccagaagggtcacccaggagcaaggggtgagtctcctggaagacaaaaaggagagcagagaagatgaaacccttctagtcgtagagacggaggctgagaacacatctcaaaagcagcccacagagcaaccccaggccatggcagttggcaaggtctctgaagaaactgagaagacgctgcccagtgggagccccaggcctggccagttggagcggccgaccagcctggccctggacagcagggtcagcccaccggcccctggcagcgcccccgagacccccgaggacaagagcaaaccatgtggcagcccaagggttcaggaaaagcccgacagccccggaggctccacgcagatccagcggtacctggacgccgagcggctggccagcgccgtggaactgtggcggggcaagaagctggtggccgccgccagccctagtgccatgctcagccagtccctggacctcagcgacagacaccgggccacaggggccgccctcacgcccacagaggagaggcgcacctccttctccacgagcgacgtctccaagctcctcccgtccctggccaaggctcagcctgcagcagaaaccacggacggagagcgaagtgcgaaaaagccagctgtccagaagaagaagccaggcgacgcatcctccctcccagacgcagggctgtccccgggctctcaggtcgactctaaatccacgtttaagaggctttttctgcataaaaccaaggataaaaaatacagcctggagggcgcagaggagctggagaatgcagtgtccgggcacgtggtgctggaagccaccaccatgaagaagggcctggaagccccctccggacagcagcatcgccacgctgcaggtgagaagcgcaccaaggaaccaggaggcaaagggaagaagaaccgaaatgtcaagattgggaagatcacagtgtcagagaagtggcgggaatcggtgttccgccagatcaccaacgccaatgagctcaagtacctggacgagttcctgctcaacaagataaatgacctccgttcccagaagacgcccattgagagcttgtttatcgaagccaccgagaagttcaggagcaacatcaaaacgatgtactctgtcccgaacgggaagatccacgtgggctacaaggatctgatggagaactaccagatcgtcgtcagcaacctggccactgagcgtggccagaaggacaccaacctggtcctcaacctcttccagtcactgctagatgagttcacccgtggctacaccaagaacgacttcgagccagtgaagcagagcaaagctcagaagaagaagcggaagcaggagcgtgctgtccaggagcacaacgggcacgtgttcgccagctaccaggttagcatcccgcagtcgtgcgagcagtgcctctcctatatctggctcatggacaaggccctgctctgcagcgtgtgcaagatgacctgccacaagaagtgcgtgcacaagattcagagccactgctcctacacctacgggaggaagggcgagccaggcgctgagcctggccacttcggcgtgtgcgtagacagcctgaccagcgacaaggcctcggtgcccatcgtgctggagaagctcctggaacacgtggagatgcacggcctgtacaccgagggcctctaccgcaagtcgggtgctgccaaccgcactcgggagctccggcaggcgctgcagacagaccccgcagcagtcaagctggagaacttccccatccacgccatcacaggggtgctgaagcagtggctgcgggagctgcccgagcccctcatgaccttcgcacagtacggcgacttcctccgagccgtcgagctgccggagaagcaggagcagctggctgccatctatgccgtcctggagcaccttccagaagccaaccacaactccctggagagactcatcttccaccttgtcaaggtggccctgctcgaggatgtcaaccgcatgtcacctggggcgctggccattatcttcgcaccctgcctcctgcgctgccctgacaactcggacccgctgaccagcatgaaggacgtcctcaagatcaccacgtgcgtggagatgctgatcaaggagcagatgaggaaatacaaagtgaagatggaggagatcagccaactggaggctgcagagagtatcgccttccgcaggctttcgctcctgcgacaaaatgctaacaagagccccaagacccgagagcctgctggaggagcgggccggctcttgacgacctccagggtctccccgagccccagcacgcgaaacctggccctcggaagctggcggagcgcggccctcaggactcgggggacagggcggccagcccggccgggccgcgcaagagccctcaggaggcggccgccgcgcccggcacgagagagccctgcccagccgcccaggagccggccccgagtgaggacagaaaccccttccccgttaagctccggtccacctccctctcgctcaaatacagggatggcgcctctcaggaggtga

SEQ ID NO: 370080 - DNA, 7740 bp, Homo sapiens
cggggcggagcggctcgagcagcggcgggctggcaggcggtcgtccggccggggacccggcccgggaccggcggcgcgcggcggccgaggccagctccaggacacgcgcgccccgagcctgggaggcatgctgaagccaggcggccggcaggatgagtgtgaaagaggcaggcagctcgggccgccgggagcaggcggcctaccacctgcacatctacccccagctgtccaccaccgagagccaggcctcgtgccgcgtgactgccaccaaggacagcaccacctcggacgtcatcaaggacgccattgccagcctgcggctggacggcaccaaatgttatgtgctggtggaggtcaaagagtcgggaggcgaggaatgggtgctggacgccaacgactcgcctgtgcaccgggtgctgctatggccccggcgggcacaggacgagcaccctcaggaggatggctactacttcctgctgcaggagcgcaacgcagatggaaccatcaagtacgtgcatatgcagctggtggcgcaggccacagccacccggcgcctagtggagcgtggcctcctgccacggcagcaggcggactttgatgacctgtgtaacctccccgagctaaccgagggcaacctcctgaagaacctcaagcaccgcttcctgcaacaaaagatctacacgtacgcggggagcatcctggtggccatcaacccctttaagttcctgcccatctacaaccccaagtacgtgaagatgtatgagaaccagcagctgggcaagctggagccacacgtcttcgcgctggccgacgtggcctactacaccatgctcaggaagcgcgtgaaccagtgcatcgtgatctcgggtgagagcggctccggcaagacccagagcaccaacttcctcatccactgcctcaccgccctcagccagaagggctacgccagcggcgtcgagaggaccatcctgggtgctggccctgtgctggaggcttttggaaatgccaagacagcccacaacaacaactccagccggtttgggaaattcatccaagtcagctacctagagagtggcatcgtgagaggagctgtcgtcgagaaatatctgcttgaaaagtctcgcctggtgtctcaggagaaggatgagaggaactaccatgtgttttattatttgttacttggggtcagcgaggaagagcgccaagaatttcagctcaagcagcctgaagattatttctacctcaaccagcataacttgaagattgaagatggggaggacctgaagcatgactttgagaggctcaagcaggccatggagatggtgggcttcctccccgccaccaagaagcagatttttgccgtcctctcggccatcctgtacctgggcaacgtcacttataagaagagagctacaggccgagaggaagggttggaggtcgggccacccgaggtgctggacaccctgtcgcagcttctgaaggtgaagcgagaaatcttggtggaggttctgaccaaaagaaaaacggtgaccgtcaacgacaagcttatccttccctacagcctcagcgaggccatcactgcccgcgactccatggccaagtctctgtacagcgccctgttcgactggattgtgctgcggatcaaccacgcactcctcaacaagaaggacgtggaagaggcagtctcgtgcctgtccattggggtcctggacatcttcgggtttgaagacttcgagaggaacagctttgagcagttctgcatcaactacgccaatgagcagctgcagtattacttcaaccagcacatcttcaagctggagcaggaggaatatcagggcgaggggatcacgtggcacaacatcggctacacagacaatgtcggctgcatccatctcatcagcaagaaacccacgggcctcttctacctgctggacgaggagagcaacttcccccacgccacgagccagaccctgctggccaagttcaaacagcaacatgaggacaataagtacttcctgggcaccccggtcatggagccagctttcatcatccagcacttcgcagggaaggtgaaatatcagatcaaggacttccgggagaagaacatggactacatgcggccagacatcgtggccctgctgcggggcagtgacagctcctacgtgcgggagctcatcggcatggaccccgtggccgtgttccgctgggccgtgctccgggctgctatccgggccatggcagtgcttcgggaggccggacgcctgcgggccgagagggccgaaaaggctgcaggtatgagcagccctggtgcccaaagtcacccagaagagctgccaagaggagccagcaccccttcggaaaaactttaccgcgatttgcataaccaaatgatcaagagcatcaaaggattgccctggcagggcgaggacccccgtagccttctccagtccctcagtcggctccagaaaccccgcgccttcatcctgaaaagtaaaggtatcaaacaaaagcagatcattccaaagaacctactggactccaagtccctgaaactcatcatcagcatgactctgcacgaccgcaccaccaagtccctactgcacctgcacaagaagaaaaagccaccaagcatcagcgcccagttccagacatcccttaacaagctcttggaggcactggggaaggcggagcccttctttatccgctgcatccgttccaatgctgaaaagaaagagctgtgctttgacgacgagctggtcctgcagcagctgcgctacaccggcatgctggagaccgtgcgcatccggaggtcagggtacagcgccaagtacacgttccaggatttcaccgagcagttccaggtgctcctgcccaaggatgcccagccctgcagggaggtcatctccaccctcctggagaaaatgaagatagacaagaggaactaccagatcgggaagaccaaggtcttcctgaaggagacggagcggcaagccctgcaggagacgctgcaccgggaggtggtgcggaaaatcctgctgctgcagagctggttccggatggtgctggagcgtcggcacttcctgcagatgaagcgggccgccgtcaccatccaggcctgctggcggtcctaccgggtccggagggcgctggagaggacgcaggctgccgtgtacctccaggcctcatggaggggctactggcagcggaagctctaccggcaccagaaacagagcatcatccgcctgcagagcctgtgtcgggggcacctgcagcgcaagagcttcagccagatgatctcggagaagcagaaggcagaagagaaggagagggaagccctggaagccgcaagagcaggtgctgaggagggcggacagggtcaggcggctggagggcagcaggtagctgagcaggggccggagccagcggaggatggcgggcacctggcatcggagcctgaggtgcagccaagtgacaggtcccccctagagcactcctcacctgagaaggaggccccaagcccagagaagactctcccaccccagaaaaccgtggcggctgaaagtcacgagaaagtccccagcagccgggagaagcgtgagtcgcgtcggcaaagagggctggagcacgtcaagttccagaacaaacacatccagtcctgcaaggaggagagtgccctcagagaaccttccagaagggtcacccaggagcaaggggtgagtctcctggaagacaaaaaggagagcagagaagatgaaacccttctagtcgtagagacggaggctgagaacacatctcaaaagcagcccacagagcaaccccaggccatggcagttggcaaggtctctgaagaaactgagaagacgctgcccagtgggagccccaggcctggccagttggagcggccgaccagcctggccctggacagcagggtcagcccaccggcccctggcagcgcccccgagacccccgaggacaagagcaaaccatgtggcagcccaagggttcaggaaaagcccgacagccccggaggctccacgcagatccagcggtacctggacgccgagcggctggccagcgccgtggaactgtggcggggcaagaagctggtggccgccgccagccctagtgccatgctcagccagtccctggacctcagcgacagacaccgggccacaggggccgccctcacgcccacagaggagaggcgcacctccttctccacgagcgacgtctccaagctcctcccgtccctggccaaggctcagcctgcagcagaaaccacggacggagagcgaagtgcgaaaaagccagctgtccagaagaagaagccaggcgacgcatcctccctcccagacgcagggctgtccccgggctctcaggtcgactctaaatccacgtttaagaggctttttctgcataaaaccaaggataaaaaatacagcctggagggcgcagaggagctggagaatgcagtgtccgggcacgtggtgctggaagccaccaccatgaagaagggcctggaagccccctccggacagcagcatcgccacgctgcaggtgagaagcgcaccaaggaaccaggaggcaaagggaagaagaaccgaaatgtcaagattgggaagatcacagtgtcagagaagtggcgggaatcggtgttccgccagatcaccaacgccaatgagctcaagtacctggacgagttcctgctcaacaagataaatgacctccgttcccagaagacgcccattgagagcttgtttatcgaagccaccgagaagttcaggagcaacatcaaaacgatgtactctgtcccgaacgggaagatccacgtgggctacaaggatctgatggagaactaccagatcgtcgtcagcaacctggccactgagcgtggccagaaggacaccaacctggtcctcaacctcttccagtcactgctagatgagttcacccgtggctacaccaagaacgacttcgagccagtgaagcagagcaaagctcagaagaagaagcggaagcaggagcgtgctgtccaggagcacaacgggcacgtgttcgccagctaccaggttagcatcccgcagtcgtgcgagcagtgcctctcctatatctggctcatggacaaggccctgctctgcagcgtgtgcaagatgacctgccacaagaagtgcgtgcacaagattcagagccactgctcctacacctacgggaggaagggcgagccaggcgctgagcctggccacttcggcgtgtgcgtagacagcctgaccagcgacaaggcctcggtgcccatcgtgctggagaagctcctggaacacgtggagatgcacggcctgtacaccgagggcctctaccgcaagtcgggtgctgccaaccgcactcgggagctccggcaggcgctgcagacagaccccgcagcagtcaagctggagaacttccccatccacgccatcacaggggtgctgaagcagtggctgcgggagctgcccgagcccctcatgaccttcgcacagtacggcgacttcctccgagccgtcgagctgccggagaagcaggagcagctggctgccatctatgccgtcctggagcaccttccagaagccaaccacaactccctggagagactcatcttccaccttgtcaaggtggccctgctcgaggatgtcaaccgcatgtcacctggggcgctggccattatcttcgcaccctgcctcctgcgctgccctgacaactcggacccgctgaccagcatgaaggacgtcctcaagatcaccacgtgcgtggagatgctgatcaaggagcagatgaggaaatacaaagtgaagatggaggagatcagccaactggaggctgcagagagtatcgccttccgcaggctttcgctcctgcgacaaaatgctccatggcctctcaaactggggttttcgtctccctatgagggggtcctgaacaagagccccaagacccgggacatccaggaggaggagctggaggtgctgctggaggaggaggcagccggcggcgatgaggaccgggaaaaggagattctcattgaacggatccagtccatcaaggaggagaaggaggacatcacctaccggctgccggagctggacccaaggggctcggacgaggagaacctggactcggagacgtcggccagcaccgagagcctgctggaggagcgggccgggcggggggcctcggaaggtcagtattaaggtagcgtctgcttttctccttcccgtccatcccagcaggccccagggcgagggtcctccggctgccggccctgaagctgcagtaaccctgccatctgtctctcaaaagggccccctgcgcctgctctcccttgccccggcgcgcccaccccgagccccctccccaccgtggccgcccctccacgacgaaggccgtcgtccttcgtaacggtcagagtgaagaccccccggcggacccccatcatgcccacggccaacatcaagctcccaccaggcctgccctcccacctgcctcgctgggcaccgggtgcccgggaggcggctgccccagtgcggcgccgggagccacctgcccgccgcccggaccagatacattccgtgtacatcacgcccggggcagacctgccagtgcagggcgccctggagcccctagaagaggatggccagccacctggggccaagcggaggtactcggatcccccaacgtactgcctgccccccgcctcgggccagaccaatggctgagagccacagctgacaaagtctgcatgtccgaggacggcccctgcactggagctgggcgccagagctgcagagctagtgttcggccctcagagaaggatccagaatcaaaagctcaagagtgacgtgaggtgggcaccggccccaagtgcagagtcaaggcagggagaggccggctggagccaggccccctcgcacgcagcccccaaatcatggacgcacctgtggggagcaccacatctccacctgcggcctcacatctccccactcccctttttgtacgtttaactgtttctttgtacgtggtttacgtaactttaaactgtaacagccttaatggaagaccaaatggttttttatatgtgtatgtacaaagttttctattaacgctgcccgtctcccttataacctggacgtgagctgtcagagcagaagccactaggccactgcgcgtctgaggctcagaccctgctgtggttggcttggggtggccaatgggctgggaccctccatgagagttttggacacttgggtcacctgacccgtgcctctctgacacatgtctccggggggcagccacctggccaatgtgcatttttgcacgtgctggaaccttccatgggggtctgggctattggctggagccaggacatgagtcaggggcaccatggacctcacgtgccagggagacttgaatgtggctgtcactcttccggacgccaagggctgcaggaggctgcttttggcactacccaccccgtgtgacagaataggagccagcgactcaggactgctcacgggtcaggagggcaacgcctgaagtcagacctccctataggtcaacagggacaacctggggatctctggagcagggccctcctctctcaggcttggcccactcccccagacacctggacacgtggccacaaatctgggacaaggggcccccgcacagcatgaaataaaaagtgcctgagaagtgtgtgcatgggacgcc

SEQ ID NO: 370081 - DNA, 7716 bp, Homo sapiens
cggggcggagcggctcgagcagcggcgggctggcaggcggtcgtccggccggggacccggcccgggaccggcggcgcgcggcggccgaggccagctccaggacacgcgcgccccgagcctgggaggcatgctgaagccaggcggccggcaggatgagtgtgaaagaggcaggcagctcgggccgccgggagcaggcggcctaccacctgcacatctacccccagctgtccaccaccgagagccaggcctcgtgccgcgtgactgccaccaaggacagcaccacctcggacgtcatcaaggacgccattgccagcctgcggctggacggcaccaaatgttatgtgctggtggaggtcaaagagtcgggaggcgaggaatgggtgctggacgccaacgactcgcctgtgcaccgggtgctgctatggccccggcgggcacaggacgagcaccctcaggaggatggctactacttcctgctgcaggagcgcaacgcagatggaaccatcaagtacgtgcatatgcagctggtggcgcaggccacagccacccggcgcctagtggagcgtggcctcctgccacggcagcaggcggactttgatgacctgtgtaacctccccgagctaaccgagggcaacctcctgaagaacctcaagcaccgcttcctgcaacaaaagatctacacgtacgcggggagcatcctggtggccatcaacccctttaagttcctgcccatctacaaccccaagtacgtgaagatgtatgagaaccagcagctgggcaagctggagccacacgtcttcgcgctggccgacgtggcctactacaccatgctcaggaagcgcgtgaaccagtgcatcgtgatctcgggtgagagcggctccggcaagacccagagcaccaacttcctcatccactgcctcaccgccctcagccagaagggctacgccagcggcgtcgagaggaccatcctgggtgctggccctgtgctggaggcttttggaaatgccaagacagcccacaacaacaactccagccggtttgggaaattcatccaagtcagctacctagagagtggcatcgtgagaggagctgtcgtcgagaaatatctgcttgaaaagtctcgcctggtgtctcaggagaaggatgagaggaactaccatgtgttttattatttgttacttggggtcagcgaggaagagcgccaagaatttcagctcaagcagcctgaagattatttctacctcaaccagcataacttgaagattgaagatggggaggacctgaagcatgactttgagaggctcaagcaggccatggagatggtgggcttcctccccgccaccaagaagcagatttttgccgtcctctcggccatcctgtacctgggcaacgtcacttataagaagagagctacaggccgagaggaagggttggaggtcgggccacccgaggtgctggacaccctgtcgcagcttctgaaggtgaagcgagaaatcttggtggaggttctgaccaaaagaaaaacggtgaccgtcaacgacaagcttatccttccctacagcctcagcgaggccatcactgcccgcgactccatggccaagtctctgtacagcgccctgttcgactggattgtgctgcggatcaaccacgcactcctcaacaagaaggacgtggaagaggcagtctcgtgcctgtccattggggtcctggacatcttcgggtttgaagacttcgagaggaacagctttgagcagttctgcatcaactacgccaatgagcagctgcagtattacttcaaccagcacatcttcaagctggagcaggaggaatatcagggcgaggggatcacgtggcacaacatcggctacacagacaatgtcggctgcatccatctcatcagcaagaaacccacgggcctcttctacctgctggacgaggagagcaacttcccccacgccacgagccagaccctgctggccaagttcaaacagcaacatgaggacaataagtacttcctgggcaccccggtcatggagccagctttcatcatccagcacttcgcagggaaggtgaaatatcagatcaaggacttccgggagaagaacatggactacatgcggccagacatcgtggccctgctgcggggcagtgacagctcctacgtgcgggagctcatcggcatggaccccgtggccgtgttccgctgggccgtgctccgggctgctatccgggccatggcagtgcttcgggaggccggacgcctgcgggccgagagggccgaaaaggctgcaggtatgagcagccctggtgcccaaagtcacccagaagagctgccaagaggagccagcaccccttcggaaaaactttaccgctgctcaatgctagatttctcatttgacggctctgaggagttcgatattaacgcttttgaggacatcattgctttctatgaaagcaagaagaaaagtaaaggtatcaaacaaaagcagatcattccaaagaacctactggactccaagtccctgaaactcatcatcagcatgactctgcacgaccgcaccaccaagtccctactgcacctgcacaagaagaaaaagccaccaagcatcagcgcccagttccagacatcccttaacaagctcttggaggcactggggaaggcggagcccttctttatccgctgcatccgttccaatgctgaaaagaaagagctgtgctttgacgacgagctggtcctgcagcagctgcgctacaccggcatgctggagaccgtgcgcatccggaggtcagggtacagcgccaagtacacgttccaggatttcaccgagcagttccaggtgctcctgcccaaggatgcccagccctgcagggaggtcatctccaccctcctggagaaaatgaagatagacaagaggaactaccagatcgggaagaccaaggtcttcctgaaggagacggagcggcaagccctgcaggagacgctgcaccgggaggtggtgcggaaaatcctgctgctgcagagctggttccggatggtgctggagcgtcggcacttcctgcagatgaagcgggccgccgtcaccatccaggcctgctggcggtcctaccgggtccggagggcgctggagaggacgcaggctgccgtgtacctccaggcctcatggaggggctactggcagcggaagctctaccggcaccagaaacagagcatcatccgcctgcagagcctgtgtcgggggcacctgcagcgcaagagcttcagccagatgatctcggagaagcagaaggcagaagagaaggagagggaagccctggaagccgcaagagcaggtgctgaggagggcggacagggtcaggcggctggagggcagcaggtagctgagcaggggccggagccagcggaggatggcgggcacctggcatcggagcctgaggtgcagccaagtgacaggtcccccctagagcactcctcacctgagaaggaggccccaagcccagagaagactctcccaccccagaaaaccgtggcggctgaaagtcacgagaaagtccccagcagccgggagaagcgtgagtcgcgtcggcaaagagggctggagcacgtcaagttccagaacaaacacatccagtcctgcaaggaggagagtgccctcagagaaccttccagaagggtcacccaggagcaaggggtgagtctcctggaagacaaaaaggagagcagagaagatgaaacccttctagtcgtagagacggaggctgagaacacatctcaaaagcagcccacagagcaaccccaggccatggcagttggcaaggtctctgaagaaactgagaagacgctgcccagtgggagccccaggcctggccagttggagcggccgaccagcctggccctggacagcagggtcagcccaccggcccctggcagcgcccccgagacccccgaggacaagagcaaaccatgtggcagcccaagggttcaggaaaagcccgacagccccggaggctccacgcagatccagcggtacctggacgccgagcggctggccagcgccgtggaactgtggcggggcaagaagctggtggccgccgccagccctagtgccatgctcagccagtccctggacctcagcgacagacaccgggccacaggggccgccctcacgcccacagaggagaggcgcacctccttctccacgagcgacgtctccaagctcctcccgtccctggccaaggctcagcctgcagcagaaaccacggacggagagcgaagtgcgaaaaagccagctgtccagaagaagaagccaggcgacgcatcctccctcccagacgcagggctgtccccgggctctcaggtcgactctaaatccacgtttaagaggctttttctgcataaaaccaaggataaaaaatacagcctggagggcgcagaggagctggagaatgcagtgtccgggcacgtggtgctggaagccaccaccatgaagaagggcctggaagccccctccggacagcagcatcgccacgctgcaggtgagaagcgcaccaaggaaccaggaggcaaagggaagaagaaccgaaatgtcaagattgggaagatcacagtgtcagagaagtggcgggaatcggtgttccgccagatcaccaacgccaatgagctcaagtacctggacgagttcctgctcaacaagataaatgacctccgttcccagaagacgcccattgagagcttgtttatcgaagccaccgagaagttcaggagcaacatcaaaacgatgtactctgtcccgaacgggaagatccacgtgggctacaaggatctgatggagaactaccagatcgtcgtcagcaacctggccactgagcgtggccagaaggacaccaacctggtcctcaacctcttccagtcactgctagatgagttcacccgtggctacaccaagaacgacttcgagccagtgaagcagagcaaagctcagaagaagaagcggaagcaggagcgtgctgtccaggagcacaacgggcacgtgttcgccagctaccaggttagcatcccgcagtcgtgcgagcagtgcctctcctatatctggctcatggacaaggccctgctctgcagcgtgtgcaagatgacctgccacaagaagtgcgtgcacaagattcagagccactgctcctacacctacgggaggaagggcgagccaggcgctgagcctggccacttcggcgtgtgcgtagacagcctgaccagcgacaaggcctcggtgcccatcgtgctggagaagctcctggaacacgtggagatgcacggcctgtacaccgagggcctctaccgcaagtcgggtgctgccaaccgcactcgggagctccggcaggcgctgcagacagaccccgcagcagtcaagctggagaacttccccatccacgccatcacaggggtgctgaagcagtggctgcgggagctgcccgagcccctcatgaccttcgcacagtacggcgacttcctccgagccgtcgagctgccggagaagcaggagcagctggctgccatctatgccgtcctggagcaccttccagaagccaaccacaactccctggagagactcatcttccaccttgtcaaggtggccctgctcgaggatgtcaaccgcatgtcacctggggcgctggccattatcttcgcaccctgcctcctgcgctgccctgacaactcggacccgctgaccagcatgaaggacgtcctcaagatcaccacgtgcgtggagatgctgatcaaggagcagatgaggaaatacaaagtgaagatggaggagatcagccaactggaggctgcagagagtatcgccttccgcaggctttcgctcctgcgacaaaatgctccatggcctctcaaactggggttttcgtctccctatgagggggtcctgaacaagagccccaagacccgggacatccaggaggaggagctggaggtgctgctggaggaggaggcagccggcggcgatgaggaccgggaaaaggagattctcattgaacggatccagtccatcaaggaggagaaggaggacatcacctaccggctgccggagctggacccaaggggctcggacgaggagaacctggactcggagacgtcggccagcaccgagagcctgctggaggagcgggccgggcggggggcctcggaaggtcagtattaaggtagcgtctgcttttctccttcccgtccatcccagcaggccccagggcgagggtcctccggctgccggccctgaagctgcagtaaccctgccatctgtctctcaaaagggccccctgcgcctgctctcccttgccccggcgcgcccaccccgagccccctccccaccgtggccgcccctccacgacgaaggccgtcgtccttcgtaacggtcagagtgaagaccccccggcggacccccatcatgcccacggccaacatcaagctcccaccaggcctgccctcccacctgcctcgctgggcaccgggtgcccgggaggcggctgccccagtgcggcgccgggagccacctgcccgccgcccggaccagatacattccgtgtacatcacgcccggggcagacctgccagtgcagggcgccctggagcccctagaagaggatggccagccacctggggccaagcggaggtactcggatcccccaacgtactgcctgccccccgcctcgggccagaccaatggctgagagccacagctgacaaagtctgcatgtccgaggacggcccctgcactggagctgggcgccagagctgcagagctagtgttcggccctcagagaaggatccagaatcaaaagctcaagagtgacgtgaggtgggcaccggccccaagtgcagagtcaaggcagggagaggccggctggagccaggccccctcgcacgcagcccccaaatcatggacgcacctgtggggagcaccacatctccacctgcggcctcacatctccccactcccctttttgtacgtttaactgtttctttgtacgtggtttacgtaactttaaactgtaacagccttaatggaagaccaaatggttttttatatgtgtatgtacaaagttttctattaacgctgcccgtctcccttataacctggacgtgagctgtcagagcagaagccactaggccactgcgcgtctgaggctcagaccctgctgtggttggcttggggtggccaatgggctgggaccctccatgagagttttggacacttgggtcacctgacccgtgcctctctgacacatgtctccggggggcagccacctggccaatgtgcatttttgcacgtgctggaaccttccatgggggtctgggctattggctggagccaggacatgagtcaggggcaccatggacctcacgtgccagggagacttgaatgtggctgtcactcttccggacgccaagggctgcaggaggctgcttttggcactacccaccccgtgtgacagaataggagccagcgactcaggactgctcacgggtcaggagggcaacgcctgaagtcagacctccctataggtcaacagggacaacctggggatctctggagcagggccctcctctctcaggcttggcccactcccccagacacctggacacgtggccacaaatctgggacaaggggcccccgcacagcatgaaataaaaagtgcctgagaagtgtgtgcatgggacgcc

SEQ ID NO: 370082 - DNA, 8013 bp, Homo sapiens
cggggcggagcggctcgagcagcggcgggctggcaggcggtcgtccggccggggacccggcccgggaccggcggcgcgcggcggccgaggccagctccaggacacgcgcgccccgagcctgggaggcatgctgaagccaggcggccggcaggatgagtgtgaaagaggcaggcagctcgggccgccgggagcaggcggcctaccacctgcacatctacccccagctgtccaccaccgagagccaggcctcgtgccgcgtgactgccaccaaggacagcaccacctcggacgtcatcaaggacgccattgccagcctgcggctggacggcaccaaatgttatgtgctggtggaggtcaaagagtcgggaggcgaggaatgggtgctggacgccaacgactcgcctgtgcaccgggtgctgctatggccccggcgggcacaggacgagcaccctcaggaggatggctactacttcctgctgcaggagcgcaacgcagatggaaccatcaagtacgtgcatatgcagctggtggcgcaggccacagccacccggcgcctagtggagcgtggcctcctgccacggcagcaggcggactttgatgacctgtgtaacctccccgagctaaccgagggcaacctcctgaagaacctcaagcaccgcttcctgcaacaaaagatctacacgtacgcggggagcatcctggtggccatcaacccctttaagttcctgcccatctacaaccccaagtacgtgaagatgtatgagaaccagcagctgggcaagctggagccacacgtcttcgcgctggccgacgtggcctactacaccatgctcaggaagcgcgtgaaccagtgcatcgtgatctcgggtgagagcggctccggcaagacccagagcaccaacttcctcatccactgcctcaccgccctcagccagaagggctacgccagcggcgtcgagaggaccatcctgggtgctggccctgtgctggaggcttttggaaatgccaagacagcccacaacaacaactccagccggtttgggaaattcatccaagtcagctacctagagagtggcatcgtgagaggagctgtcgtcgagaaatatctgcttgaaaagtctcgcctggtgtctcaggagaaggatgagaggaactaccatgtgttttattatttgttacttggggtcagcgaggaagagcgccaagaatttcagctcaagcagcctgaagattatttctacctcaaccagcataacttgaagattgaagatggggaggacctgaagcatgactttgagaggctcaagcaggccatggagatggtgggcttcctccccgccaccaagaagcagatttttgccgtcctctcggccatcctgtacctgggcaacgtcacttataagaagagagctacaggccgagaggaagggttggaggtcgggccacccgaggtgctggacaccctgtcgcagcttctgaaggtgaagcgagaaatcttggtggaggttctgaccaaaagaaaaacggtgaccgtcaacgacaagcttatccttccctacagcctcagcgaggccatcactgcccgcgactccatggccaagtctctgtacagcgccctgttcgactggattgtgctgcggatcaaccacgcactcctcaacaagaaggacgtggaagaggcagtctcgtgcctgtccattggggtcctggacatcttcgggtttgaagacttcgagaggaacagctttgagcagttctgcatcaactacgccaatgagcagctgcagtattacttcaaccagcacatcttcaagctggagcaggaggaatatcagggcgaggggatcacgtggcacaacatcggctacacagacaatgtcggctgcatccatctcatcagcaagaaacccacgggcctcttctacctgctggacgaggagagcaacttcccccacgccacgagccagaccctgctggccaagttcaaacagcaacatgaggacaataagtacttcctgggcaccccggtcatggagccagctttcatcatccagcacttcgcagggaaggtgaaatatcagatcaaggacttccgggagaagaacatggactacatgcggccagacatcgtggccctgctgcggggcagtgacagctcctacgtgcgggagctcatcggcatggaccccgtggccgtgttccgctgggccgtgctccgggctgctatccgggccatggcagtgcttcgggaggccggacgcctgcgggccgagagggccgaaaaggctgcaggtatgagcagccctggtgcccaaagtcacccagaagagctgccaagaggagccagcaccccttcggaaaaactttaccgctgctcaatgctagatttctcatttgacggctctgaggagttcgatattaacgcttttgaggacatcattgctttctatgaaagcaagaagtaagtgcagaaagggcctttgatcccgaggccacattgagcacagtgtctttcccccagctgcatgttttggcttcagtggcctggggatggtcccaatggcgctgggaaccccgaggtggcaggcctgcttctaactccatcttctttctgtcactgcgccccctccacccctcccctcagcgatttgcataaccaaatgatcaagagcatcaaaggattgccctggcagggcgaggacccccgtagccttctccagtccctcagtcggctccagaaaccccgcgccttcatcctgaaaagtaaaggtatcaaacaaaagcagatcattccaaagaacctactggactccaagtccctgaaactcatcatcagcatgactctgcacgaccgcaccaccaagtccctactgcacctgcacaagaagaaaaagccaccaagcatcagcgcccagttccagacatcccttaacaagctcttggaggcactggggaaggcggagcccttctttatccgctgcatccgttccaatgctgaaaagaaagagctgtgctttgacgacgagctggtcctgcagcagctgcgctacaccggcatgctggagaccgtgcgcatccggaggtcagggtacagcgccaagtacacgttccaggatttcaccgagcagttccaggtgctcctgcccaaggatgcccagccctgcagggaggtcatctccaccctcctggagaaaatgaagatagacaagaggaactaccagatcgggaagaccaaggtcttcctgaaggagacggagcggcaagccctgcaggagacgctgcaccgggaggtggtgcggaaaatcctgctgctgcagagctggttccggatggtgctggagcgtcggcacttcctgcagatgaagcgggccgccgtcaccatccaggcctgctggcggtcctaccgggtccggagggcgctggagaggacgcaggctgccgtgtacctccaggcctcatggaggggctactggcagcggaagctctaccggcaccagaaacagagcatcatccgcctgcagagcctgtgtcgggggcacctgcagcgcaagagcttcagccagatgatctcggagaagcagaaggcagaagagaaggagagggaagccctggaagccgcaagagcaggtgctgaggagggcggacagggtcaggcggctggagggcagcaggtagctgagcaggggccggagccagcggaggatggcgggcacctggcatcggagcctgaggtgcagccaagtgacaggtcccccctagagcactcctcacctgagaaggaggccccaagcccagagaagactctcccaccccagaaaaccgtggcggctgaaagtcacgagaaagtccccagcagccgggagaagcgtgagtcgcgtcggcaaagagggctggagcacgtcaagttccagaacaaacacatccagtcctgcaaggaggagagtgccctcagagaaccttccagaagggtcacccaggagcaaggggtgagtctcctggaagacaaaaaggagagcagagaagatgaaacccttctagtcgtagagacggaggctgagaacacatctcaaaagcagcccacagagcaaccccaggccatggcagttggcaaggtctctgaagaaactgagaagacgctgcccagtgggagccccaggcctggccagttggagcggccgaccagcctggccctggacagcagggtcagcccaccggcccctggcagcgcccccgagacccccgaggacaagagcaaaccatgtggcagcccaagggttcaggaaaagcccgacagccccggaggctccacgcagatccagcggtacctggacgccgagcggctggccagcgccgtggaactgtggcggggcaagaagctggtggccgccgccagccctagtgccatgctcagccagtccctggacctcagcgacagacaccgggccacaggggccgccctcacgcccacagaggagaggcgcacctccttctccacgagcgacgtctccaagctcctcccgtccctggccaaggctcagcctgcagcagaaaccacggacggagagcgaagtgcgaaaaagccagctgtccagaagaagaagccaggcgacgcatcctccctcccagacgcagggctgtccccgggctctcaggtcgactctaaatccacgtttaagaggctttttctgcataaaaccaaggataaaaaatacagcctggagggcgcagaggagctggagaatgcagtgtccgggcacgtggtgctggaagccaccaccatgaagaagggcctggaagccccctccggacagcagcatcgccacgctgcaggtgagaagcgcaccaaggaaccaggaggcaaagggaagaagaaccgaaatgtcaagattgggaagatcacagtgtcagagaagtggcgggaatcggtgttccgccagatcaccaacgccaatgagctcaagtacctggacgagttcctgctcaacaagataaatgacctccgttcccagaagacgcccattgagagcttgtttatcgaagccaccgagaagttcaggagcaacatcaaaacgatgtactctgtcccgaacgggaagatccacgtgggctacaaggatctgatggagaactaccagatcgtcgtcagcaacctggccactgagcgtggccagaaggacaccaacctggtcctcaacctcttccagtcactgctagatgagttcacccgtggctacaccaagaacgacttcgagccagtgaagcagagcaaagctcagaagaagaagcggaagcaggagcgtgctgtccaggagcacaacgggcacgtgttcgccagctaccaggttagcatcccgcagtcgtgcgagcagtgcctctcctatatctggctcatggacaaggccctgctctgcagcgtgtgcaagatgacctgccacaagaagtgcgtgcacaagattcagagccactgctcctacacctacgggaggaagggcgagccaggcgctgagcctggccacttcggcgtgtgcgtagacagcctgaccagcgacaaggcctcggtgcccatcgtgctggagaagctcctggaacacgtggagatgcacggcctgtacaccgagggcctctaccgcaagtcgggtgctgccaaccgcactcgggagctccggcaggcgctgcagacagaccccgcagcagtcaagctggagaacttccccatccacgccatcacaggggtgctgaagcagtggctgcgggagctgcccgagcccctcatgaccttcgcacagtacggcgacttcctccgagccgtcgagctgccggagaagcaggagcagctggctgccatctatgccgtcctggagcaccttccagaagccaaccacaactccctggagagactcatcttccaccttgtcaaggtggccctgctcgaggatgtcaaccgcatgtcacctggggcgctggccattatcttcgcaccctgcctcctgcgctgccctgacaactcggacccgctgaccagcatgaaggacgtcctcaagatcaccacgtgcgtggagatgctgatcaaggagcagatgaggaaatacaaagtgaagatggaggagatcagccaactggaggctgcagagagtatcgccttccgcaggctttcgctcctgcgacaaaatgctccatggcctctcaaactggggttttcgtctccctatgagggggtcctgaacaagagccccaagacccgggacatccaggaggaggagctggaggtgctgctggaggaggaggcagccggcggcgatgaggaccgggaaaaggagattctcattgaacggatccagtccatcaaggaggagaaggaggacatcacctaccggctgccggagctggacccaaggggctcggacgaggagaacctggactcggagacgtcggccagcaccgagagcctgctggaggagcgggccgggcggggggcctcggaaggtcagtattaaggtagcgtctgcttttctccttcccgtccatcccagcaggccccagggcgagggtcctccggctgccggccctgaagctgcagtaaccctgccatctgtctctcaaaagggccccctgcgcctgctctcccttgccccggcgcgcccaccccgagccccctccccaccgtggccgcccctccacgacgaaggccgtcgtccttcgtaacggtcagagtgaagaccccccggcggacccccatcatgcccacggccaacatcaagctcccaccaggcctgccctcccacctgcctcgctgggcaccgggtgcccgggaggcggctgccccagtgcggcgccgggagccacctgcccgccgcccggaccagatacattccgtgtacatcacgcccggggcagacctgccagtgcagggcgccctggagcccctagaagaggatggccagccacctggggccaagcggaggtactcggatcccccaacgtactgcctgccccccgcctcgggccagaccaatggctgagagccacagctgacaaagtctgcatgtccgaggacggcccctgcactggagctgggcgccagagctgcagagctagtgttcggccctcagagaaggatccagaatcaaaagctcaagagtgacgtgaggtgggcaccggccccaagtgcagagtcaaggcagggagaggccggctggagccaggccccctcgcacgcagcccccaaatcatggacgcacctgtggggagcaccacatctccacctgcggcctcacatctccccactcccctttttgtacgtttaactgtttctttgtacgtggtttacgtaactttaaactgtaacagccttaatggaagaccaaatggttttttatatgtgtatgtacaaagttttctattaacgctgcccgtctcccttataacctggacgtgagctgtcagagcagaagccactaggccactgcgcgtctgaggctcagaccctgctgtggttggcttggggtggccaatgggctgggaccctccatgagagttttggacacttgggtcacctgacccgtgcctctctgacacatgtctccggggggcagccacctggccaatgtgcatttttgcacgtgctggaaccttccatgggggtctgggctattggctggagccaggacatgagtcaggggcaccatggacctcacgtgccagggagacttgaatgtggctgtcactcttccggacgccaagggctgcaggaggctgcttttggcactacccaccccgtgtgacagaataggagccagcgactcaggactgctcacgggtcaggagggcaacgcctgaagtcagacctccctataggtcaacagggacaacctggggatctctggagcagggccctcctctctcaggcttggcccactcccccagacacctggacacgtggccacaaatctgggacaaggggcccccgcacagcatgaaataaaaagtgcctgagaagtgtgtgcatgggacgcc

SEQ ID NO: 370083 - DNA, 8003 bp, Homo sapiens
cggggcggagcggctcgagcagcggcgggctggcaggcggtcgtccggccggggacccggcccgggaccggcggcgcgcggcggccgaggccagctccaggacacgcgcgccccgagcctgggaggcatgctgaagccaggcggccggcaggatgagtgtgaaagaggcaggcagctcgggccgccgggagcaggcggcctaccacctgcacatctacccccagctgtccaccaccgagagccaggcctcgtgccgcgtgactgccaccaaggacagcaccacctcggacgtcatcaaggacgccattgccagcctgcggctggacggcaccaaatgttatgtgctggtggaggtcaaagagtcgggaggcgaggaatgggtgctggacgccaacgactcgcctgtgcaccgggtgctgctatggccccggcgggcacaggacgagcaccctcaggaggatggctactacttcctgctgcaggagcgcaacgcagatggaaccatcaagtacgtgcatatgcagctggtggcgcaggccacagccacccggcgcctagtggagcgtggcctcctgccacggcagcaggcggactttgatgacctgtgtaacctccccgagctaaccgagggcaacctcctgaagaacctcaagcaccgcttcctgcaacaaaagatctacacgtacgcggggagcatcctggtggccatcaacccctttaagttcctgcccatctacaaccccaagtacgtgaagatgtatgagaaccagcagctgggcaagctggagccacacgtcttcgcgctggccgacgtggcctactacaccatgctcaggaagcgcgtgaaccagtgcatcgtgatctcgggtgagagcggctccggcaagacccagagcaccaacttcctcatccactgcctcaccgccctcagccagaagggctacgccagcggcgtcgagaggaccatcctgggtgctggccctgtgctggaggcttttggaaatgccaagacagcccacaacaacaactccagccggtttgggaaattcatccaagtcagctacctagagagtggcatcgtgagaggagctgtcgtcgagaaatatctgcttgaaaagtctcgcctggtgtctcaggagaaggatgagaggaactaccatgtgttttattatttgttacttggggtcagcgaggaagagcgccaagaatttcagctcaagcagcctgaagattatttctacctcaaccagcataacttgaagattgaagatggggaggacctgaagcatgactttgagaggctcaagcaggccatggagatggtgggcttcctccccgccaccaagaagcagatttttgccgtcctctcggccatcctgtacctgggcaacgtcacttataagaagagagctacaggccgagaggaagggttggaggtcgggccacccgaggtgctggacaccctgtcgcagcttctgaaggtgaagcgagaaatcttggtggaggttctgaccaaaagaaaaacggtgaccgtcaacgacaagcttatccttccctacagcctcagcgaggccatcactgcccgcgactccatggccaagtctctgtacagcgccctgttcgactggattgtgctgcggatcaaccacgcactcctcaacaagaaggacgtggaagaggcagtctcgtgcctgtccattggggtcctggacatcttcgggtttgaagacttcgagaggaacagctttgagcagttctgcatcaactacgccaatgagcagctgcagtattacttcaaccagcacatcttcaagctggagcaggaggaatatcagggcgaggggatcacgtggcacaacatcggctacacagacaatgtcggctgcatccatctcatcagcaagaaacccacgggcctcttctacctgctggacgaggagagcaacttcccccacgccacgagccagaccctgctggccaagttcaaacagcaacatgaggacaataagtacttcctgggcaccccggtcatggagccagctttcatcatccagcacttcgcagggaaggtgaaatatcagatcaaggacttccgggagaagaacatggactacatgcggccagacatcgtggccctgctgcggggcagtgacagctcctacgtgcgggagctcatcggcatggaccccgtggccgtgttccgctgggccgtgctccgggctgctatccgggccatggcagtgcttcgggaggccggacgcctgcgggccgagagggccgaaaaggctgcaggtatgagcagccctggtgcccaaagtcacccagaagagctgccaagaggagccagcaccccttcggaaaaactttaccgcgatttgcataaccaaatgatcaagagcatcaaaggattgccctggcagggcgaggacccccgtagccttctccagtccctcagtcggctccagaaaccccgcgccttcatcctgaaaagtaaaggtatcaaacaaaagcagatcattccaaagaacctactggactccaagtccctgaaactcatcatcagcatgactctgcacgaccgcaccaccaagtccctactgcacctgcacaagaagaaaaagccaccaagcatcagcgcccagttccagacatcccttaacaagctcttggaggcactggggaaggcggagcccttctttatccgctgcatccgttccaatgctgaaaagaaagagctgtgctttgacgacgagctggtcctgcagcagctgcgctacaccggcatgctggagaccgtgcgcatccggaggtcagggtacagcgccaagtacacgttccaggatttcaccgagcagttccaggtgctcctgcccaaggatgcccagccctgcagggaggtcatctccaccctcctggagaaaatgaagatagacaagaggaactaccagatcgggaagaccaaggtcttcctgaaggagacggagcggcaagccctgcaggagacgctgcaccgggaggtggtgcggaaaatcctgctgctgcagagctggttccggatggtgctggagcgtcggcacttcctgcagatgaagcgggccgccgtcaccatccaggcctgctggcggtcctaccgggtccggagggcgctggagaggacgcaggctgccgtgtacctccaggcctcatggaggggctactggcagcggaagctctaccggcaccagaaacagagcatcatccgcctgcagagcctgtgtcgggggcacctgcagcgcaagagcttcagccagatgatctcggagaagcagaaggcagaagagaaggagagggaagccctggaagccgcaagagcaggtgctgaggagggcggacagggtcaggcggctggagggcagcaggtagctgagcaggggccggagccagcggaggatggcgggcacctggcatcggagcctgaggtgcagccaagtgacaggtcccccctagagcactcctcacctgagaaggaggccccaagcccagagaagactctcccaccccagaaaaccgtggcggctgaaagtcacgagaaagtccccagcagccgggagaagcgtgagtcgcgtcggcaaagagggctggagcacgtcaagttccagaacaaacacatccagtcctgcaaggaggagagtgccctcagagaaccttccagaagggtcacccaggagcaaggggtgagtctcctggaagacaaaaaggagagcagagaagatgaaacccttctagtcgtagagacggaggctgagaacacatctcaaaagcagcccacagagcaaccccaggccatggcagttggcaaggtctctgaagaaactgagaagacgctgcccagtgggagccccaggcctggccagttggagcggccgaccagcctggccctggacagcagggtcagcccaccggcccctggcagcgcccccgagacccccgaggacaagagcaaaccatgtggcagcccaagggttcaggaaaagcccgacagccccggaggctccacgcagatccagcggtacctggacgccgagcggctggccagcgccgtggaactgtggcggggcaagaagctggtggccgccgccagccctagtgccatgctcagccagtccctggacctcagcgacagacaccgggccacaggggccgccctcacgcccacagaggagaggcgcacctccttctccacgagcgacgtctccaagctcctcccgtccctggccaaggctcagcctgcagcagaaaccacggacggagagcgaagtgcgaaaaagccagctgtccagaagaagaagccaggcgacgcatcctccctcccagacgcagggctgtccccgggctctcaggtcgactctaaatccacgtttaagaggctttttctgcataaaaccaaggataaaaaatacagcctggagggcgcagaggagctggagaatgcagtgtccgggcacgtggtgctggaagccaccaccatgaagaagggcctggaagccccctccggacagcagcatcgccacgctgcaggtgagaagcgcaccaaggaaccaggaggcaaagggaagaagaaccgaaatgtcaagattgggaagatcacagtgtcagagaagtggcgggaatcggtgttccgccagatcaccaacgccaatgagctcaagtacctggacgagttcctgctcaacaagataaatgacctccgttcccagaagacgcccattgagagcttgtttatcgaagccaccgagaagttcaggagcaacatcaaaacgatgtactctgtcccgaacgggaagatccacgtgggctacaaggatctgatggagaactaccagatcgtcgtcagcaacctggccactgagcgtggccagaaggacaccaacctggtcctcaacctcttccagtcactgctagatgagttcacccgtggctacaccaagaacgacttcgagccagtgaagcagagcaaagctcagaagaagaagcggaagcaggagcgtgctgtgagtaggctgcacatagatgagagtccgagcaggcgaacattggcaggagcatgcacgtgtgtgtcagtgtcaatgtgcgcatgggcccgtctgcacgcgtatgtgtgcgtggacacgtgtgagtgtgtttttcccccggcatatacggagccgtagtcttgaataagtcacccctgagatcccatgggtcgtcatccaccagtggctggggagggctgccttcccctttccctgcccagcgccttcctctggcctcacaggtccaggagcacaacgggcacgtgttcgccagctaccaggttagcatcccgcagtcgtgcgagcagtgcctctcctatatctggctcatggacaaggccctgctctgcagcgtgtgcaagatgacctgccacaagaagtgcgtgcacaagattcagagccactgctcctacacctacgggaggaagggcgagccaggcgctgagcctggccacttcggcgtgtgcgtagacagcctgaccagcgacaaggcctcggtgcccatcgtgctggagaagctcctggaacacgtggagatgcacggcctgtacaccgagggcctctaccgcaagtcgggtgctgccaaccgcactcgggagctccggcaggcgctgcagacagaccccgcagcagtcaagctggagaacttccccatccacgccatcacaggggtgctgaagcagtggctgcgggagctgcccgagcccctcatgaccttcgcacagtacggcgacttcctccgagccgtcgagctgccggagaagcaggagcagctggctgccatctatgccgtcctggagcaccttccagaagccaaccacaactccctggagagactcatcttccaccttgtcaaggtggccctgctcgaggatgtcaaccgcatgtcacctggggcgctggccattatcttcgcaccctgcctcctgcgctgccctgacaactcggacccgctgaccagcatgaaggacgtcctcaagatcaccacgtgcgtggagatgctgatcaaggagcagatgaggaaatacaaagtgaagatggaggagatcagccaactggaggctgcagagagtatcgccttccgcaggctttcgctcctgcgacaaaatgctccatggcctctcaaactggggttttcgtctccctatgagggggtcctgaacaagagccccaagacccgggacatccaggaggaggagctggaggtgctgctggaggaggaggcagccggcggcgatgaggaccgggaaaaggagattctcattgaacggatccagtccatcaaggaggagaaggaggacatcacctaccggctgccggagctggacccaaggggctcggacgaggagaacctggactcggagacgtcggccagcaccgagagcctgctggaggagcgggccgggcggggggcctcggaaggtcagtattaaggtagcgtctgcttttctccttcccgtccatcccagcaggccccagggcgagggtcctccggctgccggccctgaagctgcagtaaccctgccatctgtctctcaaaagggccccctgcgcctgctctcccttgccccggcgcgcccaccccgagccccctccccaccgtggccgcccctccacgacgaaggccgtcgtccttcgtaacggtcagagtgaagaccccccggcggacccccatcatgcccacggccaacatcaagctcccaccaggcctgccctcccacctgcctcgctgggcaccgggtgcccgggaggcggctgccccagtgcggcgccgggagccacctgcccgccgcccggaccagatacattccgtgtacatcacgcccggggcagacctgccagtgcagggcgccctggagcccctagaagaggatggccagccacctggggccaagcggaggtactcggatcccccaacgtactgcctgccccccgcctcgggccagaccaatggctgagagccacagctgacaaagtctgcatgtccgaggacggcccctgcactggagctgggcgccagagctgcagagctagtgttcggccctcagagaaggatccagaatcaaaagctcaagagtgacgtgaggtgggcaccggccccaagtgcagagtcaaggcagggagaggccggctggagccaggccccctcgcacgcagcccccaaatcatggacgcacctgtggggagcaccacatctccacctgcggcctcacatctccccactcccctttttgtacgtttaactgtttctttgtacgtggtttacgtaactttaaactgtaacagccttaatggaagaccaaatggttttttatatgtgtatgtacaaagttttctattaacgctgcccgtctcccttataacctggacgtgagctgtcagagcagaagccactaggccactgcgcgtctgaggctcagaccctgctgtggttggcttggggtggccaatgggctgggaccctccatgagagttttggacacttgggtcacctgacccgtgcctctctgacacatgtctccggggggcagccacctggccaatgtgcatttttgcacgtgctggaaccttccatgggggtctgggctattggctggagccaggacatgagtcaggggcaccatggacctcacgtgccagggagacttgaatgtggctgtcactcttccggacgccaagggctgcaggaggctgcttttggcactacccaccccgtgtgacagaataggagccagcgactcaggactgctcacgggtcaggagggcaacgcctgaagtcagacctccctataggtcaacagggacaacctggggatctctggagcagggccctcctctctcaggcttggcccactcccccagacacctggacacgtggccacaaatctgggacaaggggcccccgcacagcatgaaataaaaagtgcctgagaagtgtgtgcatgggacgcc

SEQ ID NO: 370084 - DNA, 6150 bp, Homo sapiens
tggaggcctgagctgactttaagggtcaacagccatggaaatgtgggcttctcccgccccaagaagcagattttgccgtcctctcgccatcctgaacctgcctgtccattggggtcctggacatcttcgggtttgaagacttcgagaggaacagctttgagcagttctgcatcaactacgccaatgagcagctgcagtattacttcaaccagcacatcttcaagctggagcaggaggaatatcagggcgaggggatcacgtggcacaacatcggctacacagacaatgtcggctgcatccatctcatcagcaagaaacccacgggcctcttctacctgctggacgaggagagcaacttcccccacgccacgagccagaccctgctggccaagttcaaacagcaacatgaggacaataagtacttcctgggcaccccggtcatggagccagctttcatcatccagcacttcgcagggaaggtgaaatatcagatcaaggacttccgggagaagaacatggactacatgcggccagacatcgtggccctgctgcggggcagtgacagctcctacgtgcgggagctcatcggcatggaccccgtggccgtgttccgctgggccgtgctccgggctgctatccgggccatggcagtgcttcgggaggccggacgcctgcgggccgagagggccgaaaaggctgcaggtatgagcagccctggtgcccaaagtcacccagaagagctgccaagaggagccagcaccccttcggaaaaactttaccgcgatttgcataaccaaatgatcaagagcatcaaaggattgccctggcagggcgaggacccccgtagccttctccagtccctcagtcggctccagaaaccccgcgccttcatcctgaaaagtaaaggtatcaaacaaaagcagatcattccaaagaacctactggactccaagtccctgaaactcatcatcagcatgactctgcacgaccgcaccaccaagtccctactgcacctgcacaagaagaaaaagccaccaagcatcagcgcccagttccagacatcccttaacaagctcttggaggcactggggaaggcggagcccttctttatccgctgcatccgttccaatgctgaaaagaaagagctgtgctttgacgacgagctggtcctgcagcagctgcgctacaccggcatgctggagaccgtgcgcatccggaggtcagggtacagcgccaagtacacgttccaggatttcaccgagcagttccaggtgctcctgcccaaggatgcccagccctgcagggaggtcatctccaccctcctggagaaaatgaagatagacaagaggaactaccagatcgggaagaccaaggtcttcctgaaggagacggagcggcaagccctgcaggagacgctgcaccgggaggtggtgcggaaaatcctgctgctgcagagctggttccggatggtgctggagcgtcggcacttcctgcagatgaagcgggccgccgtcaccatccaggcctgctggcggtcctaccgggtccggagggcgctggagaggacgcaggctgccgtgtacctccaggcctcatggaggggctactggcagcggaagctctaccggcaccagaaacagagcatcatccgcctgcagagcctgtgtcgggggcacctgcagcgcaagagcttcagccagatgatctcggagaagcagaaggcagaagagaaggagagggaagccctggaagccgcaagagcaggtgctgaggagggcggacagggtcaggcggctggagggcagcaggtagctgagcaggggccggagccagcggaggatggcgggcacctggcatcggagcctgaggtgcagccaagtgacaggtcccccctagagcactcctcacctgagaaggaggccccaagcccagagaagactctcccaccccagaaaaccgtggcggctgaaagtcacgagaaagtccccagcagccgggagaagcgtgagtcgcgtcggcaaagagggctggagcacgtcaagttccagaacaaacacatccagtcctgcaaggaggagagtgccctcagagaaccttccagaagggtcacccaggagcaaggggtgagtctcctggaagacaaaaaggagagcagagaagatgaaacccttctagtcgtagagacggaggctgagaacacatctcaaaagcagcccacagagcaaccccaggccatggcagttggcaaggtctctgaagaaactgagaagacgctgcccagtgggagccccaggcctggccagttggagcggccgaccagcctggccctggacagcagggtcagcccaccggcccctggcagcgcccccgagacccccgaggacaagagcaaaccatgtggcagcccaagggttcaggaaaagcccgacagccccggaggctccacgcagatccagcggtacctggacgccgagcggctggccagcgccgtggaactgtggcggggcaagaagctggtggccgccgccagccctagtgccatgctcagccagtccctggacctcagcgacagacaccgggccacaggggccgccctcacgcccacagaggagaggcgcacctccttctccacgagcgacgtctccaagctcctcccgtccctggccaaggctcagcctgcagcagaaaccacggacggagagcgaagtgcgaaaaagccagctgtccagaagaagaagccaggcgacgcatcctccctcccagacgcagggctgtccccgggctctcaggtcgactctaaatccacgtttaagaggctttttctgcataaaaccaaggataaaaaatacagcctggagggcgcagaggagctggagaatgcagtgtccgggcacgtggtgctggaagccaccaccatgaagaagggcctggaagccccctccggacagcagcatcgccacgctgcaggtgagaagcgcaccaaggaaccaggaggcaaagggaagaagaaccgaaatgtcaagattgggaagatcacagtgtcagagaagtggcgggaatcggtgttccgccagatcaccaacgccaatgagctcaagtacctggacgagttcctgctcaacaagataaatgacctccgttcccagaagacgcccattgagagcttgtttatcgaagccaccgagaagttcaggagcaacatcaaaacgatgtactctgtcccgaacgggaagatccacgtgggctacaaggatctgatggagaactaccagatcgtcgtcagcaacctggccactgagcgtggccagaaggacaccaacctggtcctcaacctcttccagtcactgctagatgagttcacccgtggctacaccaagaacgacttcgagccagtgaagcagagcaaagctcagaagaagaagcggaagcaggagcgtgctgtccaggagcacaacgggcacgtgttcgccagctaccaggttagcatcccgcagtcgtgcgagcagtgcctctcctatatctggctcatggacaaggccctgctctgcagcgtgtgcaagatgacctgccacaagaagtgcgtgcacaagattcagagccactgctcctacacctacgggaggaagggcgagccaggcgctgagcctggccacttcggcgtgtgcgtagacagcctgaccagcgacaaggcctcggtgcccatcgtgctggagaagctcctggaacacgtggagatgcacggcctgtacaccgagggcctctaccgcaagtcgggtgctgccaaccgcactcgggagctccggcaggcgctgcagacagaccccgcagcagtcaagctggagaacttccccatccacgccatcacaggggtgctgaagcagtggctgcgggagctgcccgagcccctcatgaccttcgcacagtacggcgacttcctccgagccgtcgagctgccggagaagcaggagcagctggctgccatctatgccgtcctggagcaccttccagaagccaaccacaactccctggagagactcatcttccaccttgtcaaggtggccctgctcgaggatgtcaaccgcatgtcacctggggcgctggccattatcttcgcaccctgcctcctgcgctgccctgacaactcggacccgctgaccagcatgaaggacgtcctcaagatcaccacgtgcgtggagatgctgatcaaggagcagatgaggaaatacaaagtgaagatggaggagatcagccaactggaggctgcagagagtatcgccttccgcaggctttcgctcctgcgacaaaatgctccatggcctctcaaactggggttttcgtctccctatgagggggtcctgaacaagagccccaagacccgggacatccaggaggaggagctggaggtgctgctggaggaggaggcagccggcggcgatgaggaccgggaaaaggagattctcattgaacggatccagtccatcaaggaggagaaggaggacatcacctaccggctgccggagctggacccaaggggctcggacgaggagaacctggactcggagacgtcggccagcaccgagagcctgctggaggagcgggccgggcggggggcctcggaaggtcagtattaaggtagcgtctgcttttctccttcccgtccatcccagcaggccccagggcgagggtcctccggctgccggccctgaagctgcagtaaccctgccatctgtctctcaaaagggccccctgcgcctgctctcccttgccccggcgcgcccaccccgagccccctccccaccgtggccgcccctccacgacgaaggccgtcgtccttcgtaacggtcagagtgaagaccccccggcggacccccatcatgcccacggccaacatcaagctcccaccaggcctgccctcccacctgcctcgctgggcaccgggtgcccgggaggcggctgccccagtgcggcgccgggagccacctgcccgccgcccggaccagatacattccgtgtacatcacgcccggggcagacctgccagtgcagggcgccctggagcccctagaagaggatggccagccacctggggccaagcggaggtactcggatcccccaacgtactgcctgccccccgcctcgggccagaccaatggctgagagccacagctgacaaagtctgcatgtccgaggacggcccctgcactggagctgggcgccagagctgcagagctagtgttcggccctcagagaaggatccagaatcaaaagctcaagagtgacgtgaggtgggcaccggccccaagtgcagagtcaaggcagggagaggccggctggagccaggccccctcgcacgcagcccccaaatcatggacgcacctgtggggagcaccacatctccacctgcggcctcacatctccccactcccctttttgtacgtttaactgtttctttgtacgtggtttacgtaactttaaactgtaacagccttaatggaagaccaaatggttttttatatgtgtatgtacaaagttttctattaacgctgcccgtctcccttataacctggacgtgagctgtcagagcagaagccactaggccactgcgcgtctgaggctcagaccctgctgtggttggcttggggtggccaatgggctgggaccctccatgagagttttggacacttgggtcacctgacccgtgcctctctgacacatgtctccggggggcagccacctggccaatgtgcatttttgcacgtgctggaaccttccatgggggtctgggctattggctggagccaggacatgagtcaggggcaccatggacctcacgtgccagggagacttgaatgtggctgtcactcttccggacgccaagggctgcaggaggctgcttttggcactacccaccccgtgtgacagaataggagccagcgactcaggactgctcacgggtcaggagggcaacgcctgaagtcagacctccctataggtcaacagggacaacctggggatctctggagcagggccctcctctctcaggcttggcccactcccccagacacctggacacgtggccacaaatctgggacaaggggcccccgcacagcatgaaataaaaagtgcctgagaagtgtgtgcatgggacgcc

SEQ ID NO: 370085 - DNA, 6076 bp, Homo sapiens
tgttttgttttgttttgcttgagaccaggctattgtgcagtggtgtaatcacagctcactgcagcctcaacctcctgggctcaagcaatccccccacctcagcctcccaagtagctgggacaacaggcacacgccaccacgcctggcttattttttcttttataaagacagggtctgattatgttgcccaggctaatctcaaactcctggcctcaagccatcttcccacctcagcctcccaaagtgatgggactacaggcatgagccaccacacccagtcctcttttttttttttcttgcctccgttaccccaaagacaaagtgacttctgacctgcggtagcagaagcagcatccatctccccagggcctggccacagggctgcaggtcccgcccaaggagcatgttaagtttatacagattctccctttcagctgctcaatgctagatttctcatttgacggctctgaggagttcgatattaacgcttttgaggacatcattgctttctatgaaagcaagaagtaagtgcagaaagggcctttgatcccgaggccacattgagcacagtgtctttcccccagctgcatgttttggcttcagtggcctggggatggtcccaatggcgctgggaaccccgaggtggcaggcctgcttctaactccatcttctttctgtcactgcgccccctccacccctcccctcagcgatttgcataaccaaatgatcaagagcatcaaaggattgccctggcagggcgaggacccccgtagccttctccagtccctcagtcggctccagaaaccccgcgccttcatcctgaaaagtaaaggtatcaaacaaaagcagatcattccaaagaacctactggactccaagtccctgaaactcatcatcagcatgactctgcacgaccgcaccaccaagtccctactgcacctgcacaagaagaaaaagccaccaagcatcagcgcccagttccagacatcccttaacaagctcttggaggcactggggaaggcggagcccttctttatccgctgcatccgttccaatgctgaaaagaaagagctgtgctttgacgacgagctggtcctgcagcagctgcgctacaccggcatgctggagaccgtgcgcatccggaggtcagggtacagcgccaagtacacgttccaggatttcaccgagcagttccaggtgctcctgcccaaggatgcccagccctgcagggaggtcatctccaccctcctggagaaaatgaagatagacaagaggaactaccagatcgggaagaccaaggtcttcctgaaggagacggagcggcaagccctgcaggagacgctgcaccgggaggtggtgcggaaaatcctgctgctgcagagctggttccggatggtgctggagcgtcggcacttcctgcagatgaagcgggccgccgtcaccatccaggcctgctggcggtcctaccgggtccggagggcgctggagaggacgcaggctgccgtgtacctccaggcctcatggaggggctactggcagcggaagctctaccggcaccagaaacagagcatcatccgcctgcagagcctgtgtcgggggcacctgcagcgcaagagcttcagccagatgatctcggagaagcagaaggcagaagagaaggagagggaagccctggaagccgcaagagcaggtgctgaggagggcggacagggtcaggcggctggagggcagcaggtagctgagcaggggccggagccagcggaggatggcgggcacctggcatcggagcctgaggtgcagccaagtgacaggtcccccctagagcactcctcacctgagaaggaggccccaagcccagagaagactctcccaccccagaaaaccgtggcggctgaaagtcacgagaaagtccccagcagccgggagaagcgtgagtcgcgtcggcaaagagggctggagcacgtcaagttccagaacaaacacatccagtcctgcaaggaggagagtgccctcagagaaccttccagaagggtcacccaggagcaaggggtgagtctcctggaagacaaaaaggagagcagagaagatgaaacccttctagtcgtagagacggaggctgagaacacatctcaaaagcagcccacagagcaaccccaggccatggcagttggcaaggtctctgaagaaactgagaagacgctgcccagtgggagccccaggcctggccagttggagcggccgaccagcctggccctggacagcagggtcagcccaccggcccctggcagcgcccccgagacccccgaggacaagagcaaaccatgtggcagcccaagggttcaggaaaagcccgacagccccggaggctccacgcagatccagcggtacctggacgccgagcggctggccagcgccgtggaactgtggcggggcaagaagctggtggccgccgccagccctagtgccatgctcagccagtccctggacctcagcgacagacaccgggccacaggggccgccctcacgcccacagaggagaggcgcacctccttctccacgagcgacgtctccaagctcctcccgtccctggccaaggctcagcctgcagcagaaaccacggacggagagcgaagtgcgaaaaagccagctgtccagaagaagaagccaggcgacgcatcctccctcccagacgcagggctgtccccgggctctcaggtcgactctaaatccacgtttaagaggctttttctgcataaaaccaaggataaaaaatacagcctggagggcgcagaggagctggagaatgcagtgtccgggcacgtggtgctggaagccaccaccatgaagaagggcctggaagccccctccggacagcagcatcgccacgctgcaggtgagaagcgcaccaaggaaccaggaggcaaagggaagaagaaccgaaatgtcaagattgggaagatcacagtgtcagagaagtggcgggaatcggtgttccgccagatcaccaacgccaatgagctcaagtacctggacgagttcctgctcaacaagataaatgacctccgttcccagaagacgcccattgagagcttgtttatcgaagccaccgagaagttcaggagcaacatcaaaacgatgtactctgtcccgaacgggaagatccacgtgggctacaaggatctgatggagaactaccagatcgtcgtcagcaacctggccactgagcgtggccagaaggacaccaacctggtcctcaacctcttccagtcactgctagatgagttcacccgtggctacaccaagaacgacttcgagccagtgaagcagagcaaagctcagaagaagaagcggaagcaggagcgtgctgtccaggagcacaacgggcacgtgttcgccagctaccaggttagcatcccgcagtcgtgcgagcagtgcctctcctatatctggctcatggacaaggccctgctctgcagcgtgtgcaagatgacctgccacaagaagtgcgtgcacaagattcagagccactgctcctacacctacgggaggaagggcgagccaggcgctgagcctggccacttcggcgtgtgcgtagacagcctgaccagcgacaaggcctcggtgcccatcgtgctggagaagctcctggaacacgtggagatgcacggcctgtacaccgagggcctctaccgcaagtcgggtgctgccaaccgcactcgggagctccggcaggcgctgcagacagaccccgcagcagtcaagctggagaacttccccatccacgccatcacaggggtgctgaagcagtggctgcgggagctgcccgagcccctcatgaccttcgcacagtacggcgacttcctccgagccgtcgagctgccggagaagcaggagcagctggctgccatctatgccgtcctggagcaccttccagaagccaaccacaactccctggagagactcatcttccaccttgtcaaggtggccctgctcgaggatgtcaaccgcatgtcacctggggcgctggccattatcttcgcaccctgcctcctgcgctgccctgacaactcggacccgctgaccagcatgaaggacgtcctcaagatcaccacgtgcgtggagatgctgatcaaggagcagatgaggaaatacaaagtgaagatggaggagatcagccaactggaggctgcagagagtatcgccttccgcaggctttcgctcctgcgacaaaatgctccatggcctctcaaactggggttttcgtctccctatgagggggtcctgaacaagagccccaagacccgggacatccaggaggaggagctggaggtgctgctggaggaggaggcagccggcggcgatgaggaccgggaaaaggagattctcattgaacggatccagtccatcaaggaggagaaggaggacatcacctaccggctgccggagctggacccaaggggctcggacgaggagaacctggactcggagacgtcggccagcaccgagagcctgctggaggagcgggccgggcggggggcctcggaaggtcagtattaaggtagcgtctgcttttctccttcccgtccatcccagcaggccccagggcgagggtcctccggctgccggccctgaagctgcagtaaccctgccatctgtctctcaaaagggccccctgcgcctgctctcccttgccccggcgcgcccaccccgagccccctccccaccgtggccgcccctccacgacgaaggccgtcgtccttcgtaacggtcagagtgaagaccccccggcggacccccatcatgcccacggccaacatcaagctcccaccaggcctgccctcccacctgcctcgctgggcaccgggtgcccgggaggcggctgccccagtgcggcgccgggagccacctgcccgccgcccggaccagatacattccgtgtacatcacgcccggggcagacctgccagtgcagggcgccctggagcccctagaagaggatggccagccacctggggccaagcggaggtactcggatcccccaacgtactgcctgccccccgcctcgggccagaccaatggctgagagccacagctgacaaagtctgcatgtccgaggacggcccctgcactggagctgggcgccagagctgcagagctagtgttcggccctcagagaaggatccagaatcaaaagctcaagagtgacgtgaggtgggcaccggccccaagtgcagagtcaaggcagggagaggccggctggagccaggccccctcgcacgcagcccccaaatcatggacgcacctgtggggagcaccacatctccacctgcggcctcacatctccccactcccctttttgtacgtttaactgtttctttgtacgtggtttacgtaactttaaactgtaacagccttaatggaagaccaaatggttttttatatgtgtatgtacaaagttttctattaacgctgcccgtctcccttataacctggacgtgagctgtcagagcagaagccactaggccactgcgcgtctgaggctcagaccctgctgtggttggcttggggtggccaatgggctgggaccctccatgagagttttggacacttgggtcacctgacccgtgcctctctgacacatgtctccggggggcagccacctggccaatgtgcatttttgcacgtgctggaaccttccatgggggtctgggctattggctggagccaggacatgagtcaggggcaccatggacctcacgtgccagggagacttgaatgtggctgtcactcttccggacgccaagggctgcaggaggctgcttttggcactacccaccccgtgtgacagaataggagccagcgactcaggactgctcacgggtcaggagggcaacgcctgaagtcagacctccctataggtcaacagggacaacctggggatctctggagcagggccctcctctctcaggcttggcccactcccccagacacctggacacgtggccacaaatctgggacaaggggcccccgcacagcatgaaataaaaagtgcctgagaagtgtgtgcatgggacgcc

SEQ ID NO: 370086 - DNA, 5604 bp, Homo sapiens
gtccaatttgcctcaaagccctgccccgctccagggcttggggaggctggcccagtccccatttctggcaaaagagagaggggcagcattgagcacagtgtctttcccccagctgcatgttttggcttcagtggcctggggatggtcccaatggcgctgggaaccccgaggtggcaggcctgcttctaactccatcttctttctgtcactgcgccccctccacccctcccctcagcgatttgcataaccaaatgatcaagagcatcaaaggattgccctggcagggcgaggacccccgtagccttctccagtccctcagtcggctccagaaaccccgcgccttcatcctgaaaagtaaaggtatcaaacaaaagcagatcattccaaagaacctactggactccaagtccctgaaactcatcatcagcatgactctgcacgaccgcaccaccaagtccctactgcacctgcacaagaagaaaaagccaccaagcatcagcgcccagttccagacatcccttaacaagctcttggaggcactggggaaggcggagcccttctttatccgctgcatccgttccaatgctgaaaagaaagagctgtgctttgacgacgagctggtcctgcagcagctgcgctacaccggcatgctggagaccgtgcgcatccggaggtcagggtacagcgccaagtacacgttccaggatttcaccgagcagttccaggtgctcctgcccaaggatgcccagccctgcagggaggtcatctccaccctcctggagaaaatgaagatagacaagaggaactaccagatcgggaagaccaaggtcttcctgaaggagacggagcggcaagccctgcaggagacgctgcaccgggaggtggtgcggaaaatcctgctgctgcagagctggttccggatggtgctggagcgtcggcacttcctgcagatgaagcgggccgccgtcaccatccaggcctgctggcggtcctaccgggtccggagggcgctggagaggacgcaggctgccgtgtacctccaggcctcatggaggggctactggcagcggaagctctaccggcaccagaaacagagcatcatccgcctgcagagcctgtgtcgggggcacctgcagcgcaagagcttcagccagatgatctcggagaagcagaaggcagaagagaaggagagggaagccctggaagccgcaagagcaggtgctgaggagggcggacagggtcaggcggctggagggcagcaggtagctgagcaggggccggagccagcggaggatggcgggcacctggcatcggagcctgaggtgcagccaagtgacaggtcccccctagagcactcctcacctgagaaggaggccccaagcccagagaagactctcccaccccagaaaaccgtggcggctgaaagtcacgagaaagtccccagcagccgggagaagcgtgagtcgcgtcggcaaagagggctggagcacgtcaagttccagaacaaacacatccagtcctgcaaggaggagagtgccctcagagaaccttccagaagggtcacccaggagcaaggggtgagtctcctggaagacaaaaaggagagcagagaagatgaaacccttctagtcgtagagacggaggctgagaacacatctcaaaagcagcccacagagcaaccccaggccatggcagttggcaaggtctctgaagaaactgagaagacgctgcccagtgggagccccaggcctggccagttggagcggccgaccagcctggccctggacagcagggtcagcccaccggcccctggcagcgcccccgagacccccgaggacaagagcaaaccatgtggcagcccaagggttcaggaaaagcccgacagccccggaggctccacgcagatccagcggtacctggacgccgagcggctggccagcgccgtggaactgtggcggggcaagaagctggtggccgccgccagccctagtgccatgctcagccagtccctggacctcagcgacagacaccgggccacaggggccgccctcacgcccacagaggagaggcgcacctccttctccacgagcgacgtctccaagctcctcccgtccctggccaaggctcagcctgcagcagaaaccacggacggagagcgaagtgcgaaaaagccagctgtccagaagaagaagccaggcgacgcatcctccctcccagacgcagggctgtccccgggctctcaggtcgactctaaatccacgtttaagaggctttttctgcataaaaccaaggataaaaaatacagcctggagggcgcagaggagctggagaatgcagtgtccgggcacgtggtgctggaagccaccaccatgaagaagggcctggaagccccctccggacagcagcatcgccacgctgcaggtgagaagcgcaccaaggaaccaggaggcaaagggaagaagaaccgaaatgtcaagattgggaagatcacagtgtcagagaagtggcgggaatcggtgttccgccagatcaccaacgccaatgagctcaagtacctggacgagttcctgctcaacaagataaatgacctccgttcccagaagacgcccattgagagcttgtttatcgaagccaccgagaagttcaggagcaacatcaaaacgatgtactctgtcccgaacgggaagatccacgtgggctacaaggatctgatggagaactaccagatcgtcgtcagcaacctggccactgagcgtggccagaaggacaccaacctggtcctcaacctcttccagtcactgctagatgagttcacccgtggctacaccaagaacgacttcgagccagtgaagcagagcaaagctcagaagaagaagcggaagcaggagcgtgctgtccaggagcacaacgggcacgtgttcgccagctaccaggttagcatcccgcagtcgtgcgagcagtgcctctcctatatctggctcatggacaaggccctgctctgcagcgtgtgcaagatgacctgccacaagaagtgcgtgcacaagattcagagccactgctcctacacctacgggaggaagggcgagccaggcgctgagcctggccacttcggcgtgtgcgtagacagcctgaccagcgacaaggcctcggtgcccatcgtgctggagaagctcctggaacacgtggagatgcacggcctgtacaccgagggcctctaccgcaagtcgggtgctgccaaccgcactcgggagctccggcaggcgctgcagacagaccccgcagcagtcaagctggagaacttccccatccacgccatcacaggggtgctgaagcagtggctgcgggagctgcccgagcccctcatgaccttcgcacagtacggcgacttcctccgagccgtcgagctgccggagaagcaggagcagctggctgccatctatgccgtcctggagcaccttccagaagccaaccacaactccctggagagactcatcttccaccttgtcaaggtggccctgctcgaggatgtcaaccgcatgtcacctggggcgctggccattatcttcgcaccctgcctcctgcgctgccctgacaactcggacccgctgaccagcatgaaggacgtcctcaagatcaccacgtgcgtggagatgctgatcaaggagcagatgaggaaatacaaagtgaagatggaggagatcagccaactggaggctgcagagagtatcgccttccgcaggctttcgctcctgcgacaaaatgctccatggcctctcaaactggggttttcgtctccctatgagggggtcctgaacaagagccccaagacccgggacatccaggaggaggagctggaggtgctgctggaggaggaggcagccggcggcgatgaggaccgggaaaaggagattctcattgaacggatccagtccatcaaggaggagaaggaggacatcacctaccggctgccggagctggacccaaggggctcggacgaggagaacctggactcggagacgtcggccagcaccgagagcctgctggaggagcgggccgggcggggggcctcggaaggtcagtattaaggtagcgtctgcttttctccttcccgtccatcccagcaggccccagggcgagggtcctccggctgccggccctgaagctgcagtaaccctgccatctgtctctcaaaagggccccctgcgcctgctctcccttgccccggcgcgcccaccccgagccccctccccaccgtggccgcccctccacgacgaaggccgtcgtccttcgtaacggtcagagtgaagaccccccggcggacccccatcatgcccacggccaacatcaagctcccaccaggcctgccctcccacctgcctcgctgggcaccgggtgcccgggaggcggctgccccagtgcggcgccgggagccacctgcccgccgcccggaccagatacattccgtgtacatcacgcccggggcagacctgccagtgcagggcgccctggagcccctagaagaggatggccagccacctggggccaagcggaggtactcggatcccccaacgtactgcctgccccccgcctcgggccagaccaatggctgagagccacagctgacaaagtctgcatgtccgaggacggcccctgcactggagctgggcgccagagctgcagagctagtgttcggccctcagagaaggatccagaatcaaaagctcaagagtgacgtgaggtgggcaccggccccaagtgcagagtcaaggcagggagaggccggctggagccaggccccctcgcacgcagcccccaaatcatggacgcacctgtggggagcaccacatctccacctgcggcctcacatctccccactcccctttttgtacgtttaactgtttctttgtacgtggtttacgtaactttaaactgtaacagccttaatggaagaccaaatggttttttatatgtgtatgtacaaagttttctattaacgctgcccgtctcccttataacctggacgtgagctgtcagagcagaagccactaggccactgcgcgtctgaggctcagaccctgctgtggttggcttggggtggccaatgggctgggaccctccatgagagttttggacacttgggtcacctgacccgtgcctctctgacacatgtctccggggggcagccacctggccaatgtgcatttttgcacgtgctggaaccttccatgggggtctgggctattggctggagccaggacatgagtcaggggcaccatggacctcacgtgccagggagacttgaatgtggctgtcactcttccggacgccaagggctgcaggaggctgcttttggcactacccaccccgtgtgacagaataggagccagcgactcaggactgctcacgggtcaggagggcaacgcctgaagtcagacctccctataggtcaacagggacaacctggggatctctggagcagggccctcctctctcaggcttggcccactcccccagacacctggacacgtggccacaaatctgggacaaggggcccccgcacagcatgaaataaaaagtgcctgagaagtgtgtgcatgggacgcc

SEQ ID NO: 370087 - DNA, 7336 bp, Homo sapiens
cggggcggagcggctcgagcagcggcgggctggcaggcggtcgtccggccggggacccggcccgggaccggcggcgcgcggcggccgaggccagctccaggacacgcgcgccccgagcctgggaggcatgctgaagccaggcggccggcaggatgagtgtgaaagaggcaggcagctcgggccgccgggagcaggcggcctaccacctgcacatctacccccagctgtccaccaccgagagccaggcctcgtgccgcgtgactgccaccaaggacagcaccacctcggacgtcatcaaggacgccattgccagcctgcggctggacggcaccaaatgttatgtgctggtggaggtcaaagagtcgggaggcgaggaatgggtgctggacgccaacgactcgcctgtgcaccgggtgctgctatggccccggcgggcacaggacgagcaccctcaggaggatggctactacttcctgctgcaggagcgcaacgcagatggaaccatcaagtacgtgcatatgcagctggtggcgcaggccacagccacccggcgcctagtggagcgtggcctcctgccacggcagcaggcggactttgatgacctgtgtaacctccccgagctaaccgagggcaacctcctgaagaacctcaagcaccgcttcctgcaacaaaagatctacacgtacgcggggagcatcctggtggccatcaacccctttaagttcctgcccatctacaaccccaagtacgtgaagatgtatgagaaccagcagctgggcaagctggagccacacgtcttcgcgctggccgacgtggcctactacaccatgctcaggaagcgcgtgaaccagtgcatcgtgatctcgggtgagagcggctccggcaagacccagagcaccaacttcctcatccactgcctcaccgccctcagccagaagggctacgccagcggcgtcgagaggaccatcctgggtgctggccctgtgctggaggcttttggaaatgccaagacagcccacaacaacaactccagccggtttgggaaattcatccaagtcagctacctagagagtggcatcgtgagaggagctgtcgtcgagaaatatctgcttgaaaagtctcgcctggtgtctcaggagaaggatgagaggaactaccatgtgttttattatttgttacttggggtcagcgaggaagagcgccaagaatttcagctcaagcagcctgaagattatttctacctcaaccagcataacttgaagattgaagatggggaggacctgaagcatgactttgagaggctcaagcaggccatggagatggtgggcttcctccccgccaccaagaagcagatttttgccgtcctctcggccatcctgtacctgggcaacgtcacttataagaagagagctacaggccgagaggaagggttggaggtcgggccacccgaggtgctggacaccctgtcgcagcttctgaaggtgaagcgagaaatcttggtggaggttctgaccaaaagaaaaacggtgaccgtcaacgacaagcttatccttccctacagcctcagcgaggccatcactgcccgcgactccatggccaagtctctgtacagcgccctgttcgactggattgtgctgcggatcaaccacgcactcctcaacaagaaggacgtggaagaggcagtctcgtgcctgtccattggggtcctggacatcttcgggtttgaagacttcgagaggaacagctttgagcagttctgcatcaactacgccaatgagcagctgcagtattacttcaaccagcacatcttcaagctggagcaggaggaatatcagggcgaggggatcacgtggcacaacatcggctacacagacaatgtcggctgcatccatctcatcagcaagaaacccacgggcctcttctacctgctggacgaggagagcaacttcccccacgccacgagccagaccctgctggccaagttcaaacagcaacatgaggacaataagtacttcctgggcaccccggtcatggagccagctttcatcatccagcacttcgcagggaaggtgaaatatcagatcaaggacttccgggagaagaacatggactacatgcggccagacatcgtggccctgctgcggggcagtgacagctcctacgtgcgggagctcatcggcatggaccccgtggccgtgttccgctgggccgtgctccgggctgctatccgggccatggcagtgcttcgggaggccggacgcctgcgggccgagagggccgaaaaggctgcaggtatgagcagccctggtgcccaaagtcacccagaagagctgccaagaggagccagcaccccttcggaaaaactttaccgcgatttgcataaccaaatgatcaagagcatcaaaggattgccctggcagggcgaggacccccgtagccttctccagtccctcagtcggctccagaaaccccgcgccttcatcctgaaaagtaaaggtatcaaacaaaagcagatcattccaaagaacctactggactccaagtccctgaaactcatcatcagcatgactctgcacgaccgcaccaccaagtccctactgcacctgcacaagaagaaaaagccaccaagcatcagcgcccagttccagacatcccttaacaagctcttggaggcactggggaaggcggagcccttctttatccgctgcatccgttccaatgctgaaaagaaagagctgtgctttgacgacgagctggtcctgcagcagctgcgctacaccggcatgctggagaccgtgcgcatccggaggtcagggtacagcgccaagtacacgttccaggatttcaccgagcagttccaggtgctcctgcccaaggatgcccagccctgcagggaggtcatctccaccctcctggagaaaatgaagatagacaagaggaactaccagatcgggaagaccaaggtcttcctgaaggagacggagcggcaagccctgcaggagacgctgcaccgggaggtggtgcggaaaatcctgctgctgcagagctggttccggatggtgctggagcgtcggcacttcctgcagatgaagcgggccgccgtcaccatccaggcctgctggcggtcctaccgggtccggagggcgctggagaggacgcaggctgccgtgtacctccaggcctcatggaggggctactggcagcggaagctctaccggcaccagaaacagagcatcatccgcctgcagagcctgtgtcgggggcacctgcagcgcaagagcttcagccagatgatctcggagaagcagaaggcagaagagaaggagagggaagccctggaagccgcaagagcaggtgctgaggagggcggacagggtcaggcggctggagggcagcaggtagctgagcaggggccggagccagcggaggatggcgggcacctggcatcggagcctgaggtgcagccaagtgacaggtcccccctagagcactcctcacctgagaaggaggccccaagcccagagaagactctcccaccccagaaaaccgtggcggctgaaagtcacgagaaagtccccagcagccgggagaagcgtgagtcgcgtcggcaaagagggctggagcacgtcaagttccagaacaaacacatccagtcctgcaaggaggagagtgccctcagagaaccttccagaagggtcacccaggagcaaggggtgagtctcctggaagacaaaaaggagagcagagaagatgaaacccttctagtcgtagagacggaggctgagaacacatctcaaaagcagcccacagagcaaccccaggccatggcagttggcaaggtctctgaagaaactgagaagacgctgcccagtgggagccccaggcctggccagttggagcggccgaccagcctggccctggacagcagggtcagcccaccggcccctggcagcgcccccgagacccccgaggacaagagcaaaccatgtggcagcccaagggttcaggaaaagcccgacagccccggaggctccacgcagatccagcggtacctggacgccgagcggctggccagcgccgtggaactgtggcggggcaagaagctggtggccgccgccagccctagtgccatgctcagccagtccctggacctcagcgacagacaccgggccacaggggccgccctcacgcccacagaggagaggcgcacctccttctccacgagcgacgtctccaagctcctcccgtccctggccaaggctcagcctgcagcagaaaccacggacggagagcgaagtgcgaaaaagccagctgtccagaagaagaagccaggcgacgcatcctccctcccagacgcagggctgtccccgggctctcaggtcgactctaaatccacgtttaagaggctttttctgcataaaaccaaggataaaaaatacagcctggagggcgcagaggagctggagaatgcagtgtccgggcacgtggtgctggaagccaccaccatgaagaagggcctggaagccccctccggacagcagcatcgccacgctgcaggtgagaagcgcaccaaggaaccaggaggcaaagggaagaagaaccgaaatgtcaagattgggaagatcacagtgtcagagaagtggcgggaatcggtgttccgccagatcaccaacgccaatgagctcaagtacctggacgagttcctgctcaacaagataaatgacctccgttcccagaagacgcccattgagagcttgtttatcgaagccaccgagaagttcaggagcaacatcaaaacgatgtactctgtcccgaacgggaagatccacgtgggctacaaggatctgatggagaactaccagatcgtcgtcagcaacctggccactgagcgtggccagaaggacaccaacctggtcctcaacctcttccagtcactgctagatgagttcacccgtggctacaccaagaacgacttcgagccagtgaagcagagcaaagctcagaagaagaagcggaagcaggagcgtgctgtccaggagcacaacgggcacgtgttcgccagctaccaggttagcatcccgcagtcgtgcgagcagtgcctctcctatatctggctcatggacaaggccctgctctgcagcgtgtgcaagatgacctgccacaagaagtgcgtgcacaagattcagagccactgctcctacacctacgggaggaagggcgagccaggcgctgagcctggccacttcggcgtgtgcgtagacagcctgaccagcgacaaggcctcggtgcccatcgtgctggagaagctcctggaacacgtggagatgcacggcctgtacaccgagggcctctaccgcaagtcgggtgctgccaaccgcactcgggagctccggcaggcgctgcagacagaccccgcagcagtcaagctggagaacttccccatccacgccatcacaggggtgctgaagcagtggctgcgggagctgcccgagcccctcatgaccttcgcacagtacggcgacttcctccgagccgtcgagctgccggagaagcaggagcagctggctgccatctatgccgtcctggagcaccttccagaagccaaccacaactccctggagagactcatcttccaccttgtcaaggtggccctgctcgaggatgtcaaccgcatgtcacctggggcgctggccattatcttcgcaccctgcctcctgcgctgccctgacaactcggacccgctgaccagcatgaaggacgtcctcaagatcaccacgtgcgtggagatgctgatcaaggagcagatgaggaaatacaaagtgaagatggaggagatcagccaactggaggctgcagagagtatcgccttccgcaggctttcgctcctgcgacaaaatgctccatggcctctcaaactggggttttcgtctccctatgagggggtcctgaacaagagccccaagacccgggacatccaggaggaggagctggaggtgctgctggaggaggaggcagccggcggcgatgaggaccgggaaaaggagattctcattgaacggatccagtccatcaaggaggagaaggaggacatcacctaccggctgccggagctggacccaaggggctcggacgaggagaacctggactcggagacgtcggccagcaccgagagcctgctggaggagcgggccgggcggggggcctcggaagggccccctgcgcctgctctcccttgccccggcgcgcccaccccgagccccctccccaccgtggccgcccctccacgacgaaggccgtcgtccttcgtaacggtcagagtgaagaccccccggcggacccccatcatgcccacggccaacatcaagctcccaccaggcctgccctcccacctgcctcgctgggcaccgggtgcccgggaggcggctgccccagtgcggcgccgggagccacctgcccgccgcccggaccagatacattccgtgtacatcacgcccggggcagacctgccagtgcagggcgccctggagcccctagaagaggatggccagccacctggggccaagcggaggtactcggatcccccaacgtactgcctgccccccgcctcgggccagaccaatggctgagagccacagctgacaaagtctgcatgtccgaggacggcccctgcactggagctgggcgccagagctgcagagctagtgttcggccctcagagaaggatccagaatcaaaagctcaagagtgacgtgaggtgggcaccggccccaagtgcagagtcaaggcagggagaggccggctggagccaggccccctcgcacgcagcccccaaatcatggacgcacctgtggggagcaccacatctccacctgcggcctcacatctccccactcccctttttgtacgtttaactgtttctttgtacgtggtttacgtaactttaaactgtaacagccttaatggaagaccaaatggttttttatatgtgtatgtacaaagttttctattaacgctgcccgtctcccttataacctggacgtgagctgtcagagcagaagccaagggctgcaggaggctgcttttggcactacccaccccgtgtgacagaataggagccagcgactcaggactgctcacgggtcaggagggcaacgcctgaagtcagacctccctataggtcaacagggacaacctggggatctctggagcagggccctcctctctcaggcttggcccactcccccagacacctggacacgtggccacaaatctgggacaaggggcccccgcacagcatgaaataaaaagtgcctgagaagtgtgtgcatgggacgcc

SEQ ID NO: 370088 - DNA, 6331 bp, Homo sapiens
  misc_feature (6228)..(6228): n is a, c, g, or t
cggggcggagcggctcgagcagcggcgggctggcaggcggtcgtccggccggggacccggcccgggaccggcggcgcgcggcggccgaggccagctccaggacacgcgcgccccgagcctgggaggcatgctgaagccaggcggccggcaggatgagtgtgaaagaggcaggcagctcgggccgccgggagcaggcggcctaccacctgcacatctacccccagctgtccaccaccgagagccaggcctcgtgccgcgtgactgccaccaaggacagcaccacctcggacgtcatcaaggacgccattgccagcctgcggctggacggcaccaaatgttatgtgctggtggaggtcaaagagtcgggaggcgaggaatgggtgctggacgccaacgactcgcctgtgcaccgggtgctgctatggccccggcgggcacaggacgagcaccctcaggaggatggctactacttcctgctgcaggagcgcaacgcagatggaaccatcaagtacgtgcatatgcagctggtggcgcaggccacagccacccggcgcctagtggagcgtggcctcctgccacggcagcaggcggactttgatgacctgtgtaacctccccgagctaaccgagggcaacctcctgaagaacctcaagcaccgcttcctgcaacaaaagatctacacgtacgcggggagcatcctggtggccatcaacccctttaagttcctgcccatctacaaccccaagtacgtgaagatgtatgagaaccagcagctgggcaagctggagccacacgtcttcgcgctggccgacgtggcctactacaccatgctcaggaagcgcgtgaaccagtgcatcgtgatctcgggtgagagcggctccggcaagacccagagcaccaacttcctcatccactgcctcaccgccctcagccagaagggctacgccagcggcgtcgagaggaccatcctgggtgctggccctgtgctggaggcttttggaaatgccaagacagcccacaacaacaactccagccggtttgggaaattcatccaagtcagctacctagagagtggcatcgtgagaggagctgtcgtcgagaaatatctgcttgaaaagtctcgcctggtgtctcaggagaaggatgagaggaactaccatgtgttttattatttgttacttggggtcagcgaggaagagcgccaagaatttcagctcaagcagcctgaagattatttctacctcaaccagcataacttgaagattgaagatggggaggacctgaagcatgactttgagaggctcaagcaggccatggagatggtgggcttcctccccgccaccaagaagcagatttttgccgtcctctcggccatcctgtacctgggcaacgtcacttataagaagagagctacaggccgagaggaagggttggaggtcgggccacccgaggtgctggacaccctgtcgcagcttctgaaggtgaagcgagaaatcttggtggaggttctgaccaaaagaaaaacggtgaccgtcaacgacaagcttatccttccctacagcctcagcgaggccatcactgcccgcgactccatggccaagtctctgtacagcgccctgttcgactggattgtgctgcggatcaaccacgcactcctcaacaagaaggacgtggaagaggcagtctcgtgcctgtccattggggtcctggacatcttcgggtttgaagacttcgagaggaacagctttgagcagttctgcatcaactacgccaatgagcagctgcagtattacttcaaccagcacatcttcaagctggagcaggaggaatatcagggcgaggggatcacgtggcacaacatcggctacacagacaatgtcggctgcatccatctcatcagcaagaaacccacgggcctcttctacctgctggacgaggagagcaacttcccccacgccacgagccagaccctgctggccaagttcaaacagcaacatgaggacaataagtacttcctgggcaccccggtcatggagccagctttcatcatccagcacttcgcagggaaggtgaaatatcagatcaaggacttccgggagaagaacatggactacatgcggccagacatcgtggccctgctgcggggcagtgacagctcctacgtgcgggagctcatcggcatggaccccgtggccgtgttccgctgggccgtgctccgggctgctatccgggccatggcagtgcttcgggaggccggacgcctgcgggccgagagggccgaaaaggctgcaggtatgagcagccctggtgcccaaagtcacccagaagagctgccaagaggagccagcaccccttcggaaaaactttaccgcgatttgcataaccaaatgatcaagagcatcaaaggattgccctggcagggcgaggacccccgtagccttctccagtccctcagtcggctccagaaaccccgcgccttcatcctgaaaagtaaaggtatcaaacaaaagcagatcattccaaagaacctactggactccaagtccctgaaactcatcatcagcatgactctgcacgaccgcaccaccaagtccctactgcacctgcacaagaagaaaaagccaccaagcatcagcgcccagttccagacatcccttaacaagctcttggaggcactggggaaggcggagcccttctttatccgctgcatccgttccaatgctgaaaagaaagagctgtgctttgacgacgagctggtcctgcagcagctgcgctacaccggcatgctggagaccgtgcgcatccggaggtcagggtacagcgccaagtacacgttccaggatttcaccgagcagttccaggtgctcctgcccaaggatgcccagccctgcagggaggtcatctccaccctcctggagaaaatgaagatagacaagaggaactaccagatcgggaagaccaaggtcttcctgaaggagacggagcggcaagccctgcaggagacgctgcaccgggaggtggtgcggaaaatcctgctgctgcagagctggttccggatggtgctggagcgtcggcacttcctgcagatgaagcgggccgccgtcaccatccaggcctgctggcggtcctaccgggtccggagggcgctggagaggacgcaggctgccgtgtacctccaggcctcatggaggggctactggcagcggaagctctaccggcaccagaaacagagcatcatccgcctgcagagcctgtgtcgggggcacctgcagcgcaagagcttcagccagatgatctcggagaagcagaaggcagaagagaaggagagggaagccctggaagccgcaagagcaggtgctgaggagggcggacagggtcaggcggctggagggcagcaggtagctgagcaggggccggagccagcggaggatggcgggcacctggcatcggagcctgaggtgcagccaagtgacaggtcccccctagagcactcctcacctgagaaggaggccccaagcccagagaagactctcccaccccagaaaaccgtggcggctgaaagtcacgagaaagtccccagcagccgggagaagcgtgagtcgcgtcggcaaagagggctggagcacgtcaagttccagaacaaacacatccagtcctgcaaggaggagagtgccctcagagaaccttccagaagggtcacccaggagcaaggggtgagtctcctggaagacaaaaaggagagcagagaagatgaaacccttctagtcgtagagacggaggctgagaacacatctcaaaagcagcccacagagcaaccccaggccatggcagttggcaaggtctctgaagaaactgagaagacgctgcccagtgggagccccaggcctggccagttggagcggccgaccagcctggccctggacagcagggtcagcccaccggcccctggcagcgcccccgagacccccgaggacaagagcaaaccatgtggcagcccaagggttcaggaaaagcccgacagccccggaggctccacgcagatccagcggtacctggacgccgagcggctggccagcgccgtggaactgtggcggggcaagaagctggtggccgccgccagccctagtgccatgctcagccagtccctggacctcagcgacagacaccgggccacaggggccgccctcacgcccacagaggagaggcgcacctccttctccacgagcgacgtctccaagctcctcccgtccctggccaaggctcagcctgcagcagaaaccacggacggagagcgaagtgcgaaaaagccagctgtccagaagaagaagccaggcgacgcatcctccctcccagacgcagggctgtccccgggctctcaggtcgactctaaatccacgtttaagaggctttttctgcataaaaccaaggataaaaaatacagcctggagggcgcagaggagctggagaatgcagtgtccgggcacgtggtgctggaagccaccaccatgaagaagggcctggaagccccctccggacagcagcatcgccacgctgcaggtgagaagcgcaccaaggaaccaggaggcaaagggaagaagaaccgaaatgtcaagattgggaagatcacagtgtcagagaagtggcgggaatcggtgttccgccagatcaccaacgccaatgagctcaagtacctggacgagttcctgctcaacaagataaatgacctccgttcccagaagacgcccattgagagcttgtttatcgaagccaccgagaagttcaggagcaacatcaaaacgatgtactctgtcccgaacgggaagatccacgtgggctacaaggatctgatggagaactaccagatcgtcgtcagcaacctggccactgagcgtggccagaaggacaccaacctggtcctcaacctcttccagtcactgctagatgagttcacccgtggctacaccaagaacgacttcgagccagtgaagcagagcaaagctcagaagaagaagcggaagcaggagcgtgctgtccaggagcacaacgggcacgtgttcgccagctaccaggttagcatcccgcagtcgtgcgagcagtgcctctcctatatctggctcatggacaaggccctgctctgcagcgtgtgcaagatgacctgccacaagaagtgcgtgcacaagattcagagccactgctcctacacctacgggaggaagggcgagccaggcgctgagcctggccacttcggcgtgtgcgtagacagcctgaccagcgacaaggcctcggtgcccatcgtgctggagaagctcctggaacacgtggagatgcacggcctgtacaccgagggcctctaccgcaagtcgggtgctgccaaccgcactcgggagctccggcaggcgctgcagacagaccccgcagcagtcaagctggagaacttccccatccacgccatcacaggggtgctgaagcagtggctgcgggagctgcccgagcccctcatgaccttcgcacagtacggcgacttcctccgagccgtcgagctgccggagaagcaggagcagctggctgccatctatgccgtcctggagcaccttccagaagccaaccacaactccctggagagactcatcttccaccttgtcaaggtggccctgctcgaggatgtcaaccgcatgtcacctggggcgctggccattatcttcgcaccctgcctcctgcgctgccctgacaactcggacccgctgaccagcatgaaggacgtcctcaagatcaccacgtgcgtggagatgctgatcaaggagcagatgaggaaatacaaagtgaagatggaggagatcagccaactggaggctgcagagagtatcgccttccgcaggctttcgctcctgcgacaaaatgctccatggcctctcaaactggggttttcgtctccctatgagggggtcctgaacaagagccccaagacccgggacatccaggaggaggagctggaggtgctgctggaggaggaggcagccggcggcgatgaggaccgggaaaaggagattctcattgaacggatccagtccatcaaggaggagaaggaggacatcacctaccggctgccggagctggacccaaggggctcggacgaggagaacctggactcggagacgtcggccagcaccgagagcctgctggaggagcgggccgggcggggggcctcggaagggccccctgcgcctgctntcccttgccccggcgcgcaccaaacccagaagacccataaaataaacgtgaaaagacaaacacgaggaaaaacgaaaacaaagttaaagagaaaaaaatgaga

SEQ ID NO: 370089 - DNA, 2064 bp, Homo sapiens
ctggggccctgggcccctcgtaggatagacagagcctgtcctaaccttccggaagtgcatgctggggaggccccttgcctgctgaccttctgtgctcaggacgactaatcggccacatgaccaccactctgtcccatgggattcctagagaagtctcactaagagcccagcacactcacatcacaactaacctcctgggatctgctcacacctccggcagtaacctcgcccactcagagatgtcagtgggaccccttgcttctttgtttcagaacaagagccccaagacccgggacatccaggaggaggagctggaggtgctgctggaggaggaggcagccggcggcgatgaggaccgggaaaaggagattctcattgaacggatccagtccatcaaggaggagaaggaggacatcacctaccggctgccggagctggacccaaggggctcggacgaggagaacctggactcggagacgtcggccagcaccgagagcctgctggaggagcgggccgggcggggggcctcggaaggtcagtattaaggtagcgtctgcttttctccttcccgtccatcccagcaggccccagggcgagggtcctccggctgccggccctgaagctgcagtaaccctgccatctgtctctcaaaagggccccctgcgcctgctctcccttgccccggcgcgcccaccccgagccccctccccaccgtggccgcccctccacgacgaaggccgtcgtccttcgtaacggtcagagtgaagaccccccggcggacccccatcatgcccacggccaacatcaagctcccaccaggcctgccctcccacctgcctcgctgggcaccgggtgcccgggaggcggctgccccagtgcggcgccgggagccacctgcccgccgcccggaccagatacattccgtgtacatcacgcccggggcagacctgccagtgcagggcgccctggagcccctagaagaggatggccagccacctggggccaagcggaggtactcggatcccccaacgtactgcctgccccccgcctcgggccagaccaatggctgagagccacagctgacaaagtctgcatgtccgaggacggcccctgcactggagctgggcgccagagctgcagagctagtgttcggccctcagagaaggatccagaatcaaaagctcaagagtgacgtgaggtgggcaccggccccaagtgcagagtcaaggcagggagaggccggctggagccaggccccctcgcacgcagcccccaaatcatggacgcacctgtggggagcaccacatctccacctgcggcctcacatctccccactcccctttttgtacgtttaactgtttctttgtacgtggtttacgtaactttaaactgtaacagccttaatggaagaccaaatggttttttatatgtgtatgtacaaagttttctattaacgctgcccgtctcccttataacctggacgtgagctgtcagagcagaagccactaggccactgcgcgtctgaggctcagaccctgctgtggttggcttggggtggccaatgggctgggaccctccatgagagttttggacacttgggtcacctgacccgtgcctctctgacacatgtctccggggggcagccacctggccaatgtgcatttttgcacgtgctggaaccttccatgggggtctgggctattggctggagccaggacatgagtcaggggcaccatggacctcacgtgccagggagacttgaatgtggctgtcactcttccggacgccaagggctgcaggaggctgcttttggcactacccaccccgtgtgacagaataggagccagcgactcaggactgctcacgggtcaggagggcaacgcctgaagtcagacctccctataggtcaacagggacaacctggggatctctggagcagggccctcctctctcaggcttggcccactcccccagacacctggacacgtggccacaaatctgggacaaggggcccccgcacagcatgaaataaaaagtgcctgagaagtgtgtgcatgggacgcc

SEQ ID NO: 370090 - DNA, 5211 bp, Homo sapiens
cggggcggagcggctcgagcagcggcgggctggcaggcggtcgtccggccggggacccggcccgggaccggcggcgcgcggcggccgaggccagctccaggacacgcgcgccccgagcctgggaggcatgctgaagccaggcggccggcaggatgagtgtgaaagaggcaggcagctcgggccgccgggagcaggcggcctaccacctgcacatctacccccagctgtccaccaccgagagccaggcctcgtgccgcgtgactgccaccaaggacagcaccacctcggacgtcatcaaggacgccattgccagcctgcggctggacggcaccaaatgttatgtgctggtggaggtcaaagagtcgggaggcgaggaatgggtgctggacgccaacgactcgcctgtgcaccgggtgctgctatggccccggcgggcacaggacgagcaccctcaggaggatggctactacttcctgctgcaggagcgcaacgcagatggaaccatcaagtacgtgcatatgcagctggtggcgcaggccacagccacccggcgcctagtggagcgtggcctcctgccacggcagcaggcggactttgatgacctgtgtaacctccccgagctaaccgagggcaacctcctgaagaacctcaagcaccgcttcctgcaacaaaagatctacacgtacgcggggagcatcctggtggccatcaacccctttaagttcctgcccatctacaaccccaagtacgtgaagatgtatgagaaccagcagctgggcaagctggagccacacgtcttcgcgctggccgacgtggcctactacaccatgctcaggaagcgcgtgaaccagtgcatcgtgatctcgggtgagagcggctccggcaagacccagagcaccaacttcctcatccactgcctcaccgccctcagccagaagggctacgccagcggcgtcgagaggaccatcctgggtgctggccctgtgctggaggcttttggaaatgccaagacagcccacaacaacaactccagccggtttgggaaattcatccaagtcagctacctagagagtggcatcgtgagaggagctgtcgtcgagaaatatctgcttgaaaagtctcgcctggtgtctcaggagaaggatgagaggaactaccatgtgttttattatttgttacttggggtcagcgaggaagagcgccaagaatttcagctcaagcagcctgaagattatttctacctcaaccagcataacttgaagattgaagatggggaggacctgaagcatgactttgagaggctcaagcaggccatggagatggtgggcttcctccccgccaccaagaagcagatttttgccgtcctctcggccatcctgtacctgggcaacgtcacttataagaagagagctacaggccgagaggaagggttggaggtcgggccacccgaggtgctggacaccctgtcgcagcttctgaaggtgaagcgagaaatcttggtggaggttctgaccaaaagaaaaacggtgaccgtcaacgacaagcttatccttccctacagcctcagcgaggccatcactgcccgcgactccatggccaagtctctgtacagcgccctgttcgactggattgtgctgcggatcaaccacgcactcctcaacaagaaggacgtggaagaggcagtctcgtgcctgtccattggggtcctggacatcttcgggtttgaagacttcgagaggaacagctttgagcagttctgcatcaactacgccaatgagcagctgcagtattacttcaaccagcacatcttcaagctggagcaggaggaatatcagggcgaggggatcacgtggcacaacatcggctacacagacaatgtcggctgcatccatctcatcagcaagaaacccacgggcctcttctacctgctggacgaggagagcaacttcccccacgccacgagccagaccctgctggccaagttcaaacagcaacatgaggacaataagtacttcctgggcaccccggtcatggagccagctttcatcatccagcacttcgcagggaaggtgaaatatcagatcaaggacttccgggagaagaacatggactacatgcggccagacatcgtggccctgctgcggggcagtgacagctcctacgtgcgggagctcatcggcatggaccccgtggccgtgttccgctgggccgtgctccgggctgctatccgggccatggcagtgcttcgggaggccggacgcctgcgggccgagagggccgaaaaggctgcaggtatgagcagccctggtgcccaaagtcacccagaagagctgccaagaggagccagcaccccttcggaaaaactttaccgcgatttgcataaccaaatgatcaagagcatcaaaggattgccctggcagggcgaggacccccgtagccttctccagtccctcagtcggctccagaaaccccgcgccttcatcctgaaaagtaaaggtatcaaacaaaagcagatcattccaaagaacctactggactccaagtccctgaaactcatcatcagcatgactctgcacgaccgcaccaccaagtccctactgcacctgcacaagaagaaaaagccaccaagcatcagcgcccagttccagacatcccttaacaagctcttggaggcactggggaaggcggagcccttctttatccgctgcatccgttccaatgctgaaaagaaagagctgtgctttgacgacgagctggtcctgcagcagctgcgctacaccggcatgctggagaccgtgcgcatccggaggtcagggtacagcgccaagtacacgttccaggatttcaccgagcagttccaggtgctcctgcccaaggatgcccagccctgcagggaggtcatctccaccctcctggagaaaatgaagatagacaagaggaactaccagatcgggaagaccaaggtcttcctgaaggagacggagcggcaagccctgcaggagacgctgcaccgggaggtggtgcggaaaatcctgctgctgcagagctggttccggatggtgctggagcgtcggcacttcctgcagatgaagcgggccgccgtcaccatccaggcctgctggcggtcctaccgggtccggagggcgctggagaggacgcaggctgccgtgtacctccaggcctcatggaggggctactggcagcggaagctctaccggcaccagaaacagagcatcatccgcctgcagagcctgtgtcgggggcacctgcagcgcaagagcttcagccagatgatctcggagaagcagaaggcagaagagaaggagagggaagccctggaagccgcaagagcaggtgctgaggagggcggacagggtcaggcggctggagggcagcaggtagctgagcaggggccggagccagcggaggatggcgggcacctggcatcggagcctgaggtgcagccaagtgacaggtcccccctagagcactcctcacctgagaaggaggccccaagcccagagaagactctcccaccccagaaaaccgtggcggctgaaagtcacgagaaagtccccagcagccgggagaagcgtgagtcgcgtcggcaaagagggctggagcacgtcaagttccagaacaaacacatccagtcctgcaaggaggagagtgccctcagagaaccttccagaagggtcacccaggagcaaggggtgagtctcctggaagacaaaaaggagagcagagaagatgaaacccttctagtcgtagagacggaggctgagaacacatctcaaaagcagcccacagagcaaccccaggccatggcagttggcaaggtctctgaagaaactgagaagacgctgcccagtgggagccccaggcctggccagttggagcggccgaccagcctggccctggacagcagggtcagcccaccggcccctggcagcgcccccgagacccccgaggacaagagcaaaccatgtggcagcccaagggttcaggaaaagcccgacagccccggaggctccacgcagatccagcggtacctggacgccgagcggctggccagcgccgtggaactgtggcggggcaagaagctggtggccgccgccagccctagtgccatgctcagccagtccctggacctcagcgacagacaccgggccacaggggccgccctcacgcccacagaggagaggcgcacctccttctccacgagcgacgtctccaagctcctcccgtccctggccaaggctcagcctgcagcagaaaccacggacggagagcgaagtgcgaaaaagccagctgtccagaagaagaagccaggcgacgcatcctccctcccagacgcagggctgtccccgggctctcaggtcgactctaaatccacgtttaagaggctttttctgcataaaaccaaggataaaaaatacagcctggagggcgcagaggagctggagaatgcagtgtccgggcacgtggtgctggaagccaccaccatgaagaagggcctggaagccccctccggacagcagcatcgccacgctgcaggtgagaagcgcaccaaggaaccaggaggcaaagggaagaagaaccgaaatgtcaagattgggaagatcacagtgtcagagaagtggcgggaatcggtgttccgccagatcaccaacgccaatgagctcaagtacctggacgagttcctgctcaacaagataaatgacctccgttcccagaagacgcccattgagagcttgtttatcgaagccaccgagaagttcaggagcaacatcaaaacgatgtactctgtcccgaacgggaagatccacgtgggctacaaggatctgatggagaactaccagatcgtcgtcagcaacctggccactgagcgtggccagaaggacaccaacctggtcctcaacctcttccagtcactgctagatgagttcacccgtggctacaccaagaacgacttcgagccagtgaagcagagcaaagctcagaagaagaagcggaagcaggagcgtgctgtgagtaggctgcacatagatgagagtccgagcaggcgagattaacgatgaggacaaacagaagattctggacaagtgtaatgaaattatcaactggcttgataagaatcagactgccgagaaggaagaatttgaacatcaacagaaagagctggagaaagtttgcaagcgcatcacccgt

SEQ ID NO: 370091 - DNA, 1413 bp, Homo sapiens
cggggcggagcggctcgagcagcggcgggctggcaggcggtcgtccggccggggacccggcccgggaccggcggcgcgcggcggccgaggccagctccaggacacgcgcgccccgagcctgggaggcatgctgaagccaggcggccggcaggatgagtgtgaaagaggcaggcagctcgggccgccgggagcaggcggcctaccacctgcacatctacccccagctgtccaccaccgagagccaggcctcgtgccgcgtgactgccaccaaggacagcaccacctcggacgtcatcaaggacgccattgccagcctgcggctggacggcaccaaatgttatgtgctggtggaggtcaaagagtcgggaggcgaggaatgggtgctggacgccaacgactcgcctgtgcaccgggtgctgctatggccccggcgggcacaggacgagcaccctcaggaggatggctactacttcctgctgcaggagcgcaacgcagatggaaccatcaagtacgtgcatatgcagctggtggcgcaggccacagccacccggcgcctagtggagcgtggcctcctgccacggcagcaggcggactttgatgacctgtgtaacctccccgagctaaccgagggcaacctcctgaagaacctcaagcaccgcttcctgcaacaaaagatctacacgtacgcggggagcatcctggtggccatcaacccctttaagttcctgcccatctacaaccccaagtacgtgaagatgtatgagaaccagcagctgggcaagctggagccacacgtcttcgcgctggccgacgtggcctactacaccatgctcaggaagcgcgtgaaccagtgcatcgtgatctcgggtgagagcggctccggcaagacccagagcaccaacttcctcatccactgcctcaccgccctcagccagaagggctacgccagcggcgtcgagaggaccatcctgggtgctggccctgtgctggaggcttttggaaatgccaagacagcccacaacaacaactccagccggtttgggaaattcatccaagtcagctacctagagagtggcatcgtgagaggagctgtcgtcgagaaatatctgcttgaaaagtctcgcctggtgtctcaggagaaggatgagaggaactaccatgtgttttattatttgttacttggggtcagcgaggaagagcgccaagaatttcagctcaagcagcctgaagattatttctacctcaaccagcataacttgaagattgaagatggggaggacctgaagcatgactttgagaggctcaagcaggccatggagatggtgggcttcctccccgccaccaagaagcagatttttgccgtcctctcggccatcctgtacctgggcaacagagcaagacactgtttccaaa

SEQ ID NO: 370092 - DNA, 1172 bp, Homo sapiens
cggggcggagcggctcgagcagcggcgggctggcaggcggtcgtccggccggggacccggcccgggaccggcggcgcgcggcggccgaggccagctccaggacacgcgcgccccgagcctgggaggcatgctgaagccaggcggccggcaggatgagtgtgaaagaggcaggcagctcgggccgccgggagcaggcggcctaccacctgcacatctacccccagctgtccaccaccgagagccaggcctcgtgccgcgtgactgccaccaaggacagcaccacctcggacgtcatcaaggacgccattgccagcctgcggctggacggcaccaaatgttatgtgctggtggaggtcaaagagtcgggaggcgaggaatgggtgctggacgccaacgactcgcctgtgcaccgggtgctgctatggccccggcgggcacaggacgagcaccctcaggaggatggctactacttcctgctgcaggagcgcaacgcagatggaaccatcaagtacgtgcatatgcagctggtggcgcaggccacagccacccggcgcctagtggagcgtggcctcctgccacggcagcaggcggactttgatgacctgtgtaacctccccgagctaaccgagggcaacctcctgaagaacctcaagcaccgcttcctgcaacaaaagatctacacgtacgcggggagcatcctggtggccatcaacccctttaagttcctgcccatctacaaccccaagtacgtgaagatgtatgagaaccagcagctgggcaagctggagccacacgtcttcgcgctggccgacgtggcctactacaccatgctcaggaagcgcgtgaaccagtgcatcgtgatctcgggtgagagcggctccggcaagacccagagcaccaacttcctcatccactgcctcaccgccctcagccagaagggctacgccagcggcgtcgagaggaccatcctgggtgctggccctgtgctggaggtgagcggggaagctggtcggtctgtgggagggggcatttgtttggaaaatgcgggtttcaggccaagctcggtggcccacatctataatcccaatgctttggaaggctgagggaggaggattgcttgagcccaggagttcaagatcagcctgggcaacatagcaagatcttttctctac

SEQ ID NO: 370093 - DNA, 388 bp, Homo sapiens
aagaaggacgtggaagaggcagtctcggtgagtgcccccatttgcttcctcaagcccggccaggggaggccacatcctcactaccaatatccttggtgggcgacctggaacatccggagccgaggcatctgcaatcaagaggctgtttccccacaaggacaggcccaggaaacaggacaggctacgaaattcaacaggcccagggcagaatgaaaacataaggccccttattcaaaaacgacagattctggcatgtacctgtggtcccagctactcaggaggctgaggcagaaggattgcttgagcccaggaggtcaaggctgcagtgagctgtggtggcgccactgcactccaacctgggcaacagagcaagaccccatctccaaaa

SEQ ID NO: 370094 - DNA, 512 bp, Homo sapiens
aacctactggactccaagtccctgaaactcatcatcagcatgactctgcacgaccgcaccaccaagtccctactgcacctgcacaagaagaaaaagccaccaagcatcagcgcccagttccaggtaggtggagcaggagaggcagaaggtggcggtcagctcagcctcaggcttgtgtagcttcacccgacaccgagcacagcccgtctctagtaaaaatacaaaaattggccgggcgcggtggctcaagcctgtaatcccagcactttgggaggccgaggcgggcggatcacgaggtcaggagattgagaccatccttgctaacacggtgaaaccccacctctactaaaaatacaaaaattagccgggcgtagtggcgggtgcctgtagtcccagctactcgggaggctgaggcaagagaatggcatgaacccgggaggcggagcttgcagtgagccgagatggcgccactgcactccagcctgggcgacagagcaagactccatctcaaa

SEQ ID NO: 370095 - DNA, 563 bp, Homo sapiens
agaccgtgcgcatccggaggtcagggtacagcgccaagtacacgttacaggatttcaccgagcagttccaggtgctcctacccaaggatgcccagccctgcagggaggtcatctccaccctcctggagaaaatgaagatagacaagaggagccagcaccccttcggaaaaactttaccgcgatttgcataaccaaatgatcaagagcatcaaaggattgccctggcagggcgaggacccccgtagccttctccagtccctcagtcggctccagaaaccccgcgccttcatcctgaaaagtaaaggtatcaaacaaaagcagatcattccaaaggtaaaaaaaaaaacacaccccgcgcgacacgttccaagatatcttgcttctctgcccgtcttgagagctttcacttctgcaacttcatttcctcctccttcccactatctccccctccctccaagaaaaaaaaaatgttctcgtgttgagatgatttagagctgtctctttatgggtttcccagaagcagggtctgagatggggtatttgcacacacagcggcttatgga

SEQ ID NO: 370096 - DNA, 7620 bp, Homo sapiens
cggggcggagcggctcgagcagcggcgggctggcaggcggtcgtccggccggggacccggcccgggaccggcggcgcgcggcggccgaggccagctccaggacacgcgcgccccgagcctgggaggcatgctgaagccaggcggccggcaggatgagtgtgaaagaggcaggcagctcgggccgccgggagcaggcggcctaccacctgcacatctacccccagctgtccaccaccgagagccaggcctcgtgccgcgtgactgccaccaaggacagcaccacctcggacgtcatcaaggacgccattgccagcctgcggctggacggcaccaaatgttatgtgctggtggaggtcaaagagtcgggaggcgaggaatgggtgctggacgccaacgactcgcctgtgcaccgggtgctgctatggccccggcgggcacaggacgagcaccctcaggaggatggctactacttcctgctgcaggagcgcaacgcagatggaaccatcaagtacgtgcatatgcagctggtggcgcaggccacagccacccggcgcctagtggagcgtggcctcctgccacggcagcaggcggactttgatgacctgtgtaacctccccgagctaaccgagggcaacctcctgaagaacctcaagcaccgcttcctgcaacaaaagatctacacgtacgcggggagcatcctggtggccatcaacccctttaagttcctgcccatctacaaccccaagtacgtgaagatgtatgagaaccagcagctgggcaagctggagccacacgtcttcgcgctggccgacgtggcctactacaccatgctcaggaagcgcgtgaaccagtgcatcgtgatctcgggtgagagcggctccggcaagacccagagcaccaacttcctcatccactgcctcaccgccctcagccagaagggctacgccagcggcgtcgagaggaccatcctgggtgctggccctgtgctggaggcttttggaaatgccaagacagcccacaacaacaactccagccggtttgggaaattcatccaagtcagctacctagagagtggcatcgtgagaggagctgtcgtcgagaaatatctgcttgaaaagtctcgcctggtgtctcaggagaaggatgagaggaactaccatgtgttttattatttgttacttggggtcagcgaggaagagcgccaagaatttcagctcaagcagcctgaagattatttctacctcaaccagcataacttgaagattgaagatggggaggacctgaagcatgactttgagaggctcaagcaggccatggagatggtgggcttcctccccgccaccaagaagcagatttttgccgtcctctcggccatcctgtacctgggcaacgtcacttataagaagagagctacaggccgagaggaagggttggaggtcgggccacccgaggtgctggacaccctgtcgcagcttctgaaggtgaagcgagaaatcttggtggaggttctgaccaaaagaaaaacggtgaccgtcaacgacaagcttatccttccctacagcctcagcgaggccatcactgcccgcgactccatggccaagtctctgtacagcgccctgttcgactggattgtgctgcggatcaaccacgcactcctcaacaagaaggacgtggaagaggcagtctcgtgcctgtccattggggtcctggacatcttcgggtttgaagacttcgagaggaacagctttgagcagttctgcatcaactacgccaatgagcagctgcagtattacttcaaccagcacatcttcaagctggagcaggaggaatatcagggcgaggggatcacgtggcacaacatcggctacacagacaatgtcggctgcatccatctcatcagcaagaaacccacgggcctcttctacctgctggacgaggagagcaacttcccccacgccacgagccagaccctgctggccaagttcaaacagcaacatgaggacaataagtacttcctgggcaccccggtcatggagccagctttcatcatccagcacttcgcagggaaggtgaaatatcagatcaaggacttccgggagaagaacatggactacatgcggccagacatcgtggccctgctgcggggcagtgacagctcctacgtgcgggagctcatcggcatggaccccgtggccgtgttccgctgggccgtgctccgggctgctatccgggccatggcagtgcttcgggaggccggacgcctgcgggccgagagggccgaaaaggctgcaggtatgagcagccctggtgcccaaagtcacccagaagagctgccaagaggagccagcaccccttcggaaaaactttaccgcgatttgcataaccaaatgatcaagagcatcaaaggattgccctggcagggcgaggacccccgtagccttctccagtccctcagtcggctccagaaaccccgcgccttcatcctgaaaagtaaaggtatcaaacaaaagcagatcattccaaagaacctactggactccaagtccctgaaactcatcatcagcatgactctgcacgaccgcaccaccaagtccctactgcacctgcacaagaagaaaaagccaccaagcatcagcgcccagttccagacatcccttaacaagctcttggaggcactggggaaggcggagcccttctttatccgctgcatccgttccaatgctgaaaagaaagagctgtgctttgacgacgagctggtcctgcagcagctgcgctacaccggcatgctggagaccgtgcgcatccggaggtcagggtacagcgccaagtacacgttccaggatttcaccgagcagttccaggtgctcctgcccaaggatgcccagccctgcagggaggtcatctccaccctcctggagaaaatgaagatagacaagaggaactaccagatcgggaagaccaaggtcttcctgaaggagacggagcggcaagccctgcaggagacgctgcaccgggaggtggtgcggaaaatcctgctgctgcagagctggttccggatggtgctggagcgtcggcacttcctgcagatgaagcgggccgccgtcaccatccaggcctgctggcggtcctaccgggtccggagggcgctggagaggacgcaggctgccgtgtacctccaggcctcatggaggggctactggcagcggaagctctaccggcaccagaaacagagcatcatccgcctgcagagcctgtgtcgggggcacctgcagcgcaagagcttcagccagatgatctcggagaagcagaaggcagaagagaaggagagggaagccctggaagccgcaagagcaggtgctgaggagggcggacagggtcaggcggctggagggcagcaggtagctgagcaggggccggagccagcggaggatggcgggcacctggcatcggagcctgaggtgcagccaagtgacaggtcccccctagagcactcctcacctgagaaggaggccccaagcccagagaagactctcccaccccagaaaaccgtggcggctgaaagtcacgagaaagtccccagcagccgggagaagcgtgagtcgcgtcggcaaagagggctggagcacgtcaagttccagaacaaacacatccagtcctgcaaggaggagagtgccctcagagaaccttccagaagggtcacccaggagcaaggggtgagtctcctggaagacaaaaaggagagcagagaagatgaaacccttctagtcgtagagacggaggctgagaacacatctcaaaagcagcccacagagcaaccccaggccatggcagttggcaaggtctctgaagaaactgagaagacgctgcccagtgggagccccaggcctggccagttggagcggccgaccagcctggccctggacagcagggtcagcccaccggcccctggcagcgcccccgagacccccgaggacaagagcaaaccatgtggcagcccaagggttcaggaaaagcccgacagccccggaggctccacgcagatccagcggtacctggacgccgagcggctggccagcgccgtggaactgtggcggggcaagaagctggtggccgccgccagccctagtgccatgctcagccagtccctggacctcagcgacagacaccgggccacaggggccgccctcacgcccacagaggagaggcgcacctccttctccacgagcgacgtctccaagctcctcccgtccctggccaaggctcagcctgcagcagaaaccacggacggagagcgaagtgcgaaaaagccagctgtccagaagaagaagccaggcgacgcatcctccctcccagacgcagggctgtccccgggctctcaggtcgactctaaatccacgtttaagaggctttttctgcataaaaccaaggataaaaaatacagcctggagggcgcagaggagctggagaatgcagtgtccgggcacgtggtgctggaagccaccaccatgaagaagggcctggaagccccctccggacagcagcatcgccacgctgcaggtgagaagcgcaccaaggaaccaggaggcaaagggaagaagaaccgaaatgtcaagattgggaagatcacagtgtcagagaagtggcgggaatcggtgttccgccagatcaccaacgccaatgagctcaagtacctggacgagttcctgctcaacaagataaatgacctccgttcccagaagacgcccattgagagcttgtttatcgaagccaccgagaagttcaggagcaacatcaaaacgatgtactctgtcccgaacgggaagatccacgtgggctacaaggatctgatggagaactaccagatcgtcgtcagcaacctggccactgagcgtggccagaaggacaccaacctggtcctcaacctcttccagtcactgctagatgagttcacccgtggctacaccaagaacgacttcgagccagtgaagcagagcaaagctcagaagaagaagcggaagcaggagcgtgctgtccaggagcacaacgggcacgtgttcgccagctaccaggttagcatcccgcagtcgtgcgagcagtgcctctcctatatctggctcatggacaaggccctgctctgcagcgtgtgcaagatgacctgccacaagaagtgcgtgcacaagattcagagccactgctcctacacctacgggaggaagggcgagccaggcgctgagcctggccacttcggcgtgtgcgtagacagcctgaccagcgacaaggcctcggtgcccatcgtgctggagaagctcctggaacacgtggagatgcacggcctgtacaccgagggcctctaccgcaagtcgggtgctgccaaccgcactcgggagctccggcaggcgctgcagacagaccccgcagcagtcaagctggagaacttccccatccacgccatcacaggggtgctgaagcagtggctgcgggagctgcccgagcccctcatgaccttcgcacagtacggcgacttcctccgagccgtcgagctgccggagaagcaggagcagctggctgccatctatgccgtcctggagcaccttccagaagccaaccacaactccctggagagactcatcttccaccttgtcaaggtggccctgctcgaggatgtcaaccgcatgtcacctggggcgctggccattatcttcgcaccctgcctcctgcgctgccctgacaactcggacccgctgaccagcatgaaggacgtcctcaagatcaccacgtgcgtggagatgctgatcaaggagcagatgaggaaatacaaagtgaagatggaggagatcagccaactggaggctgcagagagtatcgccttccgcaggctttcgctcctgcgacaaaatgctccatggcctctcaaactggggttttcgtctccctatgagggggtcctgaacaagagccccaagacccgggacatccaggaggaggagctggaggtgctgctggaggaggaggcagccggcggcgatgaggaccgggaaaaggagattctcattgaacggatccagtccatcaaggaggagaaggaggacatcacctaccggctgccggagctggacccaaggggctcggacgaggagaacctggactcggagacgtcggccagcaccgagagcctgctggaggagcgggccgggcggggggcctcggaagggccccctgcgcctgctctcccttgccccggcgcgcccaccccgagccccctccccaccgtggccgcccctccacgacgaaggccgtcgtccttcgtaacggtcagagtgaagaccccccggcggacccccatcatgcccacggccaacatcaagctcccaccaggcctgccctcccacctgcctcgctgggcaccgggtgcccgggaggcggctgccccagtgcggcgccgggagccacctgcccgccgcccggaccagatacattccgtgtacatcacgcccggggcagacctgccagtgcagggcgccctggagcccctagaagaggatggccagccacctggggccaagcggaggtactcggatcccccaacgtactgcctgccccccgcctcgggccagaccaatggctgagagccacagctgacaaagtctgcatgtccgaggacggcccctgcactggagctgggcgccagagctgcagagctagtgttcggccctcagagaaggatccagaatcaaaagctcaagagtgacgtgaggtgggcaccggccccaagtgcagagtcaaggcagggagaggccggctggagccaggccccctcgcacgcagcccccaaatcatggacgcacctgtggggagcaccacatctccacctgcggcctcacatctccccactcccctttttgtacgtttaactgtttctttgtacgtggtttacgtaactttaaactgtaacagccttaatggaagaccaaatggttttttatatgtgtatgtacaaagttttctattaacgctgcccgtctcccttataacctggacgtgagctgtcagagcagaagccactaggccactgcgcgtctgaggctcagaccctgctgtggttggcttggggtggccaatgggctgggaccctccatgagagttttggacacttgggtcacctgacccgtgcctctctgacacatgtctccggggggcagccacctggccaatgtgcatttttgcacgtgctggaaccttccatgggggtctgggctattggctggagccaggacatgagtcaggggcaccatggacctcacgtgccagggagacttgaatgtggctgtcactcttccggacgccaagggctgcaggaggctgcttttggcactacccaccccgtgtgacagaataggagccagcgactcaggactgctcacgggtcaggagggcaacgcctgaagtcagacctccctataggtcaacagggacaacctggggatctctggagcagggccctcctctctcaggcttggcccactcccccagacacctggacacgtggccacaaatctgggacaaggggcccccgcacagcatgaaataaaaagtgcctgagaagtgtgtgcatgggacgcc

SEQ ID NO: 370097 - DNA, 7626 bp, Homo sapiens
cggggcggagcggctcgagcagcggcgggctggcaggcggtcgtccggccggggacccggcccgggaccggcggcgcgcggcggccgaggccagctccaggacacgcgcgccccgagcctgggaggcatgctgaagccaggcggccggcaggatgagtgtgaaagaggcaggcagctcgggccgccgggagcaggcggcctaccacctgcacatctacccccagctgtccaccaccgagagccaggcctcgtgccgcgtgactgccaccaaggacagcaccacctcggacgtcatcaaggacgccattgccagcctgcggctggacggcaccaaatgttatgtgctggtggaggtcaaagagtcgggaggcgaggaatgggtgctggacgccaacgactcgcctgtgcaccgggtgctgctatggccccggcgggcacaggacgagcaccctcaggaggatggctactacttcctgctgcaggagcgcaacgcagatggaaccatcaagtacgtgcatatgcagctggtggcgcaggccacagccacccggcgcctagtggagcgtggcctcctgccacggcagcaggcggactttgatgacctgtgtaacctccccgagctaaccgagggcaacctcctgaagaacctcaagcaccgcttcctgcaacaaaagatctacacgtacgcggggagcatcctggtggccatcaacccctttaagttcctgcccatctacaaccccaagtacgtgaagatgtatgagaaccagcagctgggcaagctggagccacacgtcttcgcgctggccgacgtggcctactacaccatgctcaggaagcgcgtgaaccagtgcatcgtgatctcgggtgagagcggctccggcaagacccagagcaccaacttcctcatccactgcctcaccgccctcagccagaagggctacgccagcggcgtcgagaggaccatcctgggtgctggccctgtgctggaggcttttggaaatgccaagacagcccacaacaacaactccagccggtttgggaaattcatccaagtcagctacctagagagtggcatcgtgagaggagctgtcgtcgagaaatatctgcttgaaaagtctcgcctggtgtctcaggagaaggatgagaggaactaccatgtgttttattatttgttacttggggtcagcgaggaagagcgccaagaatttcagctcaagcagcctgaagattatttctacctcaaccagcataacttgaagattgaagatggggaggacctgaagcatgactttgagaggctcaagcaggccatggagatggtgggcttcctccccgccaccaagaagcagatttttgccgtcctctcggccatcctgtacctgggcaacgtcacttataagaagagagctacaggccgagaggaagggttggaggtcgggccacccgaggtgctggacaccctgtcgcagcttctgaaggtgaagcgagaaatcttggtggaggttctgaccaaaagaaaaacggtgaccgtcaacgacaagcttatccttccctacagcctcagcgaggccatcactgcccgcgactccatggccaagtctctgtacagcgccctgttcgactggattgtgctgcggatcaaccacgcactcctcaacaagaaggacgtggaagaggcagtctcgtgcctgtccattggggtcctggacatcttcgggtttgaagacttcgagaggaacagctttgagcagttctgcatcaactacgccaatgagcagctgcagtattacttcaaccagcacatcttcaagctggagcaggaggaatatcagggcgaggggatcacgtggcacaacatcggctacacagacaatgtcggctgcatccatctcatcagcaagaaacccacgggcctcttctacctgctggacgaggagagcaacttcccccacgccacgagccagaccctgctggccaagttcaaacagcaacatgaggacaataagtacttcctgggcaccccggtcatggagccagctttcatcatccagcacttcgcagggaaggtgaaatatcagatcaaggacttccgggagaagaacatggactacatgcggccagacatcgtggccctgctgcggggcagtgacagctcctacgtgcgggagctcatcggcatggaccccgtggccgtgttccgctgggccgtgctccgggctgctatccgggccatggcagtgcttcgggaggccggacgcctgcgggccgagagggccgaaaaggctgcaggtatgagcagccctggtgcccaaagtcacccagaagagctgccaagaggagccagcaccccttcggaaaaactttaccggaaaagtaaaggtatcaaacaaaagcagatcattccaaagaacctactggactccaagtccctgaaactcatcatcagcatgactctgcacgaccgcaccaccaagtccctactgcacctgcacaagaagaaaaagccaccaagcatcagcgcccagttccagacatcccttaacaagctcttggaggcactggggaaggcggagcccttctttatccgctgcatccgttccaatgctgaaaagaaagagctgtgctttgacgacgagctggtcctgcagcagctgcgctacaccggcatgctggagaccgtgcgcatccggaggtcagggtacagcgccaagtacacgttccaggatttcaccgagcagttccaggtgctcctgcccaaggatgcccagccctgcagggaggtcatctccaccctcctggagaaaatgaagatagacaagaggaactaccagatcgggaagaccaaggtcttcctgaaggagacggagcggcaagccctgcaggagacgctgcaccgggaggtggtgcggaaaatcctgctgctgcagagctggttccggatggtgctggagcgtcggcacttcctgcagatgaagcgggccgccgtcaccatccaggcctgctggcggtcctaccgggtccggagggcgctggagaggacgcaggctgccgtgtacctccaggcctcatggaggggctactggcagcggaagctctaccggcaccagaaacagagcatcatccgcctgcagagcctgtgtcgggggcacctgcagcgcaagagcttcagccagatgatctcggagaagcagaaggcagaagagaaggagagggaagccctggaagccgcaagagcaggtgctgaggagggcggacagggtcaggcggctggagggcagcaggtagctgagcaggggccggagccagcggaggatggcgggcacctggcatcggagcctgaggtgcagccaagtgacaggtcccccctagagcactcctcacctgagaaggaggccccaagcccagagaagactctcccaccccagaaaaccgtggcggctgaaagtcacgagaaagtccccagcagccgggagaagcgtgagtcgcgtcggcaaagagggctggagcacgtcaagttccagaacaaacacatccagtcctgcaaggaggagagtgccctcagagaaccttccagaagggtcacccaggagcaaggggtgagtctcctggaagacaaaaaggagagcagagaagatgaaacccttctagtcgtagagacggaggctgagaacacatctcaaaagcagcccacagagcaaccccaggccatggcagttggcaaggtctctgaagaaactgagaagacgctgcccagtgggagccccaggcctggccagttggagcggccgaccagcctggccctggacagcagggtcagcccaccggcccctggcagcgcccccgagacccccgaggacaagagcaaaccatgtggcagcccaagggttcaggaaaagcccgacagccccggaggctccacgcagatccagcggtacctggacgccgagcggctggccagcgccgtggaactgtggcggggcaagaagctggtggccgccgccagccctagtgccatgctcagccagtccctggacctcagcgacagacaccgggccacaggggccgccctcacgcccacagaggagaggcgcacctccttctccacgagcgacgtctccaagctcctcccgtccctggccaaggctcagcctgcagcagaaaccacggacggagagcgaagtgcgaaaaagccagctgtccagaagaagaagccaggcgacgcatcctccctcccagacgcagggctgtccccgggctctcaggtcgactctaaatccacgtttaagaggctttttctgcataaaaccaaggataaaaaatacagcctggagggcgcagaggagctggagaatgcagtgtccgggcacgtggtgctggaagccaccaccatgaagaagggcctggaagccccctccggacagcagcatcgccacgctgcaggtgagaagcgcaccaaggaaccaggaggcaaagggaagaagaaccgaaatgtcaagattgggaagatcacagtgtcagagaagtggcgggaatcggtgttccgccagatcaccaacgccaatgagctcaagtacctggacgagttcctgctcaacaagataaatgacctccgttcccagaagacgcccattgagagcttgtttatcgaagccaccgagaagttcaggagcaacatcaaaacgatgtactctgtcccgaacgggaagatccacgtgggctacaaggatctgatggagaactaccagatcgtcgtcagcaacctggccactgagcgtggccagaaggacaccaacctggtcctcaacctcttccagtcactgctagatgagttcacccgtggctacaccaagaacgacttcgagccagtgaagcagagcaaagctcagaagaagaagcggaagcaggagcgtgctgtccaggagcacaacgggcacgtgttcgccagctaccaggttagcatcccgcagtcgtgcgagcagtgcctctcctatatctggctcatggacaaggccctgctctgcagcgtgtgcaagatgacctgccacaagaagtgcgtgcacaagattcagagccactgctcctacacctacgggaggaagggcgagccaggcgctgagcctggccacttcggcgtgtgcgtagacagcctgaccagcgacaaggcctcggtgcccatcgtgctggagaagctcctggaacacgtggagatgcacggcctgtacaccgagggcctctaccgcaagtcgggtgctgccaaccgcactcgggagctccggcaggcgctgcagacagaccccgcagcagtcaagctggagaacttccccatccacgccatcacaggggtgctgaagcagtggctgcgggagctgcccgagcccctcatgaccttcgcacagtacggcgacttcctccgagccgtcgagctgccggagaagcaggagcagctggctgccatctatgccgtcctggagcaccttccagaagccaaccacaactccctggagagactcatcttccaccttgtcaaggtggccctgctcgaggatgtcaaccgcatgtcacctggggcgctggccattatcttcgcaccctgcctcctgcgctgccctgacaactcggacccgctgaccagcatgaaggacgtcctcaagatcaccacgtgcgtggagatgctgatcaaggagcagatgaggaaatacaaagtgaagatggaggagatcagccaactggaggctgcagagagtatcgccttccgcaggctttcgctcctgcgacaaaatgctccatggcctctcaaactggggttttcgtctccctatgagggggtcctgaacaagagccccaagacccgggacatccaggaggaggagctggaggtgctgctggaggaggaggcagccggcggcgatgaggaccgggaaaaggagattctcattgaacggatccagtccatcaaggaggagaaggaggacatcacctaccggctgccggagctggacccaaggggctcggacgaggagaacctggactcggagacgtcggccagcaccgagagcctgctggaggagcgggccgggcggggggcctcggaaggtcagtattaaggtagcgtctgcttttctccttcccgtccatcccagcaggccccagggcgagggtcctccggctgccggccctgaagctgcagtaaccctgccatctgtctctcaaaagggccccctgcgcctgctctcccttgccccggcgcgcccaccccgagccccctccccaccgtggccgcccctccacgacgaaggccgtcgtccttcgtaacggtcagagtgaagaccccccggcggacccccatcatgcccacggccaacatcaagctcccaccaggcctgccctcccacctgcctcgctgggcaccgggtgcccgggaggcggctgccccagtgcggcgccgggagccacctgcccgccgcccggaccagatacattccgtgtacatcacgcccggggcagacctgccagtgcagggcgccctggagcccctagaagaggatggccagccacctggggccaagcggaggtactcggatcccccaacgtactgcctgccccccgcctcgggccagaccaatggctgagagccacagctgacaaagtctgcatgtccgaggacggcccctgcactggagctgggcgccagagctgcagagctagtgttcggccctcagagaaggatccagaatcaaaagctcaagagtgacgtgaggtgggcaccggccccaagtgcagagtcaaggcagggagaggccggctggagccaggccccctcgcacgcagcccccaaatcatggacgcacctgtggggagcaccacatctccacctgcggcctcacatctccccactcccctttttgtacgtttaactgtttctttgtacgtggtttacgtaactttaaactgtaacagccttaatggaagaccaaatggttttttatatgtgtatgtacaaagttttctattaacgctgcccgtctcccttataacctggacgtgagctgtcagagcagaagccactaggccactgcgcgtctgaggctcagaccctgctgtggttggcttggggtggccaatgggctgggaccctccatgagagttttggacacttgggtcacctgacccgtgcctctctgacacatgtctccggggggcagccacctggccaatgtgcatttttgcacgtgctggaaccttccatgggggtctgggctattggctggagccaggacatgagtcaggggcaccatggacctcacgtgccagggagacttgaatgtggctgtcactcttccggacgccaagggctgcaggaggctgcttttggcactacccaccccgtgtgacagaataggagccagcgactcaggactgctcacgggtcaggagggcaacgcctgaagtcagacctccctataggtcaacagggacaacctggggatctctggagcagggccctcctctctcaggcttggcccactcccccagacacctggacacgtggccacaaatctgggacaaggggcccccgcacagcatgaaataaaaagtgcctgagaagtgtgtgcatgggacgcc

SEQ ID NO: 370098 - DNA, 6600 bp, Homo sapiens
cgcttatgttgcatttttatttgagattatgaatattattagtaatatttgagatgttttgtttgtgtttagtctttgtatttttggttttatgttgtttttttttttggagggtgggcagcactcgctttattgtccagcattccacatggatagacgcaggacagcaggccatggagatggtgggcttcctccccgccaccaagaagcagatttttgccgtcctctcggccatcctgtacctgggcaacgtcacttataagaagagagctacaggccgagaggaagggttggaggtcgggccacccgaggtgctggacaccctgtcgcagcttctgaaggtgaagcgagaaatcttggtggaggttctgaccaaaagaaaaacggtgaccgtcaacgacaagcttatccttccctacagcctcagcgaggccatcactgcccgcgactccatggccaagtctctgtacagcgccctgttcgactggattgtgctgcggatcaaccacgcactcctcaacaagaaggacgtggaagaggcagtctcgtgcctgtccattggggtcctggacatcttcgggtttgaagacttcgagaggaacagctttgagcagttctgcatcaactacgccaatgagcagctgcagtattacttcaaccagcacatcttcaagctggagcaggaggaatatcagggcgaggggatcacgtggcacaacatcggctacacagacaatgtcggctgcatccatctcatcagcaagaaacccacgggcctcttctacctgctggacgaggagagcaacttcccccacgccacgagccagaccctgctggccaagttcaaacagcaacatgaggacaataagtacttcctgggcaccccggtcatggagccagctttcatcatccagcacttcgcagggaaggtgaaatatcagatcaaggacttccgggagaagaacatggactacatgcggccagacatcgtggccctgctgcggggcagtgacagctcctacgtgcgggagctcatcggcatggaccccgtggccgtgttccgctgggccgtgctccgggctgctatccgggccatggcagtgcttcgggaggccggacgcctgcgggccgagagggccgaaaaggctgcaggtatgagcagccctggtgcccaaagtcacccagaagagctgccaagaggagccagcaccccttcggaaaaactttaccgcgatttgcataaccaaatgatcaagagcatcaaaggattgccctggcagggcgaggacccccgtagccttctccagtccctcagtcggctccagaaaccccgcgccttcatcctgaaaagtaaaggtatcaaacaaaagcagatcattccaaagaacctactggactccaagtccctgaaactcatcatcagcatgactctgcacgaccgcaccaccaagtccctactgcacctgcacaagaagaaaaagccaccaagcatcagcgcccagttccagacatcccttaacaagctcttggaggcactggggaaggcggagcccttctttatccgctgcatccgttccaatgctgaaaagaaagagctgtgctttgacgacgagctggtcctgcagcagctgcgctacaccggcatgctggagaccgtgcgcatccggaggtcagggtacagcgccaagtacacgttccaggatttcaccgagcagttccaggtgctcctgcccaaggatgcccagccctgcagggaggtcatctccaccctcctggagaaaatgaagatagacaagaggaactaccagatcgggaagaccaaggtcttcctgaaggagacggagcggcaagccctgcaggagacgctgcaccgggaggtggtgcggaaaatcctgctgctgcagagctggttccggatggtgctggagcgtcggcacttcctgcagatgaagcgggccgccgtcaccatccaggcctgctggcggtcctaccgggtccggagggcgctggagaggacgcaggctgccgtgtacctccaggcctcatggaggggctactggcagcggaagctctaccggcaccagaaacagagcatcatccgcctgcagagcctgtgtcgggggcacctgcagcgcaagagcttcagccagatgatctcggagaagcagaaggcagaagagaaggagagggaagccctggaagccgcaagagcaggtgctgaggagggcggacagggtcaggcggctggagggcagcaggtagctgagcaggggccggagccagcggaggatggcgggcacctggcatcggagcctgaggtgcagccaagtgacaggtcccccctagagcactcctcacctgagaaggaggccccaagcccagagaagactctcccaccccagaaaaccgtggcggctgaaagtcacgagaaagtccccagcagccgggagaagcgtgagtcgcgtcggcaaagagggctggagcacgtcaagttccagaacaaacacatccagtcctgcaaggaggagagtgccctcagagaaccttccagaagggtcacccaggagcaaggggtgagtctcctggaagacaaaaaggagagcagagaagatgaaacccttctagtcgtagagacggaggctgagaacacatctcaaaagcagcccacagagcaaccccaggccatggcagttggcaaggtctctgaagaaactgagaagacgctgcccagtgggagccccaggcctggccagttggagcggccgaccagcctggccctggacagcagggtcagcccaccggcccctggcagcgcccccgagacccccgaggacaagagcaaaccatgtggcagcccaagggttcaggaaaagcccgacagccccggaggctccacgcagatccagcggtacctggacgccgagcggctggccagcgccgtggaactgtggcggggcaagaagctggtggccgccgccagccctagtgccatgctcagccagtccctggacctcagcgacagacaccgggccacaggggccgccctcacgcccacagaggagaggcgcacctccttctccacgagcgacgtctccaagctcctcccgtccctggccaaggctcagcctgcagcagaaaccacggacggagagcgaagtgcgaaaaagccagctgtccagaagaagaagccaggcgacgcatcctccctcccagacgcagggctgtccccgggctctcaggtcgactctaaatccacgtttaagaggctttttctgcataaaaccaaggataaaaaatacagcctggagggcgcagaggagctggagaatgcagtgtccgggcacgtggtgctggaagccaccaccatgaagaagggcctggaagccccctccggacagcagcatcgccacgctgcaggtgagaagcgcaccaaggaaccaggaggcaaagggaagaagaaccgaaatgtcaagattgggaagatcacagtgtcagagaagtggcgggaatcggtgttccgccagatcaccaacgccaatgagctcaagtacctggacgagttcctgctcaacaagataaatgacctccgttcccagaagacgcccattgagagcttgtttatcgaagccaccgagaagttcaggagcaacatcaaaacgatgtactctgtcccgaacgggaagatccacgtgggctacaaggatctgatggagaactaccagatcgtcgtcagcaacctggccactgagcgtggccagaaggacaccaacctggtcctcaacctcttccagtcactgctagatgagttcacccgtggctacaccaagaacgacttcgagccagtgaagcagagcaaagctcagaagaagaagcggaagcaggagcgtgctgtccaggagcacaacgggcacgtgttcgccagctaccaggttagcatcccgcagtcgtgcgagcagtgcctctcctatatctggctcatggacaaggccctgctctgcagcgtgtgcaagatgacctgccacaagaagtgcgtgcacaagattcagagccactgctcctacacctacgggaggaagggcgagccaggcgctgagcctggccacttcggcgtgtgcgtagacagcctgaccagcgacaaggcctcggtgcccatcgtgctggagaagctcctggaacacgtggagatgcacggcctgtacaccgagggcctctaccgcaagtcgggtgctgccaaccgcactcgggagctccggcaggcgctgcagacagaccccgcagcagtcaagctggagaacttccccatccacgccatcacaggggtgctgaagcagtggctgcgggagctgcccgagcccctcatgaccttcgcacagtacggcgacttcctccgagccgtcgagctgccggagaagcaggagcagctggctgccatctatgccgtcctggagcaccttccagaagccaaccacaactccctggagagactcatcttccaccttgtcaaggtggccctgctcgaggatgtcaaccgcatgtcacctggggcgctggccattatcttcgcaccctgcctcctgcgctgccctgacaactcggacccgctgaccagcatgaaggacgtcctcaagatcaccacgtgcgtggagatgctgatcaaggagcagatgaggaaatacaaagtgaagatggaggagatcagccaactggaggctgcagagagtatcgccttccgcaggctttcgctcctgcgacaaaatgctccatggcctctcaaactggggttttcgtctccctatgagggggtcctgaacaagagccccaagacccgggacatccaggaggaggagctggaggtgctgctggaggaggaggcagccggcggcgatgaggaccgggaaaaggagattctcattgaacggatccagtccatcaaggaggagaaggaggacatcacctaccggctgccggagctggacccaaggggctcggacgaggagaacctggactcggagacgtcggccagcaccgagagcctgctggaggagcgggccgggcggggggcctcggaaggtcagtattaaggtagcgtctgcttttctccttcccgtccatcccagcaggccccagggcgagggtcctccggctgccggccctgaagctgcagtaaccctgccatctgtctctcaaaagggccccctgcgcctgctctcccttgccccggcgcgcccaccccgagccccctccccaccgtggccgcccctccacgacgaaggccgtcgtccttcgtaacggtcagagtgaagaccccccggcggacccccatcatgcccacggccaacatcaagctcccaccaggcctgccctcccacctgcctcgctgggcaccgggtgcccgggaggcggctgccccagtgcggcgccgggagccacctgcccgccgcccggaccagatacattccgtgtacatcacgcccggggcagacctgccagtgcagggcgccctggagcccctagaagaggatggccagccacctggggccaagcggaggtactcggatcccccaacgtactgcctgccccccgcctcgggccagaccaatggctgagagccacagctgacaaagtctgcatgtccgaggacggcccctgcactggagctgggcgccagagctgcagagctagtgttcggccctcagagaaggatccagaatcaaaagctcaagagtgacgtgaggtgggcaccggccccaagtgcagagtcaaggcagggagaggccggctggagccaggccccctcgcacgcagcccccaaatcatggacgcacctgtggggagcaccacatctccacctgcggcctcacatctccccactcccctttttgtacgtttaactgtttctttgtacgtggtttacgtaactttaaactgtaacagccttaatggaagaccaaatggttttttatatgtgtatgtacaaagttttctattaacgctgcccgtctcccttataacctggacgtgagctgtcagagcagaagccactaggccactgcgcgtctgaggctcagaccctgctgtggttggcttggggtggccaatgggctgggaccctccatgagagttttggacacttgggtcacctgacccgtgcctctctgacacatgtctccggggggcagccacctggccaatgtgcatttttgcacgtgctggaaccttccatgggggtctgggctattggctggagccaggacatgagtcaggggcaccatggacctcacgtgccagggagacttgaatgtggctgtcactcttccggacgccaagggctgcaggaggctgcttttggcactacccaccccgtgtgacagaataggagccagcgactcaggactgctcacgggtcaggagggcaacgcctgaagtcagacctccctataggtcaacagggacaacctggggatctctggagcagggccctcctctctcaggcttggcccactcccccagacacctggacacgtggccacaaatctgggacaaggggcccccgcacagcatgaaataaaaagtgcctgagaagtgtgtgcatgggacgcc

SEQ ID NO: 370099 - DNA, 6475 bp, Homo sapiens
ctgtaatcccaacactttgggaggccgaggcgggtggatcacctgaggtcaagagttcgagaccagcctggccaacatggtgaaaccccatctctactaaaaatacaaaatttagctgggcatggtggcaggtgcctgtaatcccagctatcaggaggctgaggcagaaggattgcttgagcccaggaggtcaaggctgcagtgagctgtggtggcgccactgcactccaacctgggcaacagagcaagaccccatctccaaaaaaaattatggattccatgctggtaatggcaaagtgttctgccgagcaacagggactggggacctaacaggtcacagcctgtagagccaacccctctcatgaaggctggctccctcggggtgcacctgcgggcagtgaccattttctctgtctctcccagtgcctgtccattggggtcctggacatcttcgggtttgaagacttcgagaggaacagctttgagcagttctgcatcaactacgccaatgagcagctgcagtattacttcaaccagcacatcttcaagctggagcaggaggaatatcagggcgaggggatcacgtggcacaacatcggctacacagacaatgtcggctgcatccatctcatcagcaagaaacccacgggcctcttctacctgctggacgaggagagcaacttcccccacgccacgagccagaccctgctggccaagttcaaacagcaacatgaggacaataagtacttcctgggcaccccggtcatggagccagctttcatcatccagcacttcgcagggaaggtgaaatatcagatcaaggacttccgggagaagaacatggactacatgcggccagacatcgtggccctgctgcggggcagtgacagctcctacgtgcgggagctcatcggcatggaccccgtggccgtgttccgctgggccgtgctccgggctgctatccgggccatggcagtgcttcgggaggccggacgcctgcgggccgagagggccgaaaaggctgcaggtatgagcagccctggtgcccaaagtcacccagaagagctgccaagaggagccagcaccccttcggaaaaactttaccgcgatttgcataaccaaatgatcaagagcatcaaaggattgccctggcagggcgaggacccccgtagccttctccagtccctcagtcggctccagaaaccccgcgccttcatcctgaaaagtaaaggtatcaaacaaaagcagatcattccaaagaacctactggactccaagtccctgaaactcatcatcagcatgactctgcacgaccgcaccaccaagtccctactgcacctgcacaagaagaaaaagccaccaagcatcagcgcccagttccagacatcccttaacaagctcttggaggcactggggaaggcggagcccttctttatccgctgcatccgttccaatgctgaaaagaaagagctgtgctttgacgacgagctggtcctgcagcagctgcgctacaccggcatgctggagaccgtgcgcatccggaggtcagggtacagcgccaagtacacgttccaggatttcaccgagcagttccaggtgctcctgcccaaggatgcccagccctgcagggaggtcatctccaccctcctggagaaaatgaagatagacaagaggaactaccagatcgggaagaccaaggtcttcctgaaggagacggagcggcaagccctgcaggagacgctgcaccgggaggtggtgcggaaaatcctgctgctgcagagctggttccggatggtgctggagcgtcggcacttcctgcagatgaagcgggccgccgtcaccatccaggcctgctggcggtcctaccgggtccggagggcgctggagaggacgcaggctgccgtgtacctccaggcctcatggaggggctactggcagcggaagctctaccggcaccagaaacagagcatcatccgcctgcagagcctgtgtcgggggcacctgcagcgcaagagcttcagccagatgatctcggagaagcagaaggcagaagagaaggagagggaagccctggaagccgcaagagcaggtgctgaggagggcggacagggtcaggcggctggagggcagcaggtagctgagcaggggccggagccagcggaggatggcgggcacctggcatcggagcctgaggtgcagccaagtgacaggtcccccctagagcactcctcacctgagaaggaggccccaagcccagagaagactctcccaccccagaaaaccgtggcggctgaaagtcacgagaaagtccccagcagccgggagaagcgtgagtcgcgtcggcaaagagggctggagcacgtcaagttccagaacaaacacatccagtcctgcaaggaggagagtgccctcagagaaccttccagaagggtcacccaggagcaaggggtgagtctcctggaagacaaaaaggagagcagagaagatgaaacccttctagtcgtagagacggaggctgagaacacatctcaaaagcagcccacagagcaaccccaggccatggcagttggcaaggtctctgaagaaactgagaagacgctgcccagtgggagccccaggcctggccagttggagcggccgaccagcctggccctggacagcagggtcagcccaccggcccctggcagcgcccccgagacccccgaggacaagagcaaaccatgtggcagcccaagggttcaggaaaagcccgacagccccggaggctccacgcagatccagcggtacctggacgccgagcggctggccagcgccgtggaactgtggcggggcaagaagctggtggccgccgccagccctagtgccatgctcagccagtccctggacctcagcgacagacaccgggccacaggggccgccctcacgcccacagaggagaggcgcacctccttctccacgagcgacgtctccaagctcctcccgtccctggccaaggctcagcctgcagcagaaaccacggacggagagcgaagtgcgaaaaagccagctgtccagaagaagaagccaggcgacgcatcctccctcccagacgcagggctgtccccgggctctcaggtcgactctaaatccacgtttaagaggctttttctgcataaaaccaaggataaaaaatacagcctggagggcgcagaggagctggagaatgcagtgtccgggcacgtggtgctggaagccaccaccatgaagaagggcctggaagccccctccggacagcagcatcgccacgctgcaggtgagaagcgcaccaaggaaccaggaggcaaagggaagaagaaccgaaatgtcaagattgggaagatcacagtgtcagagaagtggcgggaatcggtgttccgccagatcaccaacgccaatgagctcaagtacctggacgagttcctgctcaacaagataaatgacctccgttcccagaagacgcccattgagagcttgtttatcgaagccaccgagaagttcaggagcaacatcaaaacgatgtactctgtcccgaacgggaagatccacgtgggctacaaggatctgatggagaactaccagatcgtcgtcagcaacctggccactgagcgtggccagaaggacaccaacctggtcctcaacctcttccagtcactgctagatgagttcacccgtggctacaccaagaacgacttcgagccagtgaagcagagcaaagctcagaagaagaagcggaagcaggagcgtgctgtccaggagcacaacgggcacgtgttcgccagctaccaggttagcatcccgcagtcgtgcgagcagtgcctctcctatatctggctcatggacaaggccctgctctgcagcgtgtgcaagatgacctgccacaagaagtgcgtgcacaagattcagagccactgctcctacacctacgggaggaagggcgagccaggcgctgagcctggccacttcggcgtgtgcgtagacagcctgaccagcgacaaggcctcggtgcccatcgtgctggagaagctcctggaacacgtggagatgcacggcctgtacaccgagggcctctaccgcaagtcgggtgctgccaaccgcactcgggagctccggcaggcgctgcagacagaccccgcagcagtcaagctggagaacttccccatccacgccatcacaggggtgctgaagcagtggctgcgggagctgcccgagcccctcatgaccttcgcacagtacggcgacttcctccgagccgtcgagctgccggagaagcaggagcagctggctgccatctatgccgtcctggagcaccttccagaagccaaccacaactccctggagagactcatcttccaccttgtcaaggtggccctgctcgaggatgtcaaccgcatgtcacctggggcgctggccattatcttcgcaccctgcctcctgcgctgccctgacaactcggacccgctgaccagcatgaaggacgtcctcaagatcaccacgtgcgtggagatgctgatcaaggagcagatgaggaaatacaaagtgaagatggaggagatcagccaactggaggctgcagagagtatcgccttccgcaggctttcgctcctgcgacaaaatgctccatggcctctcaaactggggttttcgtctccctatgagggggtcctgaacaagagccccaagacccgggacatccaggaggaggagctggaggtgctgctggaggaggaggcagccggcggcgatgaggaccgggaaaaggagattctcattgaacggatccagtccatcaaggaggagaaggaggacatcacctaccggctgccggagctggacccaaggggctcggacgaggagaacctggactcggagacgtcggccagcaccgagagcctgctggaggagcgggccgggcggggggcctcggaaggtcagtattaaggtagcgtctgcttttctccttcccgtccatcccagcaggccccagggcgagggtcctccggctgccggccctgaagctgcagtaaccctgccatctgtctctcaaaagggccccctgcgcctgctctcccttgccccggcgcgcccaccccgagccccctccccaccgtggccgcccctccacgacgaaggccgtcgtccttcgtaacggtcagagtgaagaccccccggcggacccccatcatgcccacggccaacatcaagctcccaccaggcctgccctcccacctgcctcgctgggcaccgggtgcccgggaggcggctgccccagtgcggcgccgggagccacctgcccgccgcccggaccagatacattccgtgtacatcacgcccggggcagacctgccagtgcagggcgccctggagcccctagaagaggatggccagccacctggggccaagcggaggtactcggatcccccaacgtactgcctgccccccgcctcgggccagaccaatggctgagagccacagctgacaaagtctgcatgtccgaggacggcccctgcactggagctgggcgccagagctgcagagctagtgttcggccctcagagaaggatccagaatcaaaagctcaagagtgacgtgaggtgggcaccggccccaagtgcagagtcaaggcagggagaggccggctggagccaggccccctcgcacgcagcccccaaatcatggacgcacctgtggggagcaccacatctccacctgcggcctcacatctccccactcccctttttgtacgtttaactgtttctttgtacgtggtttacgtaactttaaactgtaacagccttaatggaagaccaaatggttttttatatgtgtatgtacaaagttttctattaacgctgcccgtctcccttataacctggacgtgagctgtcagagcagaagccactaggccactgcgcgtctgaggctcagaccctgctgtggttggcttggggtggccaatgggctgggaccctccatgagagttttggacacttgggtcacctgacccgtgcctctctgacacatgtctccggggggcagccacctggccaatgtgcatttttgcacgtgctggaaccttccatgggggtctgggctattggctggagccaggacatgagtcaggggcaccatggacctcacgtgccagggagacttgaatgtggctgtcactcttccggacgccaagggctgcaggaggctgcttttggcactacccaccccgtgtgacagaataggagccagcgactcaggactgctcacgggtcaggagggcaacgcctgaagtcagacctccctataggtcaacagggacaacctggggatctctggagcagggccctcctctctcaggcttggcccactcccccagacacctggacacgtggccacaaatctgggacaaggggcccccgcacagcatgaaataaaaagtgcctgagaagtgtgtgcatgggacgcc

SEQ ID NO: 370100 - DNA, 5534 bp, Homo sapiens
gcagaggagagggacggccaggttcagtagcactggcttcctctctaacccagaggaagaggaaatggggcagccactcaggctgtgaaagaggctgtcatcagccctcccggaaccagcgctgtgtgcaaggtgcaaacccacctcattccactgggcccacatcaatagtgtggtcctgagaccaaacctaagagctgctgcccgggcactcgctgcggggacgctgttctgccctggcttcggggacacctgtgatgcctccccgtgcccgtgtgggctgtgggagggcaggccggaccccatgtgtctgtcctagaacctactggactccaagtccctgaaactcatcatcagcatgactctgcacgaccgcaccaccaagtccctactgcacctgcacaagaagaaaaagccaccaagcatcagcgcccagttccagacatcccttaacaagctcttggaggcactggggaaggcggagcccttctttatccgctgcatccgttccaatgctgaaaagaaagagctgtgctttgacgacgagctggtcctgcagcagctgcgctacaccggcatgctggagaccgtgcgcatccggaggtcagggtacagcgccaagtacacgttccaggatttcaccgagcagttccaggtgctcctgcccaaggatgcccagccctgcagggaggtcatctccaccctcctggagaaaatgaagatagacaagaggaactaccagatcgggaagaccaaggtcttcctgaaggagacggagcggcaagccctgcaggagacgctgcaccgggaggtggtgcggaaaatcctgctgctgcagagctggttccggatggtgctggagcgtcggcacttcctgcagatgaagcgggccgccgtcaccatccaggcctgctggcggtcctaccgggtccggagggcgctggagaggacgcaggctgccgtgtacctccaggcctcatggaggggctactggcagcggaagctctaccggcaccagaaacagagcatcatccgcctgcagagcctgtgtcgggggcacctgcagcgcaagagcttcagccagatgatctcggagaagcagaaggcagaagagaaggagagggaagccctggaagccgcaagagcaggtgctgaggagggcggacagggtcaggcggctggagggcagcaggtagctgagcaggggccggagccagcggaggatggcgggcacctggcatcggagcctgaggtgcagccaagtgacaggtcccccctagagcactcctcacctgagaaggaggccccaagcccagagaagactctcccaccccagaaaaccgtggcggctgaaagtcacgagaaagtccccagcagccgggagaagcgtgagtcgcgtcggcaaagagggctggagcacgtcaagttccagaacaaacacatccagtcctgcaaggaggagagtgccctcagagaaccttccagaagggtcacccaggagcaaggggtgagtctcctggaagacaaaaaggagagcagagaagatgaaacccttctagtcgtagagacggaggctgagaacacatctcaaaagcagcccacagagcaaccccaggccatggcagttggcaaggtctctgaagaaactgagaagacgctgcccagtgggagccccaggcctggccagttggagcggccgaccagcctggccctggacagcagggtcagcccaccggcccctggcagcgcccccgagacccccgaggacaagagcaaaccatgtggcagcccaagggttcaggaaaagcccgacagccccggaggctccacgcagatccagcggtacctggacgccgagcggctggccagcgccgtggaactgtggcggggcaagaagctggtggccgccgccagccctagtgccatgctcagccagtccctggacctcagcgacagacaccgggccacaggggccgccctcacgcccacagaggagaggcgcacctccttctccacgagcgacgtctccaagctcctcccgtccctggccaaggctcagcctgcagcagaaaccacggacggagagcgaagtgcgaaaaagccagctgtccagaagaagaagccaggcgacgcatcctccctcccagacgcagggctgtccccgggctctcaggtcgactctaaatccacgtttaagaggctttttctgcataaaaccaaggataaaaaatacagcctggagggcgcagaggagctggagaatgcagtgtccgggcacgtggtgctggaagccaccaccatgaagaagggcctggaagccccctccggacagcagcatcgccacgctgcaggtgagaagcgcaccaaggaaccaggaggcaaagggaagaagaaccgaaatgtcaagattgggaagatcacagtgtcagagaagtggcgggaatcggtgttccgccagatcaccaacgccaatgagctcaagtacctggacgagttcctgctcaacaagataaatgacctccgttcccagaagacgcccattgagagcttgtttatcgaagccaccgagaagttcaggagcaacatcaaaacgatgtactctgtcccgaacgggaagatccacgtgggctacaaggatctgatggagaactaccagatcgtcgtcagcaacctggccactgagcgtggccagaaggacaccaacctggtcctcaacctcttccagtcactgctagatgagttcacccgtggctacaccaagaacgacttcgagccagtgaagcagagcaaagctcagaagaagaagcggaagcaggagcgtgctgtccaggagcacaacgggcacgtgttcgccagctaccaggttagcatcccgcagtcgtgcgagcagtgcctctcctatatctggctcatggacaaggccctgctctgcagcgtgtgcaagatgacctgccacaagaagtgcgtgcacaagattcagagccactgctcctacacctacgggaggaagggcgagccaggcgctgagcctggccacttcggcgtgtgcgtagacagcctgaccagcgacaaggcctcggtgcccatcgtgctggagaagctcctggaacacgtggagatgcacggcctgtacaccgagggcctctaccgcaagtcgggtgctgccaaccgcactcgggagctccggcaggcgctgcagacagaccccgcagcagtcaagctggagaacttccccatccacgccatcacaggggtgctgaagcagtggctgcgggagctgcccgagcccctcatgaccttcgcacagtacggcgacttcctccgagccgtcgagctgccggagaagcaggagcagctggctgccatctatgccgtcctggagcaccttccagaagccaaccacaactccctggagagactcatcttccaccttgtcaaggtggccctgctcgaggatgtcaaccgcatgtcacctggggcgctggccattatcttcgcaccctgcctcctgcgctgccctgacaactcggacccgctgaccagcatgaaggacgtcctcaagatcaccacgtgcgtggagatgctgatcaaggagcagatgaggaaatacaaagtgaagatggaggagatcagccaactggaggctgcagagagtatcgccttccgcaggctttcgctcctgcgacaaaatgctccatggcctctcaaactggggttttcgtctccctatgagggggtcctgaacaagagccccaagacccgggacatccaggaggaggagctggaggtgctgctggaggaggaggcagccggcggcgatgaggaccgggaaaaggagattctcattgaacggatccagtccatcaaggaggagaaggaggacatcacctaccggctgccggagctggacccaaggggctcggacgaggagaacctggactcggagacgtcggccagcaccgagagcctgctggaggagcgggccgggcggggggcctcggaaggtcagtattaaggtagcgtctgcttttctccttcccgtccatcccagcaggccccagggcgagggtcctccggctgccggccctgaagctgcagtaaccctgccatctgtctctcaaaagggccccctgcgcctgctctcccttgccccggcgcgcccaccccgagccccctccccaccgtggccgcccctccacgacgaaggccgtcgtccttcgtaacggtcagagtgaagaccccccggcggacccccatcatgcccacggccaacatcaagctcccaccaggcctgccctcccacctgcctcgctgggcaccgggtgcccgggaggcggctgccccagtgcggcgccgggagccacctgcccgccgcccggaccagatacattccgtgtacatcacgcccggggcagacctgccagtgcagggcgccctggagcccctagaagaggatggccagccacctggggccaagcggaggtactcggatcccccaacgtactgcctgccccccgcctcgggccagaccaatggctgagagccacagctgacaaagtctgcatgtccgaggacggcccctgcactggagctgggcgccagagctgcagagctagtgttcggccctcagagaaggatccagaatcaaaagctcaagagtgacgtgaggtgggcaccggccccaagtgcagagtcaaggcagggagaggccggctggagccaggccccctcgcacgcagcccccaaatcatggacgcacctgtggggagcaccacatctccacctgcggcctcacatctccccactcccctttttgtacgtttaactgtttctttgtacgtggtttacgtaactttaaactgtaacagccttaatggaagaccaaatggttttttatatgtgtatgtacaaagttttctattaacgctgcccgtctcccttataacctggacgtgagctgtcagagcagaagccactaggccactgcgcgtctgaggctcagaccctgctgtggttggcttggggtggccaatgggctgggaccctccatgagagttttggacacttgggtcacctgacccgtgcctctctgacacatgtctccggggggcagccacctggccaatgtgcatttttgcacgtgctggaaccttccatgggggtctgggctattggctggagccaggacatgagtcaggggcaccatggacctcacgtgccagggagacttgaatgtggctgtcactcttccggacgccaagggctgcaggaggctgcttttggcactacccaccccgtgtgacagaataggagccagcgactcaggactgctcacgggtcaggagggcaacgcctgaagtcagacctccctataggtcaacagggacaacctggggatctctggagcagggccctcctctctcaggcttggcccactcccccagacacctggacacgtggccacaaatctgggacaaggggcccccgcacagcatgaaataaaaagtgcctgagaagtgtgtgcatgggacgcc

SEQ ID NO: 370101 - DNA, 5354 bp, Homo sapiens
tccactagtgtaggcccgccaggcgtggcttgctgaactaacccaaatcccgacactgtgttccttttgttcacaaaaccatttttaatattttgacaggaaaagtaaaggtatcaaacaaaagcagatcattccaaagaacctactggactccaagtccctgaaactcatcatcagcatgactctgcacgaccgcaccaccaagtccctactgcacctgcacaagaagaaaaagccaccaagcatcagcgcccagttccagacatcccttaacaagctcttggaggcactggggaaggcggagcccttctttatccgctgcatccgttccaatgctgaaaagaaagagctgtgctttgacgacgagctggtcctgcagcagctgcgctacaccggcatgctggagaccgtgcgcatccggaggtcagggtacagcgccaagtacacgttccaggatttcaccgagcagttccaggtgctcctgcccaaggatgcccagccctgcagggaggtcatctccaccctcctggagaaaatgaagatagacaagaggaactaccagatcgggaagaccaaggtcttcctgaaggagacggagcggcaagccctgcaggagacgctgcaccgggaggtggtgcggaaaatcctgctgctgcagagctggttccggatggtgctggagcgtcggcacttcctgcagatgaagcgggccgccgtcaccatccaggcctgctggcggtcctaccgggtccggagggcgctggagaggacgcaggctgccgtgtacctccaggcctcatggaggggctactggcagcggaagctctaccggcaccagaaacagagcatcatccgcctgcagagcctgtgtcgggggcacctgcagcgcaagagcttcagccagatgatctcggagaagcagaaggcagaagagaaggagagggaagccctggaagccgcaagagcaggtgctgaggagggcggacagggtcaggcggctggagggcagcaggtagctgagcaggggccggagccagcggaggatggcgggcacctggcatcggagcctgaggtgcagccaagtgacaggtcccccctagagcactcctcacctgagaaggaggccccaagcccagagaagactctcccaccccagaaaaccgtggcggctgaaagtcacgagaaagtccccagcagccgggagaagcgtgagtcgcgtcggcaaagagggctggagcacgtcaagttccagaacaaacacatccagtcctgcaaggaggagagtgccctcagagaaccttccagaagggtcacccaggagcaaggggtgagtctcctggaagacaaaaaggagagcagagaagatgaaacccttctagtcgtagagacggaggctgagaacacatctcaaaagcagcccacagagcaaccccaggccatggcagttggcaaggtctctgaagaaactgagaagacgctgcccagtgggagccccaggcctggccagttggagcggccgaccagcctggccctggacagcagggtcagcccaccggcccctggcagcgcccccgagacccccgaggacaagagcaaaccatgtggcagcccaagggttcaggaaaagcccgacagccccggaggctccacgcagatccagcggtacctggacgccgagcggctggccagcgccgtggaactgtggcggggcaagaagctggtggccgccgccagccctagtgccatgctcagccagtccctggacctcagcgacagacaccgggccacaggggccgccctcacgcccacagaggagaggcgcacctccttctccacgagcgacgtctccaagctcctcccgtccctggccaaggctcagcctgcagcagaaaccacggacggagagcgaagtgcgaaaaagccagctgtccagaagaagaagccaggcgacgcatcctccctcccagacgcagggctgtccccgggctctcaggtcgactctaaatccacgtttaagaggctttttctgcataaaaccaaggataaaaaatacagcctggagggcgcagaggagctggagaatgcagtgtccgggcacgtggtgctggaagccaccaccatgaagaagggcctggaagccccctccggacagcagcatcgccacgctgcaggtgagaagcgcaccaaggaaccaggaggcaaagggaagaagaaccgaaatgtcaagattgggaagatcacagtgtcagagaagtggcgggaatcggtgttccgccagatcaccaacgccaatgagctcaagtacctggacgagttcctgctcaacaagataaatgacctccgttcccagaagacgcccattgagagcttgtttatcgaagccaccgagaagttcaggagcaacatcaaaacgatgtactctgtcccgaacgggaagatccacgtgggctacaaggatctgatggagaactaccagatcgtcgtcagcaacctggccactgagcgtggccagaaggacaccaacctggtcctcaacctcttccagtcactgctagatgagttcacccgtggctacaccaagaacgacttcgagccagtgaagcagagcaaagctcagaagaagaagcggaagcaggagcgtgctgtccaggagcacaacgggcacgtgttcgccagctaccaggttagcatcccgcagtcgtgcgagcagtgcctctcctatatctggctcatggacaaggccctgctctgcagcgtgtgcaagatgacctgccacaagaagtgcgtgcacaagattcagagccactgctcctacacctacgggaggaagggcgagccaggcgctgagcctggccacttcggcgtgtgcgtagacagcctgaccagcgacaaggcctcggtgcccatcgtgctggagaagctcctggaacacgtggagatgcacggcctgtacaccgagggcctctaccgcaagtcgggtgctgccaaccgcactcgggagctccggcaggcgctgcagacagaccccgcagcagtcaagctggagaacttccccatccacgccatcacaggggtgctgaagcagtggctgcgggagctgcccgagcccctcatgaccttcgcacagtacggcgacttcctccgagccgtcgagctgccggagaagcaggagcagctggctgccatctatgccgtcctggagcaccttccagaagccaaccacaactccctggagagactcatcttccaccttgtcaaggtggccctgctcgaggatgtcaaccgcatgtcacctggggcgctggccattatcttcgcaccctgcctcctgcgctgccctgacaactcggacccgctgaccagcatgaaggacgtcctcaagatcaccacgtgcgtggagatgctgatcaaggagcagatgaggaaatacaaagtgaagatggaggagatcagccaactggaggctgcagagagtatcgccttccgcaggctttcgctcctgcgacaaaatgctccatggcctctcaaactggggttttcgtctccctatgagggggtcctgaacaagagccccaagacccgggacatccaggaggaggagctggaggtgctgctggaggaggaggcagccggcggcgatgaggaccgggaaaaggagattctcattgaacggatccagtccatcaaggaggagaaggaggacatcacctaccggctgccggagctggacccaaggggctcggacgaggagaacctggactcggagacgtcggccagcaccgagagcctgctggaggagcgggccgggcggggggcctcggaaggtcagtattaaggtagcgtctgcttttctccttcccgtccatcccagcaggccccagggcgagggtcctccggctgccggccctgaagctgcagtaaccctgccatctgtctctcaaaagggccccctgcgcctgctctcccttgccccggcgcgcccaccccgagccccctccccaccgtggccgcccctccacgacgaaggccgtcgtccttcgtaacggtcagagtgaagaccccccggcggacccccatcatgcccacggccaacatcaagctcccaccaggcctgccctcccacctgcctcgctgggcaccgggtgcccgggaggcggctgccccagtgcggcgccgggagccacctgcccgccgcccggaccagatacattccgtgtacatcacgcccggggcagacctgccagtgcagggcgccctggagcccctagaagaggatggccagccacctggggccaagcggaggtactcggatcccccaacgtactgcctgccccccgcctcgggccagaccaatggctgagagccacagctgacaaagtctgcatgtccgaggacggcccctgcactggagctgggcgccagagctgcagagctagtgttcggccctcagagaaggatccagaatcaaaagctcaagagtgacgtgaggtgggcaccggccccaagtgcagagtcaaggcagggagaggccggctggagccaggccccctcgcacgcagcccccaaatcatggacgcacctgtggggagcaccacatctccacctgcggcctcacatctccccactcccctttttgtacgtttaactgtttctttgtacgtggtttacgtaactttaaactgtaacagccttaatggaagaccaaatggttttttatatgtgtatgtacaaagttttctattaacgctgcccgtctcccttataacctggacgtgagctgtcagagcagaagccactaggccactgcgcgtctgaggctcagaccctgctgtggttggcttggggtggccaatgggctgggaccctccatgagagttttggacacttgggtcacctgacccgtgcctctctgacacatgtctccggggggcagccacctggccaatgtgcatttttgcacgtgctggaaccttccatgggggtctgggctattggctggagccaggacatgagtcaggggcaccatggacctcacgtgccagggagacttgaatgtggctgtcactcttccggacgccaagggctgcaggaggctgcttttggcactacccaccccgtgtgacagaataggagccagcgactcaggactgctcacgggtcaggagggcaacgcctgaagtcagacctccctataggtcaacagggacaacctggggatctctggagcagggccctcctctctcaggcttggcccactcccccagacacctggacacgtggccacaaatctgggacaaggggcccccgcacagcatgaaataaaaagtgcctgagaagtgtgtgcatgggacgcc

SEQ ID NO: 370102 - DNA, 7572 bp, Homo sapiens
cggggcggagcggctcgagcagcggcgggctggcaggcggtcgtccggccggggacccggcccgggaccggcggcgcgcggcggccgaggccagctccaggacacgcgcgccccgagcctgggaggcatgctgaagccaggcggccggcaggatgagtgtgaaagaggcaggcagctcgggccgccgggagcaggcggcctaccacctgcacatctacccccagctgtccaccaccgagagccaggcctcgtgccgcgtgactgccaccaaggacagcaccacctcggacgtcatcaaggacgccattgccagcctgcggctggacggcaccaaatgttatgtgctggtggaggtcaaagagtcgggaggcgaggaatgggtgctggacgccaacgactcgcctgtgcaccgggtgctgctatggccccggcgggcacaggacgagcaccctcaggaggatggctactacttcctgctgcaggagcgcaacgcagatggaaccatcaagtacgtgcatatgcagctggtggcgcaggccacagccacccggcgcctagtggagcgtggcctcctgccacggcagcaggcggactttgatgacctgtgtaacctccccgagctaaccgagggcaacctcctgaagaacctcaagcaccgcttcctgcaacaaaagatctacacgtacgcggggagcatcctggtggccatcaacccctttaagttcctgcccatctacaaccccaagtacgtgaagatgtatgagaaccagcagctgggcaagctggagccacacgtcttcgcgctggccgacgtggcctactacaccatgctcaggaagcgcgtgaaccagtgcatcgtgatctcgggtgagagcggctccggcaagacccagagcaccaacttcctcatccactgcctcaccgccctcagccagaagggctacgccagcggcgtcgagaggaccatcctgggtgctggccctgtgctggaggcttttggaaatgccaagacagcccacaacaacaactccagccggtttgggaaattcatccaagtcagctacctagagagtggcatcgtgagaggagctgtcgtcgagaaatatctgcttgaaaagtctcgcctggtgtctcaggagaaggatgagaggaactaccatgtgttttattatttgttacttggggtcagcgaggaagagcgccaagaatttcagctcaagcagcctgaagattatttctacctcaaccagcataacttgaagattgaagatggggaggacctgaagcatgactttgagaggctcaagcaggccatggagatggtgggcttcctccccgccaccaagaagcagatttttgccgtcctctcggccatcctgtacctgggcaacgtcacttataagaagagagctacaggccgagaggaagggttggaggtcgggccacccgaggtgctggacaccctgtcgcagcttctgaaggtgaagcgagaaatcttggtggaggttctgaccaaaagaaaaacggtgaccgtcaacgacaagcttatccttccctacagcctcagcgaggccatcactgcccgcgactccatggccaagtctctgtacagcgccctgttcgactggattgtgctgcggatcaaccacgcactcctcaacaagaaggacgtggaagaggcagtctcgtgcctgtccattggggtcctggacatcttcgggtttgaagacttcgagaggaacagctttgagcagttctgcatcaactacgccaatgagcagctgcagtattacttcaaccagcacatcttcaagctggagcaggaggaatatcagggcgaggggatcacgtggcacaacatcggctacacagacaatgtcggctgcatccatctcatcagcaagaaacccacgggcctcttctacctgctggacgaggagagcaacttcccccacgccacgagccagaccctgctggccaagttcaaacagcaacatgaggacaataagtacttcctgggcaccccggtcatggagccagctttcatcatccagcacttcgcagggaaggtgaaatatcagatcaaggacttccgggagaagaacatggactacatgcggccagacatcgtggccctgctgcggggcagtgacagctcctacgtgcgggagctcatcggcatggaccccgtggccgtgttccgctgggccgtgctccgggctgctatccgggccatggcagtgcttcgggaggccggacgcctgcgggccgagagggccgaaaaggctgcaggtatgagcagccctggtgcccaaagtcacccagaagagctgccaagaggagccagcaccccttcggaaaaactttaccgcgatttgcataaccaaatgatcaagagcatcaaaggattgccctggcagggcgaggacccccgtagccttctccagtccctcagtcggctccagaaaccccgcgccttcatcctgaaaagtaaaggtatcaaacaaaagcagatcattccaaagaacctactggactccaagtccctgaaactcatcatcagcatgactctgcacgaccgcaccaccaagtccctactgcacctgcacaagaagaaaaagccaccaagcatcagcgcccagttccagacatcccttaacaagctcttggaggcactggggaaggcggagcccttctttatccgctgcatccgttccaatgctgaaaagaaagagctgtgctttgacgacgagctggtcctgcagcagctgcgctacaccggcatgctggagaccgtgcgcatccggaggtcagggtacagcgccaagtacacgttccaggatttcaccgagcagttccaggtgctcctgcccaaggatgcccagccctgcagggaggtcatctccaccctcctggagaaaatgaagatagacaagaggaactaccagatcgggaagaccaaggtcttcctgaaggagacggagcggcaagccctgcaggagacgctgcaccgggaggtggtgcggaaaatcctgctgctgcagagctggttccggatggtgctggagcgtcggcacttcctgcagatgaagcgggccgccgtcaccatccaggcctgctggcggtcctaccgggtccggagggcgctggagaggacgcaggctgccgtgtacctccaggcctcatggaggggctactggcagcggaagctctaccggcaccagaaacagagcatcatccgcctgcagagcctgtgtcgggggcacctgcagcgcaagagcttcagccagatgatctcggagaagcagaaggcagaagagaaggagagggaagccctggaagccgcaagagcaggtgctgaggagggcggacagggtcaggcggctggagggcagcaggtagctgagcaggggccggagccagcggaggatggcgggcacctggcatcggagcctgaggtgcagccaagtgacaggtcccccctagagcactcctcacctgagaaggaggccccaagcccagagaagactctcccaccccagaaaaccgtggcggctgaaagtcacgagaaagtccccagcagccgggagaagcgtgagtcgcgtcggcaaagagggctggagcacgtcaagttccagaacaaacacatccagtcctgcaaggaggagagtgccctcagagaaccttccagaagggtcacccaggagcaaggggtgagtctcctggaagacaaaaaggagagcagagaagatgaaacccttctagtcgtagagacggaggctgagaacacatctcaaaagcagcccacagagcaaccccaggccatggcagttggcaaggtctctgaagaaactgagaagacgctgcccagtgggagccccaggcctggccagttggagcggccgaccagcctggccctggacagcagggtcagcccaccggcccctggcagcgcccccgagacccccgaggacaagagcaaaccatgtggcagcccaagggttcaggaaaagcccgacagccccggaggctccacgcagatccagcggtacctggacgccgagcggctggccagcgccgtggaactgtggcggggcaagaagctggtggccgccgccagccctagtgccatgctcagccagtccctggacctcagcgacagacaccgggccacaggggccgccctcacgcccacagaggagaggcgcacctccttctccacgagcgacgtctccaagctcctcccgtccctggccaaggctcagcctgcagcagaaaccacggacggagagcgaagtgcgaaaaagccagctgtccagaagaagaagccaggcgacgcatcctccctcccagacgcagggctgtccccgggctctcaggtcgactctaaatccacgtttaagaggctttttctgcataaaaccaaggataaaaaatacagcctggagggcgcagaggagctggagaatgcagtgtccgggcacgtggtgctggaagccaccaccatgaagaagggcctggaagccccctccggacagcagcatcgccacgctgcaggtgagaagcgcaccaaggaaccaggaggcaaagggaagaagaaccgaaatgtcaagattgggaagatcacagtgtcagagaagtggcgggaatcggtgttccgccagatcaccaacgccaatgagctcaagtacctggacgagttcctgctcaacaagataaatgacctccgttcccagaagacgcccattgagagcttgtttatcgaagccaccgagaagttcaggagcaacatcaaaacgatgtactctgtcccgaacgggaagatccacgtgggctacaaggatctgatggagaactaccagatcgtcgtcagcaacctggccactgagcgtggccagaaggacaccaacctggtcctcaacctcttccagtcactgctagatgagttcacccgtggctacaccaagaacgacttcgagccagtgaagcagagcaaagctcagaagaagaagcggaagcaggagcgtgctgtccaggagcacaacgggcacgtgttcgccagctaccaggttagcatcccgcagtcgtgcgagcagtgcctctcctatatctggctcatggacaaggccctgctctgcagcgtgtgcaagatgacctgccacaagaagtgcgtgcacaagattcagagccactgctcctacacctacgggaggaagggcgagccaggcgctgagcctggccacttcggcgtgtgcgtagacagcctgaccagcgacaaggcctcggtgcccatcgtgctggagaagctcctggaacacgtggagatgcacggcctgtacaccgagggcctctaccgcaagtcgggtgctgccaaccgcactcgggagctccggcaggcgctgcagacagaccccgcagcagtcaagctggagaacttccccatccacgccatcacaggggtgctgaagcagtggctgcgggagctgcccgagcccctcatgaccttcgcacagtacggcgacttcctccgagccgtcgagctgccggagaagcaggagcagctggctgccatctatgccgtcctggagcaccttccagaagccaaccacaactccctggagagactcatcttccaccttgtcaaggtggccctgctcgaggatgtcaaccgcatgtcacctggggcgctggccattatcttcgcaccctgcctcctgcgctgccctgacaactcggacccgctgaccagcatgaaggacgtcctcaagatcaccacgtgcgtggagatgctgatcaaggagcagatgaggaaatacaaagtgaagatggaggagatcagccaactggaggctgcagagagtatcgccttccgcaggctttcgctcctgcgacaaaatgctaacaagagccccaagacccgggacatccaggaggaggagctggaggtgctgctggaggaggaggcagccggcggcgatgaggaccgggaaaaggagattctcattgaacggatccagtccatcaaggaggagaaggaggacatcacctaccggctgccggagctggacccaaggggctcggacgaggagaacctggactcggagacgtcggccagcaccgagagcctgctggaggagcgggccgggcggggggcctcggaagggccccctgcgcctgctctcccttgccccggcgcgcccaccccgagccccctccccaccgtggccgcccctccacgacgaaggccgtcgtccttcgtaacggtcagagtgaagaccccccggcggacccccatcatgcccacggccaacatcaagctcccaccaggcctgccctcccacctgcctcgctgggcaccgggtgcccgggaggcggctgccccagtgcggcgccgggagccacctgcccgccgcccggaccagatacattccgtgtacatcacgcccggggcagacctgccagtgcagggcgccctggagcccctagaagaggatggccagccacctggggccaagcggaggtactcggatcccccaacgtactgcctgccccccgcctcgggccagaccaatggctgagagccacagctgacaaagtctgcatgtccgaggacggcccctgcactggagctgggcgccagagctgcagagctagtgttcggccctcagagaaggatccagaatcaaaagctcaagagtgacgtgaggtgggcaccggccccaagtgcagagtcaaggcagggagaggccggctggagccaggccccctcgcacgcagcccccaaatcatggacgcacctgtggggagcaccacatctccacctgcggcctcacatctccccactcccctttttgtacgtttaactgtttctttgtacgtggtttacgtaactttaaactgtaacagccttaatggaagaccaaatggttttttatatgtgtatgtacaaagttttctattaacgctgcccgtctcccttataacctggacgtgagctgtcagagcagaagccactaggccactgcgcgtctgaggctcagaccctgctgtggttggcttggggtggccaatgggctgggaccctccatgagagttttggacacttgggtcacctgacccgtgcctctctgacacatgtctccggggggcagccacctggccaatgtgcatttttgcacgtgctggaaccttccatgggggtctgggctattggctggagccaggacatgagtcaggggcaccatggacctcacgtgccagggagacttgaatgtggctgtcactcttccggacgccaagggctgcaggaggctgcttttggcactacccaccccgtgtgacagaataggagccagcgactcaggactgctcacgggtcaggagggcaacgcctgaagtcagacctccctataggtcaacagggacaacctggggatctctggagcagggccctcctctctcaggcttggcccactcccccagacacctggacacgtggccacaaatctgggacaaggggcccccgcacagcatgaaataaaaagtgcctgagaagtgtgtgcatgggacgcc

SEQ ID NO: 370103 - DNA, 5416 bp, Homo sapiens
cctgcgacccgatgcccaggacacgatgcccgtggcacccagcgatcagtgtacgggtcccttactgcaaaaacgcccccactatccccctggcagggcgaggacccccgtagccttctccagtccctcagtcggctccagaaaccccgcgccttcatcctgaaaagtaaaggtatcaaacaaaagcagatcattccaaagaacctactggactccaagtccctgaaactcatcatcagcatgactctgcacgaccgcaccaccaagtccctactgcacctgcacaagaagaaaaagccaccaagcatcagcgcccagttccagacatcccttaacaagctcttggaggcactggggaaggcggagcccttctttatccgctgcatccgttccaatgctgaaaagaaagagctgtgctttgacgacgagctggtcctgcagcagctgcgctacaccggcatgctggagaccgtgcgcatccggaggtcagggtacagcgccaagtacacgttccaggatttcaccgagcagttccaggtgctcctgcccaaggatgcccagccctgcagggaggtcatctccaccctcctggagaaaatgaagatagacaagaggaactaccagatcgggaagaccaaggtcttcctgaaggagacggagcggcaagccctgcaggagacgctgcaccgggaggtggtgcggaaaatcctgctgctgcagagctggttccggatggtgctggagcgtcggcacttcctgcagatgaagcgggccgccgtcaccatccaggcctgctggcggtcctaccgggtccggagggcgctggagaggacgcaggctgccgtgtacctccaggcctcatggaggggctactggcagcggaagctctaccggcaccagaaacagagcatcatccgcctgcagagcctgtgtcgggggcacctgcagcgcaagagcttcagccagatgatctcggagaagcagaaggcagaagagaaggagagggaagccctggaagccgcaagagcaggtgctgaggagggcggacagggtcaggcggctggagggcagcaggtagctgagcaggggccggagccagcggaggatggcgggcacctggcatcggagcctgaggtgcagccaagtgacaggtcccccctagagcactcctcacctgagaaggaggccccaagcccagagaagactctcccaccccagaaaaccgtggcggctgaaagtcacgagaaagtccccagcagccgggagaagcgtgagtcgcgtcggcaaagagggctggagcacgtcaagttccagaacaaacacatccagtcctgcaaggaggagagtgccctcagagaaccttccagaagggtcacccaggagcaaggggtgagtctcctggaagacaaaaaggagagcagagaagatgaaacccttctagtcgtagagacggaggctgagaacacatctcaaaagcagcccacagagcaaccccaggccatggcagttggcaaggtctctgaagaaactgagaagacgctgcccagtgggagccccaggcctggccagttggagcggccgaccagcctggccctggacagcagggtcagcccaccggcccctggcagcgcccccgagacccccgaggacaagagcaaaccatgtggcagcccaagggttcaggaaaagcccgacagccccggaggctccacgcagatccagcggtacctggacgccgagcggctggccagcgccgtggaactgtggcggggcaagaagctggtggccgccgccagccctagtgccatgctcagccagtccctggacctcagcgacagacaccgggccacaggggccgccctcacgcccacagaggagaggcgcacctccttctccacgagcgacgtctccaagctcctcccgtccctggccaaggctcagcctgcagcagaaaccacggacggagagcgaagtgcgaaaaagccagctgtccagaagaagaagccaggcgacgcatcctccctcccagacgcagggctgtccccgggctctcaggtcgactctaaatccacgtttaagaggctttttctgcataaaaccaaggataaaaaatacagcctggagggcgcagaggagctggagaatgcagtgtccgggcacgtggtgctggaagccaccaccatgaagaagggcctggaagccccctccggacagcagcatcgccacgctgcaggtgagaagcgcaccaaggaaccaggaggcaaagggaagaagaaccgaaatgtcaagattgggaagatcacagtgtcagagaagtggcgggaatcggtgttccgccagatcaccaacgccaatgagctcaagtacctggacgagttcctgctcaacaagataaatgacctccgttcccagaagacgcccattgagagcttgtttatcgaagccaccgagaagttcaggagcaacatcaaaacgatgtactctgtcccgaacgggaagatccacgtgggctacaaggatctgatggagaactaccagatcgtcgtcagcaacctggccactgagcgtggccagaaggacaccaacctggtcctcaacctcttccagtcactgctagatgagttcacccgtggctacaccaagaacgacttcgagccagtgaagcagagcaaagctcagaagaagaagcggaagcaggagcgtgctgtccaggagcacaacgggcacgtgttcgccagctaccaggttagcatcccgcagtcgtgcgagcagtgcctctcctatatctggctcatggacaaggccctgctctgcagcgtgtgcaagatgacctgccacaagaagtgcgtgcacaagattcagagccactgctcctacacctacgggaggaagggcgagccaggcgctgagcctggccacttcggcgtgtgcgtagacagcctgaccagcgacaaggcctcggtgcccatcgtgctggagaagctcctggaacacgtggagatgcacggcctgtacaccgagggcctctaccgcaagtcgggtgctgccaaccgcactcgggagctccggcaggcgctgcagacagaccccgcagcagtcaagctggagaacttccccatccacgccatcacaggggtgctgaagcagtggctgcgggagctgcccgagcccctcatgaccttcgcacagtacggcgacttcctccgagccgtcgagctgccggagaagcaggagcagctggctgccatctatgccgtcctggagcaccttccagaagccaaccacaactccctggagagactcatcttccaccttgtcaaggtggccctgctcgaggatgtcaaccgcatgtcacctggggcgctggccattatcttcgcaccctgcctcctgcgctgccctgacaactcggacccgctgaccagcatgaaggacgtcctcaagatcaccacgtgcgtggagatgctgatcaaggagcagatgaggaaatacaaagtgaagatggaggagatcagccaactggaggctgcagagagtatcgccttccgcaggctttcgctcctgcgacaaaatgctccatggcctctcaaactggggttttcgtctccctatgagggggtcctgaacaagagccccaagacccgggacatccaggaggaggagctggaggtgctgctggaggaggaggcagccggcggcgatgaggaccgggaaaaggagattctcattgaacggatccagtccatcaaggaggagaaggaggacatcacctaccggctgccggagctggacccaaggggctcggacgaggagaacctggactcggagacgtcggccagcaccgagagcctgctggaggagcgggccgggcggggggcctcggaaggtcagtattaaggtagcgtctgcttttctccttcccgtccatcccagcaggccccagggcgagggtcctccggctgccggccctgaagctgcagtaaccctgccatctgtctctcaaaagggccccctgcgcctgctctcccttgccccggcgcgcccaccccgagccccctccccaccgtggccgcccctccacgacgaaggccgtcgtccttcgtaacggtcagagtgaagaccccccggcggacccccatcatgcccacggccaacatcaagctcccaccaggcctgccctcccacctgcctcgctgggcaccgggtgcccgggaggcggctgccccagtgcggcgccgggagccacctgcccgccgcccggaccagatacattccgtgtacatcacgcccggggcagacctgccagtgcagggcgccctggagcccctagaagaggatggccagccacctggggccaagcggaggtactcggatcccccaacgtactgcctgccccccgcctcgggccagaccaatggctgagagccacagctgacaaagtctgcatgtccgaggacggcccctgcactggagctgggcgccagagctgcagagctagtgttcggccctcagagaaggatccagaatcaaaagctcaagagtgacgtgaggtgggcaccggccccaagtgcagagtcaaggcagggagaggccggctggagccaggccccctcgcacgcagcccccaaatcatggacgcacctgtggggagcaccacatctccacctgcggcctcacatctccccactcccctttttgtacgtttaactgtttctttgtacgtggtttacgtaactttaaactgtaacagccttaatggaagaccaaatggttttttatatgtgtatgtacaaagttttctattaacgctgcccgtctcccttataacctggacgtgagctgtcagagcagaagccactaggccactgcgcgtctgaggctcagaccctgctgtggttggcttggggtggccaatgggctgggaccctccatgagagttttggacacttgggtcacctgacccgtgcctctctgacacatgtctccggggggcagccacctggccaatgtgcatttttgcacgtgctggaaccttccatgggggtctgggctattggctggagccaggacatgagtcaggggcaccatggacctcacgtgccagggagacttgaatgtggctgtcactcttccggacgccaagggctgcaggaggctgcttttggcactacccaccccgtgtgacagaataggagccagcgactcaggactgctcacgggtcaggagggcaacgcctgaagtcagacctccctataggtcaacagggacaacctggggatctctggagcagggccctcctctctcaggcttggcccactcccccagacacctggacacgtggccacaaatctgggacaaggggcccccgcacagcatgaaataaaaagtgcctgagaagtgtgtgcatgggacgcc

SEQ ID NO: 370104 - DNA, 4293 bp, Homo sapiens
cggggcggagcggctcgagcagcggcgggctggcaggcggtcgtccggccggggacccggcccgggaccggcggcgcgcggcggccgaggccagctccaggacacgcgcgccccgagcctgggaggcatgctgaagccaggcggccggcaggatgagtgtgaaagaggcaggcagctcgggccgccgggagcaggcggcctaccacctgcacatctacccccagctgtccaccaccgagagccaggcctcgtgccgcgtgactgccaccaaggacagcaccacctcggacgtcatcaaggacgccattgccagcctgcggctggacggcaccaaatgttatgtgctggtggaggtcaaagagtcgggaggcgaggaatgggtgctggacgccaacgactcgcctgtgcaccgggtgctgctatggccccggcgggcacaggacgagcaccctcaggaggatggctactacttcctgctgcaggagcgcaacgcagatggaaccatcaagtacgtgcatatgcagctggtggcgcaggccacagccacccggcgcctagtggagcgtggcctcctgccacggcagcaggcggactttgatgacctgtgtaacctccccgagctaaccgagggcaacctcctgaagaacctcaagcaccgcttcctgcaacaaaagatctacacgtacgcggggagcatcctggtggccatcaacccctttaagttcctgcccatctacaaccccaagtacgtgaagatgtatgagaaccagcagctgggcaagctggagccacacgtcttcgcgctggccgacgtggcctactacaccatgctcaggaagcgcgtgaaccagtgcatcgtgatctcgggtgagagcggctccggcaagacccagagcaccaacttcctcatccactgcctcaccgccctcagccagaagggctacgccagcggcgtcgagaggaccatcctgggtgctggccctgtgctggaggcttttggaaatgccaagacagcccacaacaacaactccagccggtttgggaaattcatccaagtcagctacctagagagtggcatcgtgagaggagctgtcgtcgagaaatatctgcttgaaaagtctcgcctggtgtctcaggagaaggatgagaggaactaccatgtgttttattatttgttacttggggtcagcgaggaagagcgccaagaatttcagctcaagcagcctgaagattatttctacctcaaccagcataacttgaagattgaagatggggaggacctgaagcatgactttgagaggctcaagcaggccatggagatggtgggcttcctccccgccaccaagaagcagatttttgccgtcctctcggccatcctgtacctgggcaacgtcacttataagaagagagctacaggccgagaggaagggttggaggtcgggccacccgaggtgctggacaccctgtcgcagcttctgaaggtgaagcgagaaatcttggtggaggttctgaccaaaagaaaaacggtgaccgtcaacgacaagcttatccttccctacagcctcagcgaggccatcactgcccgcgactccatggccaagtctctgtacagcgccctgttcgactggattgtgctgcggatcaaccacgcactcctcaacaagaaggacgtggaagaggcagtctcgtgcctgtccattggggtcctggacatcttcgggtttgaagacttcgagaggaacagctttgagcagttctgcatcaactacgccaatgagcagctgcagtattacttcaaccagcacatcttcaagctggagcaggaggaatatcagggcgaggggatcacgtggcacaacatcggctacacagacaatgtcggctgcatccatctcatcagcaagaaacccacgggcctcttctacctgctggacgaggagagcaacttcccccacgccacgagccagaccctgctggccaagttcaaacagcaacatgaggacaataagtacttcctgggcaccccggtcatggagccagctttcatcatccagcacttcgcagggaaggtgaaatatcagatcaaggacttccgggagaagaacatggactacatgcggccagacatcgtggccctgctgcggggcagtgacagctcctacgtgcgggagctcatcggcatggaccccgtggccgtgttccgctgggccgtgctccgggctgctatccgggccatggcagtgcttcgggaggccggacgcctgcgggccgagagggccgaaaaggctgcaggtatgagcagccctggtgcccaaagtcacccagaagagctgccaagaggagccagcaccccttcggaaaaactttaccgcgatttgcataaccaaatgatcaagagcatcaaaggattgccctggcagggcgaggacccccgtagccttctccagtccctcagtcggctccagaaaccccgcgccttcatcctgaaaagtaaaggtatcaaacaaaagcagatcattccaaagaacctactggactccaagtccctgaaactcatcatcagcatgactctgcacgaccgcaccaccaagtccctactgcacctgcacaagaagaaaaagccaccaagcatcagcgcccagttccagacatcccttaacaagctcttggaggcactggggaaggcggagcccttctttatccgctgcatccgttccaatgctgaaaagaaagagctgtgctttgacgacgagctggtcctgcagcagctgcgctacaccggcatgctggagaccgtgcgcatccggaggtcagggtacagcgccaagtacacgttccaggatttcaccgagcagttccaggtgctcctgcccaaggatgcccagccctgcagggaggtcatctccaccctcctggagaaaatgaagatagacaagaggaactaccagatcgggaagaccaaggtcttcctgaaggagacggagcggcaagccctgcaggagacgctgcaccgggaggtggtgcggaaaatcctgctgctgcagagctggttccggatggtgctggagcgtcggcacttcctgcagatgaagcgggccgccgtcaccatccaggcctgctggcggtcctaccgggtccggagggcgctggagaggacgcaggctgccgtgtacctccaggcctcatggaggggctactggcagcggaagctctaccggcaccagaaacagagcatcatccgcctgcagagcctgtgtcgggggcacctgcagcgcaagagcttcagccagatgatctcggagaagcagaaggcagaagagaaggagagggaagccctggaagccgcaagagcaggtgctgaggagggcggacagggtcaggcggctggagggcagcaggtagctgagcaggggccggagccagcggaggatggcgggcacctggcatcggagcctgaggtgcagccaagtgacaggtcccccctagagcactcctcacctgagaaggaggccccaagcccagagaagactctcccaccccagaaaaccgtggcggctgaaagtcacgagaaagtccccagcagccgggagaagcgtgagtcgcgtcggcaaagagggctggagcacgtcaagttccagaacaaacacatccagtcctgcaaggaggagagtgccctcagagaaccttccagaagggtcacccaggagcaaggggtgagtctcctggaagacaaaaaggagagcagagaagatgaaacccttctagtcgtagagacggaggctgagaacacatctcaaaagcagcccacagagcaaccccaggccatggcagttggcaaggtctctgaagaaactgagaagacgctgcccagtgggagccccaggcctggccagttggagcggccgaccagcctggccctggacagcagggtcagcccaccggcccctggcagcgcccccgagacccccgaggacaagagcaaaccatgtggcagcccaagggttcaggaaaagcccgacagccccggaggctccacgcagatccagcggtacctggacgccgagcggctggccagcgccgtggaactgtggcggggcaagaagctggtggccgccgccagccctagtgccatgctcagccagtccctggacctcagcgacagacaccgggccacaggggccgccctcacgcccacagaggagaggcgcacctccttctccacgagcgacgtctccaagctcctcccgtccctggccaaggctcaggtaacaacaacacggcaaaaccccgtct

SEQ ID NO: 370105 - DNA, 1525 bp, Homo sapiens
cggggcggagcggctcgagcagcggcgggctggcaggcggtcgtccggccggggacccggcccgggaccggcggcgcgcggcggccgaggccagctccaggacacgcgcgccccgagcctgggaggcatgctgaagccaggcggccggcaggatgagtgtgaaagaggcaggcagctcgggccgccgggagcaggcggcctaccacctgcacatctacccccagctgtccaccaccgagagccaggcctcgtgccgcgtgactgccaccaaggacagcaccacctcggacgtcatcaaggacgccattgccagcctgcggctggacggcaccaaatgttatgtgctggtggaggtcaaagagtcgggaggcgaggaatgggtgctggacgccaacgactcgcctgtgcaccgggtgctgctatggccccggcgggcacaggacgagcaccctcaggaggatggctactacttcctgctgcaggagcgcaacgcagatggaaccatcaagtacgtgcatatgcagctggtggcgcaggccacagccacccggcgcctagtggagcgtggcctcctgccacggcagcaggcggactttgatgacctgtgtaacctccccgagctaaccgagggcaacctcctgaagaacctcaagcaccgcttcctgcaacaaaagatctacacgtacgcggggagcatcctggtggccatcaacccctttaagttcctgcccatctacaaccccaagtacgtgaagatgtatgagaaccagcagctgggcaagctggagccacacgtcttcgcgctggccgacgtggcctactacaccatgctcaggaagcgcgtgaaccagtgcatcgtgatctcgggtgagagcggctccggcaagacccagagcaccaacttcctcatccactgcctcaccgccctcagccagaagggctacgccagcggcgtcgagaggaccatcctgggtgctggccctgtgctggaggtactgcgaagccaactggtcaggatgcaactgcctcttggaaagagagtttgttactcacagttcccgaaagaagaggatgcaatgccatggaaggccacagggggaagcactgggactcatcaggaggctgagggagagagggaaaaagggagcggggagaggcaggaaactttattgtgattttcatgcatcagaatgtgctaggcagagtaagctggcttaggattggcttgtttgaattatttcaatgggctctggggcataggggctgccccttgttgtcaggtgccagggcctggggtgatgagggcaggggatagtgggctggagtgtgagagtcccagagaggaggtggctggggtgtaggctctggactggttggtttgcatatggaaggcaagtcccaaaccatctctaggaactggctagaatcaatctaggaattgggaagggccgtctccctggggtcagccaggccccagatgtcagagcatcagaaatacagaaaataagtcactgggcgcggtggc

SEQ ID NO: 370106 - DNA, 1234 bp, Homo sapiens
cggggcggagcggctcgagcagcggcgggctggcaggcggtcgtccggccggggacccggcccgggaccggcggcgcgcggcggccgaggccagctccaggacacgcgcgccccgagcctgggaggcatgctgaagccaggcggccggcaggatgagtgtgaaagaggcaggcagctcgggccgccgggagcaggcggcctaccacctgcacatctacccccagctgtccaccaccgagagccaggcctcgtgccgcgtgactgccaccaaggacagcaccacctcggacgtcatcaaggacgccattgccagcctgcggctggacggcaccaaatgttatgtgctggtggaggtcaaagagtcgggaggcgaggaatgggtgctggacgccaacgactcgcctgtgcaccgggtgctgctatggccccggcgggcacaggacgagcaccctcaggaggatggctactacttcctgctgcaggagcgcaacgcagatggaaccatcaagtacgtgcatatgcagctggtggcgcaggccacagccacccggcgcctagtggagcgtggcctcctgccacggcagcaggcggactttgatgacctgtgtaacctccccgagctaaccgagggcaacctcctgaagaacctcaagcaccgcttcctgcaacaaaagatctacacgtacgcggggagcatcctggtggccatcaacccctttaagttcctgcccatctacaaccccaagtacgtgaagatgtatgagaaccagcagctgggcaagctggagccacacgtcttcgcgctggccgacgtggcctactacaccatgctcaggaagcgcgtgaaccagtgcatcgtgatctcgggtgagagcggctccggcaagacccagagcaccaacttcctcatccactgcctcaccgccctcagccagaagggctacgccagcggcgtcgagaggaccatcctgggtgctggccctgtgctggaggtactgcgaagccaactggtcaggatgcaactgcctcttggaaagagagtttgttactcacagttcccgaaagaagaggatgcaatgccatggaaggccacagggggaagcactgggactcatcaggaggctgagggagagagggaaaaagggagcggggagaggcaggaaactttattgtgattttcatgcatcagaatgtgtgggattataggcgtgaaccactgtacccagctccgctt

SEQ ID NO: 370107 - DNA, 400 bp, Homo sapiens
accgtcagcccttcctgcgccagcccggggtctttggtaggcgccggtgagtgactatccccgagtgaccgcccacatccatcccccaccaggacttccgggagaagaacatggactacatgcggccagacatcgtggccctgctgcggggcagtgacagctcctacgtgcgggagctcatcggcatggaccccgtggccgtgttccgctgggccgtgctccgggctgctatccgggccatggcagtgcttcgggaggccggacgcctgcgggccgagagggccgaaaaggctgcaggtgggagctggggcgtgaacccacaaaagcgtcactgtcgagaggggggcacatcctgagttcatcttaaagtgaacacttcagtggcatttagtacattcat

SEQ ID NO: 370108 - DNA, 5189 bp, Homo sapiens
  misc_feature (1496)..(1496): n is a, c, g, or t
  misc_feature (3417)..(3417): n is a, c, g, or t
tgttgggattacaggcgtgagctaccacgcccggccctaggctccacaactctaagaagctttgtgggggcttatttggcctccccaggatggactggagcatcagtagtgcccgggtttatcacaggacagatactcaagacactcttatcaccattaggtggacttggaggagcaaaaaacaagtgcagtggctcctcagcagagacactcctgaatgtatagacatgggaaccaccttcagcatcaaaaaaggaaacgttctgcatgcccatatccagaaaaatccccactcgctgtaacttgcggtctacgaagaggaaagtcagcggcaccgtgctggcagagaggcggcttccatccctcaaactcacagtccagaatccacgctctgtggtcagatggatcctccctttgcggtgaacagattctctgcagactcccaggtcccattctgtgcttgttcccacgtccacctcccagtagtggcggccacaggtaaagcgaggggagcccaggatgcaaatggacacgtcaaatctctcggcaaggtcttgccgattctgtgtgatgcacccacttcggacgctcctgaggtcgtcagaaatgaggaggaagttgttggctgtgtcggcatccaaggtcatatccactgtgaaaaggaaaaaaagttgatcagaaaatggacagaagccaaccccatgcctctcctctacttcaaaggcccaaatatctcttgactttggtttctttaattctcttcttcccccaaaatcaaaacttttcatgaggcaacttccctgactagttcaaattctcataggtatgctttgtggcaatacccaactcttattcacagtagcaattattttactttatgtcacgtgtttgcttcattggacttttcttcatttagagtggagggtctctgaaggcagacaccatgaccccctttctaccaccttgatgcatgaaaaaatgaatgataattaagacaatgcaaatggtcgatgttaaatatgtttctgcttccatcttgtattgctcaactcagtatatagagcatgattccaggcctttgttttccatgtttgtaagcaaattaattgtgcatggttctgacagcaggtagggtatctctgcagctgacaatgtgatgacagaggtgccggtcctggacattaggaggctccaaggccaggaggaagaggggggccttagatgaaagaatgttttccatcctacatgggaggtgaaaccttaagcaaaacaatggtaaattttggagtgaagagaaaggtatttgaaagttgtttgttggctgagcgcggtggctcacacctgtaatcccagcactttgggaggccgagacgggtggatcacgaggtcaggagatcgagaccatcctggctaacacgtgaaaccctgtctctactaaaaaacatacaaaaaaattagccggacatggtggcgggtgcctgtagtcctagctactnggtagactgaggcaggagaatggcatgaacccaggaggcggagcttgcaatgagcagagatcatgccactgcacctccagcctaggcggcagagcgagactccatctcaaaaaataaaaaaaaaaagaaagttgttcgtcataactgactgatcgtagagaataagggcagtaaatacaaaggtcaataatttaatgcattgggtatgtggttgataggtgaagctgccaattctcatggaggaggcagtgtgatctggcctaaagaaaattaattgtccagagcattctgaaaaaaaaatctacagaacatatgatccttcaagtcaaaaaactgatgatcaccaatatagattttatagattacagtaagacttgaggagactgattgctgtttgatggtgaattagggaatgaaatgagatgagtggacatggacaaggaaggaggaagagggttccaaacatgacttaggcagggtgaatctgtcctccatatttcagcagagacacagtcaggtatgggtaggtggatgagtagagatcatgggtgtcagggcagaagccaccaccatttataggtgtaattctttgcccaggctgaccataacctcttcatttaaatgtccctattccccagagttatggagagtgatagtattttctgtagccaggacccctgttgaagtccatggcacaccgatgaggagaccagcgtctgcaactcgccccactcacagaaacaaacaccataggtgctccattccaaactcttcccaaccctggggtgaggttgtttggtacagtgggtgccaatactcactgtgcattagaattaccaggcccatttaaatgtcagagtcctgggaacctttgctagagagaaattcaaattaagttgctctgtgtttttgctactcagcaaagtccccaagccagcgggatcaatcctgagacttcccagttcagcatctgcattttaacaagatccccaggtaatctgagcacactaagtttagagaatcccttgtctaacccatgacatagacatcaggtttttttttttgagacggagtctcactctgtcacccaggctggagtgcagtggtgcaatcttggctcactgcaagctccgccccccccaggttaacgccattctcctgcctcaacccccaagtagctgggactacaggcacccaccaccaagcctggctaattttttgtatttttagtagagacagggtttcaccgtgttatccaggatggtcccgatctcctgacctcgtgatccacccgcctcggcctcccaaagtgctgacattacaggcatgagccaccatgcccagccagccttttttttggagatcaccaggtgattctgtatgttgtcagggctgagaatctgatgatgaagaagcatctcaattttaggtgccagacagcagctaatccccatatggaatgaggggccagttgcacagatgatttttcctggtctggtcgtaggaagggggcagtgtatacagatccctcaccttggaacttccgcatccttgggttcatctgcagaatcttcttcagcttgggctccagttccttgatgtgggaagccagcctctctagctgccaactgggcctgattttgttcttctgagagaccatggaacagcaacagcaaagtagatcctccccatggggctccttctgcagtgaattgatgcacttgaagcagacagcgcatccacactccagggacattggtttctctagatagtctgagcagacgggacagctgcttgcttcttggaagagtgcagccatgtccactgccaggggaaaagtgcacaagggaagaaaatttccgtgaggtgaaagcctgttagttgtgacaagtgacaaccttttcatgcataaaggtattgngtcccagctttgtcacttctagaacaagaccatgagtacaaacactcaagcacatccccccaccccccgtcttcagagatttgaagttctattgggaaagaaagtcacgaatcatcactgtgctctgaactgaggtggaggaagggtccattctactggtgacccagcaactgagcctgagccagtgacacggcagcacccatgtgaggaacagcgagctggggtcatttcacctcctcctaggggaaccccagcaagagattgattgatgaacataagaattaggggctgggaggccgggcgtggtggctcaggcctataatcccagcactttgggaggctgacgtgagtggatcatctgaggtcgtcaaaagttcgagaccagcctgatgggtgaaaccccatctctactgaaaatacaaaagaattagccaggcgtggtggcacacgcctgtaatcccagatacttgggaggctgaggcaggagaattgcttgaacctgggaggcaaaggttgcagtgagccaagatccagccattgcactccggcctggacaacagagtgagacaccatctcaaaaaaaaaaaaaaaaaaaaagagagggactggatgcagtagctcacatctgtaatcccagcactttgcgaggccaaggctggaagatcccttgagccaaggatttgagatcagcctgggcaacacaggaagaccccctctctacaaataatagaaaaattagcagtgagcagagatcacaccaggtcactccaacctggacaacagagttaagaccctgtctcaccaaaaaaaaaaaaaaaaaaaatcacatccttctccagccttggaaatgaataccaaattgactgccaccactcctagactggagatctggggatccagggtgactggttttcaactctgaggcagcactcagacagcctttgttgaattcattaattacgaatttctctcattcatcccccaaggcataacccccatttctaggcatctaaggaggaaaaacacacacacaggcatgggctcacctcttctgctggaagctcctctgtcctccagctgcttccactgggcgctcaggtcttgtgcggaaggggcacatgagggcgttttattggtgagattcccacctcccactgggtcatgcccttccacaccctctaacctaatgaggctttgatttaattataacagggaattaggtttttactggtgatatatctccagttaattgtaactttagtaaatccttcatcctgacagtgtatttttctttcatatgaagataagattaaattgcctttatattaaattaggcttaatgtactaacttcaaaagcttattttagagatgtttccatcagttgtcagtaaagataattcctgtaatatgttgtaggcttcaagctttgcttggaaacctgaagtattaagtatgattggatttgcaattttacaaaatggtttaaattcatatacatcagactcaaaggtaataggggcatgcattccattgaggaaattctagggaatttttatttattttcattggtttatttctggttttgaaaaaatttcataattcataggaaaaaattggataattactattttgacaaatgaccattaagcttcttggaccttgagtacttcacacagtgttaagataaaagtcacaatttaaaaaaaaaagatgattttcttgtgaaacttgtgttctcaaataaaaattgttacccgtgaaaaaaaaaaaa

SEQ ID NO: 370109 - DNA, 5135 bp, Homo sapiens
  misc_feature (1496)..(1496): n is a, c, g, or t
  misc_feature (3417)..(3417): n is a, c, g, or t
tgttgggattacaggcgtgagctaccacgcccggccctaggctccacaactctaagaagctttgtgggggcttatttggcctccccaggatggactggagcatcagtagtgcccgggtttatcacaggacagatactcaagacactcttatcaccattaggtggacttggaggagcaaaaaacaagtgcagtggctcctcagcagagacactcctgaatgtatagacatgggaaccaccttcagcatcaaaaaaggaaacgttctgcatgcccatatccagaaaaatccccactcgctgtaacttgcggtctacgaagaggaaagtcagcggcaccgtgctggcagagaggcggcttccatccctcaaactcacagtccagaatccacgctctgtggtcagatggatcctccctttgcggtgaacagattctctgcagactcccaggtcccattctgtgcttgttcccacgtccacctcccagtagtggcggccacaggtaaagcgaggggagcccaggatgcaaatggacacgtcaaatctctcggcaaggtcttgccgattctgtgtgatgcacccacttcggacgctcctgaggtcgtcagaaatgaggaggaagttgttggctgtgtcggcatccaaggtcatatccactgtgaaaaggaaaaaaagttgatcagaaaatggacagaagccaaccccatgcctctcctctacttcaaaggcccaaatatctcttgactttggtttctttaattctcttcttcccccaaaatcaaaacttttcatgaggcaacttccctgactagttcaaattctcataggtatgctttgtggcaatacccaactcttattcacagtagcaattattttactttatgtcacgtgtttgcttcattggacttttcttcatttagagtggagggtctctgaaggcagacaccatgaccccctttctaccaccttgatgcatgaaaaaatgaatgataattaagacaatgcaaatggtcgatgttaaatatgtttctgcttccatcttgtattgctcaactcagtatatagagcatgattccaggcctttgttttccatgtttgtaagcaaattaattgtgcatggttctgacagcaggtagggtatctctgcagctgacaatgtgatgacagaggtgccggtcctggacattaggaggctccaaggccaggaggaagaggggggccttagatgaaagaatgttttccatcctacatgggaggtgaaaccttaagcaaaacaatggtaaattttggagtgaagagaaaggtatttgaaagttgtttgttggctgagcgcggtggctcacacctgtaatcccagcactttgggaggccgagacgggtggatcacgaggtcaggagatcgagaccatcctggctaacacgtgaaaccctgtctctactaaaaaacatacaaaaaaattagccggacatggtggcgggtgcctgtagtcctagctactnggtagactgaggcaggagaatggcatgaacccaggaggcggagcttgcaatgagcagagatcatgccactgcacctccagcctaggcggcagagcgagactccatctcaaaaaataaaaaaaaaaagaaagttgttcgtcataactgactgatcgtagagaataagggcagtaaatacaaaggtcaataatttaatgcattgggtatgtggttgataggtgaagctgccaattctcatggaggaggcagtgtgatctggcctaaagaaaattaattgtccagagcattctgaaaaaaaaatctacagaacatatgatccttcaagtcaaaaaactgatgatcaccaatatagattttatagattacagtaagacttgaggagactgattgctgtttgatggtgaattagggaatgaaatgagatgagtggacatggacaaggaaggaggaagagggttccaaacatgacttaggcagggtgaatctgtcctccatatttcagcagagacacagtcaggtatgggtaggtggatgagtagagatcatgggtgtcagggcagaagccaccaccatttataggtgtaattctttgcccaggctgaccataacctcttcatttaaatgtccctattccccagagttatggagagtgatagtattttctgtagccaggacccctgttgaagtccatggcacaccgatgaggagaccagcgtctgcaactcgccccactcacagaaacaaacaccataggtgctccattccaaactcttcccaaccctggggtgaggttgtttggtacagtgggtgccaatactcactgtgcattagaattaccaggcccatttaaatgtcagagtcctgggaacctttgctagagagaaattcaaattaagttgctctgtgtttttgctactcagcaaagtccccaagccagcgggatcaatcctgagacttcccagttcagcatctgcattttaacaagatccccaggtaatctgagcacactaagtttagagaatcccttgtctaacccatgacatagacatcaggtttttttttttgagacggagtctcactctgtcacccaggctggagtgcagtggtgcaatcttggctcactgcaagctccgccccccccaggttaacgccattctcctgcctcaacccccaagtagctgggactacaggcacccaccaccaagcctggctaattttttgtatttttagtagagacagggtttcaccgtgttatccaggatggtcccgatctcctgacctcgtgatccacccgcctcggcctcccaaagtgctgacattacaggcatgagccaccatgcccagccagccttttttttggagatcaccaggtgattctgtatgttgtcagggctgagaatctgatgatgaagaagcatctcaattttaggtgccagacagcagctaatccccatatggaatgaggggccagttgcacagatgatttttcctggtctggtcgtaggaagggggcagtgtatacagatccctcaccttggaacttccgcatccttgggttcatctgcagaatcttcttcagcttgggctccagttccttgatgtgggaagccagcctctctagctgccaactgggcctgattttgttcttctgagagaccatggaacagcaacagcaaagtagatcctccccatggggctccttctgcagtgaattgatgcacttgaagcagacagcgcatccacactccagggacattggtttctctagatagtctgagcagacgggacagctgcttgcttcttggaagagtgcagccatgtccactgccaggggaaaagtgcacaagggaagaaaatttccgtgaggtgaaagcctgttagttgtgacaagtgacaaccttttcatgcataaaggtattgngtcccagctttgtcacttctagaacaagaccatgagtacaaacactcaagcacatccccccaccccccgtcttcagagatttgaagttctattgggaaagaaagtcacgaatcatcactgtgctctgaactgaggtggaggaagggtccattctactggtgacccagcaactgagcctgagccagtgacacggcagcacccatgtgaggaacagcgagctggggtcatttcacctcctcctaggggaaccccagcaagagattgattgatgaacataagaattaggggctgggaggccgggcgtggtggctcaggcctataatcccagcactttgggaggctgacgtgagtggatcatctgaggtcgtcaaaagttcgagaccagcctgatgggtgaaaccccatctctactgaaaatacaaaagaattagccaggcgtggtggcacacgcctgtaatcccagatacttgggaggctgaggcaggagaattgcttgaacctgggaggcaaaggttgcagtgagccaagatccagccattgcactccggcctggacaacagagtgagacaccatctcaaaaaaaaaaaaaaaaaaaaagagagggactggatgcagtagctcacatctgtaatcccagcactttgcgaggccaaggctggaagatcccttgagccaaggatttgagatcagcctgggcaacacaggaagaccccctctctacaaataatagaaaaattagcagtgagcagagatcacaccaggtcactccaacctggacaacagagttaagaccctgtctcaccaaaaaaaaaaaaaaaaaaaatcacatccttctccagccttggaaatgaataccaaattgactgccaccactcctagactggagatctggggatccagggtgactggttttcaactctgaggcagcactcagacagcctttgttgaattcattaattacgaatttctctcattcatcccccaaggcataacccccatttctaggcatctaaggaggaccagctgcttccactgggcgctcaggtcttgtgcggaaggggcacatgagggcgttttattggtgagattcccacctcccactgggtcatgcccttccacaccctctaacctaatgaggctttgatttaattataacagggaattaggtttttactggtgatatatctccagttaattgtaactttagtaaatccttcatcctgacagtgtatttttctttcatatgaagataagattaaattgcctttatattaaattaggcttaatgtactaacttcaaaagcttattttagagatgtttccatcagttgtcagtaaagataattcctgtaatatgttgtaggcttcaagctttgcttggaaacctgaagtattaagtatgattggatttgcaattttacaaaatggtttaaattcatatacatcagactcaaaggtaataggggcatgcattccattgaggaaattctagggaatttttatttattttcattggtttatttctggttttgaaaaaatttcataattcataggaaaaaattggataattactattttgacaaatgaccattaagcttcttggaccttgagtacttcacacagtgttaagataaaagtcacaatttaaaaaaaaaagatgattttcttgtgaaacttgtgttctcaaataaaaattgttacccgtgaaaaaaaaaaaa

SEQ ID NO: 370110 - DNA, 403 bp, Homo sapiens
ttccaagtttaaggttttcttaattagaaggcctgagagaagatgagtgaggacaaatccgagtttccctgtgtgtggctggccatggttggcggtcgcagcatcacagcgttggccggctgctgcttagctttattttacttgtgatttttctttgttatgcaccgaacagattcccctctctggtattcagtggggagcatatagccggaggatagcaattagctatagctaggcctgctcctctttgcacagctcaagatgacgtgtacaattactttggcacctcaccagctctttcagaccttttccatgcatgatgggaagacaggtccattctctgagagtccctcactccctccccctcccaaattcccccttacctggatgaaatcctgatgta

SEQ ID NO: 370111 - DNA, 2623 bp, Homo sapiens
gccccgccctcccggcccccgcctgcgcccgcgccctgggctggtgcccgccaccccagcgatctcatactggcccctgggcgcacggtgaccctgcggctgcccggcccctgcctccgcccgcgcggccccctcgctcaggtcgcgggcgcccggggcctggcttcgcgtgggtcctggctcctcccgttccgcagttggtgccgtctgacagccccttccgcgcggcgcggcgcggcgcggcgggtgtcgggcggggcgcgggcctccggcctgaggcccggcgaggtgctggagggagcggggcgcggatccggcccagatgggcagctccgtccgcggggtcagggccgggcttcggcttcaccgcagcctcgcctgagcgggcgcctctgaagtggagggcgggccgcctgggccgcgggcctcgggaggatggtggcgccctggcgcgtctccgtcagggtttgcctgtcgcacctgaggtgcttcgagctcagacagggactcagcctcctgaggccctccgagtgccctcgcgatgccaggctctgctggcttctgctgggcactttgcccaaggtcgtctccctgtgcggggacgtgggtgagggggcccctgacgttctgagtcggcgaagggtccgctgcagcggggcggctggcgcggggcccgcggagagcctcccccgagcgggacctctgggcggcgtcttcctgcatctccgcctctggcttcgcgccggcgctctgttggtgaaattcttccccctcctactcctctaccccctcacctacctggctcccagcgtctccaccctctggctccacctgcttctgaaagccaccgagacctcaggcccaacctacatcaaactgggccagtgggccagcacccggcgcgatctgttttcggaggctttctgtgcccaattttccaagctgcatgtccgagtgacgccccacccgtggactcacactgagcgcttccttcggcaggcttttggggatgactgggggagcatcctctcttttgagaaccgggaacctgtgggctcaggctgcgtggcccaggtgtacaaagcatacgccaacactgccttcctggagactgacagcgtccagagacttggcagggcctcctgtctgccgcccttctcacatactggggcagtcggtgggctgagagagctctttggataccttggaaatggccggaaacctccagaaaatctcgcagaccagtcgtttctagaaaggctgctcctccctaaagctgacctggttggatcaaatgcaggggtgtctcgggctcaggtccctggccaccaacctgaggccaccaacctcatctccgtggcagtgaaagtgttgcaccctggcctgctcgctcaggtgcatatggacctgctgctgatgaagattggcagccgagtcctgggagttttgccaggcatcaagtggcttagcttgcctgagattgtggaggaatttgagaagctgatggtccaacagattgacctgcgttacgaagctcagaatctagaacacttccaggtcaacttccggaatgtgaaagccgtcaagttccccacccctctgcgcccctttgtcaccagagaagtcttggtggaaacgtatgaagagagtgtgcctgtgtccagttaccagcaggcaggaattcccgtggacttgaaaaggaagattgcacggctggggatcaacatgctcctgaagatgatatttgtggataactttgtccatgcagaccttcaccctggaaacatcctggttcagggtgccaacggcctgtcctcgagtcaggaggcgcagctgcagcaggcggacatctgtgacactctggtggtggccgtgccatcttccctctgcccgctgcgactggtgctgctggatgctggcattgtggcggagctgcaggcccctgacctgaggaatttccgggcagttttcatggctgtggtgatggggcagggccagagagtggctgagctgatcctgcatcatgcccgggccagcgagtgcagggacgtggaggggttcaaaaccgagatggccatgctggtgacccaggccaggaagaacaccatcaccctggagaagcttcatgtgtccagccttctctctagtgtctttaagttgctgatgactcacaaggtaaagcttgagagcaactttgcctccattgtgtttgccatcatggtgttggaggggcttggccgctcactggaccccaaactggacatcctggaggcagcgaggcccttcctcctcacgggcccagtgtgccccccgtgatggggcagtggcctctgtgggcccttgtcaagagctggaggccactcccaagagcctctcctatggcagctgggacgttttaaaattgggacaccaatttcaaatgtaaccctccagtggtggaaggcacaccatggcttcctctgcttggtttgagggtctgttcaaaagctttgggccaattagggagtaaaaggagggaaggggcctatccattccattgtggaagctgggccaggtgccagggacactctccttcagggaaaatgttatgtggaggaggacgaataaatttattttgttttcc

SEQ ID NO: 370112 - DNA, 2602 bp, Homo sapiens
gccccgccctcccggcccccgcctgcgcccgcgccctgggctggtgcccgccaccccagcgatctcatactggcccctgggcgcacggtgaccctgcggctgcccggcccctgcctccgcccgcgcggccccctcgctcaggtcgcgggcgcccggggcctggcttcgcgtgggtcctggctcctcccgttccgcagttggtgccgtctgacagccccttccgcgcggcgcggcgcggcgcgggcctccggcctgaggcccggcgaggtgctggagggagcggggcgcggatccggcccagatgggcagctccgtccgcggggtcagggccgggcttcggcttcaccgcagcctcgcctgagcgggcgcctctgaagtggagggcgggccgcctgggccgcgggcctcgggaggatggtggcgccctggcgcgtctccgtcagggtttgcctgtcgcacctgaggtgcttcgagctcagacagggactcagcctcctgaggccctccgagtgccctcgcgatgccaggctctgctggcttctgctgggcactttgcccaaggtcgtctccctgtgcggggacgtgggtgagggggcccctgacgttctgagtcggcgaagggtccgctgcagcggggcggctggcgcggggcccgcggagagcctcccccgagcgggacctctgggcggcgtcttcctgcatctccgcctctggcttcgcgccggcgctctgttggtgaaattcttccccctcctactcctctaccccctcacctacctggctcccagcgtctccaccctctggctccacctgcttctgaaagccaccgagacctcaggcccaacctacatcaaactgggccagtgggccagcacccggcgcgatctgttttcggaggctttctgtgcccaattttccaagctgcatgtccgagtgacgccccacccgtggactcacactgagcgcttccttcggcaggcttttggggatgactgggggagcatcctctcttttgagaaccgggaacctgtgggctcaggctgcgtggcccaggtgtacaaagcatacgccaacactgccttcctggagactgacagcgtccagagacttggcagggcctcctgtctgccgcccttctcacatactggggcagtcggtgggctgagagagctctttggataccttggaaatggccggaaacctccagaaaatctcgcagaccagtcgtttctagaaaggctgctcctccctaaagctgacctggttggatcaaatgcaggggtgtctcgggctcaggtccctggccaccaacctgaggccaccaacctcatctccgtggcagtgaaagtgttgcaccctggcctgctcgctcaggtgcatatggacctgctgctgatgaagattggcagccgagtcctgggagttttgccaggcatcaagtggcttagcttgcctgagattgtggaggaatttgagaagctgatggtccaacagattgacctgcgttacgaagctcagaatctagaacacttccaggtcaacttccggaatgtgaaagccgtcaagttccccacccctctgcgcccctttgtcaccagagaagtcttggtggaaacgtatgaagagagtgtgcctgtgtccagttaccagcaggcaggaattcccgtggacttgaaaaggaagattgcacggctggggatcaacatgctcctgaagatgatatttgtggataactttgtccatgcagaccttcaccctggaaacatcctggttcagggtgccaacggcctgtcctcgagtcaggaggcgcagctgcagcaggcggacatctgtgacactctggtggtggccgtgccatcttccctctgcccgctgcgactggtgctgctggatgctggcattgtggcggagctgcaggcccctgacctgaggaatttccgggcagttttcatggctgtggtgatggggcagggccagagagtggctgagctgatcctgcatcatgcccgggccagcgagtgcagggacgtggaggggttcaaaaccgagatggccatgctggtgacccaggccaggaagaacaccatcaccctggagaagcttcatgtgtccagccttctctctagtgtctttaagttgctgatgactcacaaggtaaagcttgagagcaactttgcctccattgtgtttgccatcatggtgttggaggggcttggccgctcactggaccccaaactggacatcctggaggcagcgaggcccttcctcctcacgggcccagtgtgccccccgtgatggggcagtggcctctgtgggcccttgtcaagagctggaggccactcccaagagcctctcctatggcagctgggacgttttaaaattgggacaccaatttcaaatgtaaccctccagtggtggaaggcacaccatggcttcctctgcttggtttgagggtctgttcaaaagctttgggccaattagggagtaaaaggagggaaggggcctatccattccattgtggaagctgggccaggtgccagggacactctccttcagggaaaatgttatgtggaggaggacgaataaatttattttgttttcc

SEQ ID NO: 370113 - DNA, 2349 bp, Homo sapiens
gccccgccctcccggcccccgcctgcgcccgcgccctgggctggtgcccgccaccccagcgatctcatactggcccctgggcgcacggtgaccctgcggctgcccggcccctgcctccgcccgcgcggccccctcgctcaggtcgcgggcgcccggggcctggcttcgcgtgggtcctggctcctcccgttccgcagttggtgccgtctgacagccccttccgcgcggcgcggcgcggcgcggcgggtgtcgggcggggcgcgggcctccggcctgaggcccggcgaggtgctggagggagcggggcgcggatccggcccagatgggcagctccgtccgcggggtcagggccgggcttcggcttcaccgcagcctcgcctgagcgggcgcctctgaagtggagggcgggccgcctgggccgcgggcctcgggaggatggtggcgccctggcgcgtctccgtcagggtttgcctgtcgcacctgaggtgcttcgagctcagacagggactcagcctcctgaggccctccgagtgccctcgcgatgccaggctctgctggcttctgctgggcactttgcccaaggtcgtctccctgtgcggggacgtgggtgagggggcccctgacgttctgagtcggcgaagggtccgctgcagcggggcggctggcgcggggcccgcggagagcctcccccgagcgggacctctgggcggcgtcttcctgcatctccgcctctggcttcgcgccggcgctctgttggtgaaattcttccccctcctactcctctaccccctcacctacctggctcccagcgtctccaccctctggctccacctgcttctgaaagccaccgagacctcaggcccaacctacatcaaactgggccagtgggccagcacccggcgcgatctgttttcggaggctttctgtgcccaattttccaagctgcatgtccgagtgacgccccacccgtggactcacactgagcgcttccttcggcaggcttttggggatgactgggggagcatcctctcttttgagaaccgggaacctgtgggctcaggctgcgtggcccaggtgtacaaagcatacgccaacactgccttcctggagactgacagcgtccagagacttggcagggcctcctgtctgccgcccttctcacatactggggcagtcggtgggctgagagagctctttggataccttggaaatggccggaaacctccagaaaatctcgcagaccagtcgtttctagaaaggctgctcctccctaaagctgacctggttggatcaaatgcaggggtgtctcgggctcaggtccctggccaccaacctgaggccaccaacctcatctccgtggcagtgaaagtgttgcaccctggcctgctcgctcaggtgcatatggacctgctgctgatgaagattggcagccgagtcctgggagttttgccaggcatcaagtggcttagcttgcctgagattgtggaggaatttgagaagctgatggtccaacagattgacctgcgttacgaagctcagaatctagaacacttccaggtcaacttccggaatgtgaaagccgtcaagttccccacccctctgcgcccctttgtcaccagagaagtcttggtggaaacgtatgaagagagtgtgcctgtgtccagttaccagcaggcaggaattcccgtggacttgaaaaggaagattgcacggctggggatcaacatgctcctgaagatgatatttgtggataactttgtccatgcagaccttcaccctggaaacatcctggttcagggtgccaacggcctgtcctcgagtcaggaggcgcagctgcagcaggcggacatctgtgacactctggtggtggccgtgccatcttccctctgcccgctgcgactggtgctgctggatgctggcattgtggcggagctgcaggcccctgacctgaggaatttccgggcagttttcatggctgtggtgatggggcagggccagagagtggctgagctgatcctgcatcatgcccgggccagcgagtgcagggacgtggaggggttcaaaaccgagatggccatgctggtgacccaggccaggaagaacaccatcaccctggagaagcttcatgtgtccagccttctctctagtgtctttaagttgctgatgactcacaaggtaaaatcacagtttatccctgcaccttcatagattatgttgctcgtcttagagaccaccaggcagcgaatggagtcaagcccttgcgctctccgagagtcctgccctgactacaggactagtttctcccattctttccttctccaggataaagttcctcattcctgtctttta

SEQ ID NO: 370114 - DNA, 1391 bp, Homo sapiens
cttgggtgtcgggaccacatcctcttttctttgataagaagccacctggctcttgcttggatggtgggacccagccctggctgggtaaaatgtgtccagcaggtttctcctgtctcacggttcctctttctgacaggtgttgcaccctggcctgctcgctcaggtgcatatggacctgctgctgatgaagattggcagccgagtcctgggagttttgccaggcatcaagtggcttagcttgcctgagattgtggaggaatttgagaagctgatggtccaacagattgacctgcgttacgaagctcagaatctagaacacttccaggtcaacttccggaatgtgaaagccgtcaagttccccacccctctgcgcccctttgtcaccagagaagtcttggtggaaacgtatgaagagagtgtgcctgtgtccagttaccagcaggcaggaattcccgtggacttgaaaaggaagattgcacggctggggatcaacatgctcctgaagatgatatttgtggataactttgtccatgcagaccttcaccctggaaacatcctggttcagggtgccaacggcctgtcctcgagtcaggaggcgcagctgcagcaggcggacatctgtgacactctggtggtggccgtgccatcttccctctgcccgctgcgactggtgctgctggatgctggcattgtggcggagctgcaggcccctgacctgaggaatttccgggcagttttcatggctgtggtgatggggcagggccagagagtggctgagctgatcctgcatcatgcccgggccagcgagtgcagggacgtggaggggttcaaaaccgagatggccatgctggtgacccaggccaggaagaacaccatcaccctggagaagcttcatgtgtccagccttctctctagtgtctttaagttgctgatgactcacaaggtaaagcttgagagcaactttgcctccattgtgtttgccatcatggtgttggaggggcttggccgctcactggaccccaaactggacatcctggaggcagcgaggcccttcctcctcacgggcccagtgtgccccccgtgatggggcagtggcctctgtgggcccttgtcaagagctggaggccactcccaagagcctctcctatggcagctgggacgttttaaaattgggacaccaatttcaaatgtaaccctccagtggtggaaggcacaccatggcttcctctgcttggtttgagggtctgttcaaaagctttgggccaattagggagtaaaaggagggaaggggcctatccattccattgtggaagctgggccaggtgccagggacactctccttcagggaaaatgttatgtggaggaggacgaataaatttattttgttttcc

SEQ ID NO: 370115 - DNA, 2658 bp, Homo sapiens
gccccgccctcccggcccccgcctgcgcccgcgccctgggctggtgcccgccaccccagcgatctcatactggcccctgggcgcacggtgaccctgcggctgcccggcccctgcctccgcccgcgcggccccctcgctcaggtcgcgggcgcccggggcctggcttcgcgtgggtcctggctcctcccgttccgcagttggtgccgtctgacagccccttccgcgcggcgcggcgcggcgcggcgggtgtcgggcggggcgcgggcctccggcctgaggcccggcgaggtgctggagggagcggggcgcggatccggcccagatgggcagctccgtccgcggggtcagggccgggcttcggcttcaccgcagcctcgcctgagcgggcgcctctgaagtggagggcgggccgcctgggccgcgggcctcgggaggatggtggcgccctggcgcgtctccgtcagggtttgcctgtcgcacctgaggtgcttcgagctcagacagggactcagcctcctgaggccctccgagtgccctcgcgatgccaggctctgctggcttctgctgggcactttgcccaaggtcgtctccctgtgcggggacgtgggtgagggggcccctgacgttctgagtcggcgaagggtccgctgcagcggggcggctggcgcggggcccgcggagagcctcccccgagcgggacctctgggcggcgtcttcctgcatctccgcctctggcttcgcgccggcgctctgttggtgaaattcttccccctcctactcctctaccccctcacctacctggctcccagcgtctccaccctctggctccacctgcttctgaaagccaccgagacctcaggcccaacctacatcaaactgggccagtgggccagcacccggcgcgatctgttttcggaggctttctgtgcccaattttccaagctgcatgtccgagtgacgccccacccgtggactcacactgagcgcttccttcggcaggcttttggggatgactgggggagcatcctctcttttgagaaccgggaacctgtgggctcaggctgcgtggcccaggtgtacaaagcatacgccaacactgccttcctggagactgacagcgtccagagacttggcagggcctcctgtctgccgcccttctcacatactggggcagtcggtgggctgagagagctctttggataccttggaaatggccggaaacctccagaaaatctcgcagaccagtcgtttctagaaaggctgctcctccctaaagctgacctggttggatcaaatgcaggggtgtctcgggctcaggtccctggccaccaacctgaggccaccaacctcatctccgtggcagtgaaagtgttgcaccctggcctgctcgctcaggtgcatatggacctgctgctgatgaagattggcagccgagtcctgggagttttgccaggcatcaagtggcttagcttgcctgagattgtggaggaatttgagaagctgatggtccaacagattgacctgcgttacgaagctcagaatctagaacacttccaggtcaacttccggaatgtgaaagccgtcaagttccccacccctctgcgcccctttgtcaccagagaagtcttggtggaaacgtatgaagagagtgtgcctgtgtccagttaccagcaggcaggaattcccgtggacttgaaaaggaagattgcacggctggggatcaacatgctcctgaagatgatatttgtggataactttgtccatgcagaccttcaccctggaaacatcctggttcagggtgccaacggcctgtcctcgagtcaggaggcgcagctgcagcaggcggacatctgtgacactctggtggtggccgtgccatcttccctctgcccgctgcgactggtgctgctggatgctggcattgtggcggagctgcaggcccctgacctgaggaatttccgggcagttttcatggctgtggtgatggggcagggccagagagtggctgagctgatcctgcatcatgcccgggccagcgagtgcagggacgtggaggggttcaaaaccgagatggccatgctggtgacccaggccaggaagaacaccatcaccctggagaagcttcatgtgtccagccttctctctagtgtctttaagttgctgatgactcacaaggtaaagcttgagagcaactttgcctccattgtgtttgccatcatggtgttggaggggcttggccgctcactggaccccaaactggacatcctggaggcagcgaggcccttcctcctcacgggcccagtgtgccccccgtgatggggcagtggcctctgtgggcccttgtcaagagctggaggccactcccaagagcctctcctatggcagctgggacgttttaaaattgggacaccaatttcaaatgtaaccctccagtggtggaaggcacaccatggcttcctctgcttggtttgagggtctgttcaaaagctttgggccaattagggagtaaagagggaggctatcattcatgtggagggggcagtgccgggaatttctcagaatgttgtggggggggcatatctttgttcaaaaaaaaaatgggttttttgggggaaaggtaagggggtaggtcgaccttgaagggatgggcaagggaac

SEQ ID NO: 370116 - DNA, 2565 bp, Homo sapiens
gccccgccctcccggcccccgcctgcgcccgcgccctgggctggtgcccgccaccccagcgatctcatactggcccctgggcgcacggtgaccctgcggctgcccggcccctgcctccgcccgcgcggccccctcgctcaggtcgcgggcgcccggggcctggcttcgcgtgggtcctggctcctcccgttccgcagttggtgccgtctgacagccccttccgcgcggcgcggcgcggcgcggcgggtgtcgggcggggcgcgggcctccggcctgaggcccggcgaggtgctggagggagcggggcgcggatccggcccagatgggcagctccgtccgcggggtcagggccgggcttcggcttcaccgcagcctcgcctgagcgggcgcctctgaagtggagggcgggccgcctgggccgcgggcctcgggaggatggtggcgccctggcgcgtctccgtcagggtttgcctgtcgcacctgaggtgcttcgagctcagacagggactcagcctcctgaggccctccgagtgccctcgcgatgccaggctctgctggcttctgctgggcactttgcccaaggtcgtctccctgtgcggggacgtgggtgagggggcccctgacgttctgagtcggcgaagggtccgctgcagcggggcggctggcgcggggcccgcggagagcctcccccgagcgggacctctgggcggcgtcttcctgcatctccgcctctggcttcgcgccggcgctctgttggtgaaattcttccccctcctactcctctaccccctcacctacctggctcccagcgtctccaccctctggctccacctgcttctgaaagccaccgagacctcaggcccaacctacatcaaactgggccagtgggccagcacccggcgcgatctgttttcggaggctttctgtgcccaattttccaagctgcatgtccgagtgacgccccacccgtggactcacactgagcgcttccttcggcaggcttttggggatgactgggggagcatcctctcttttgagaaccgggaacctgtgggctcaggctgcgtggcccaggtgtacaaagcatacgccaacactgccttcctggagactgacagcgtccagagacttggcagggcctcctgtctgccgcccttctcacatactggggcagtcggtgggctgagagagctctttggataccttggaaatggccggaaacctccagaaaatctcgcagaccagtcgtttctagaaaggctgctcctccctaaagctgacctggttggatcaaatgcaggggtgtctcgggctcaggtccctggccaccaacctgaggccaccaacctcatctccgtggcagtgaaagtgttgcaccctggcctgctcgctcaggtgcatatggacctgctgctgatgaagattggcagccgagtcctgggagttttgccaggcatcaagtggcttagcttgcctgagattgtggaggaatttgagaagctgatggtccaacagattgacctgcgttacgaagctcagaatctagaacacttccaggtcaacttccggaatgtgaaagccgtcaagttccccacccctctgcgcccctttgtcaccagagaagtcttggtggaaacgtatgaagagagtgtgcctgtgtccagttaccagcaggcaggaattcccgtggacttgaaaaggaagattgcacggctggggatcaacatgctcctgaagatgatatttgtggataactttgtccatgcagaccttcaccctggaaacatcctggttcagggtgccaacggcctgtcctcgagtcaggaggcgcagctgcagcaggcggacatctgtgacactctggtggtggccgtgccatcttccctctgcccgctgcgactggtgctgctggatgctggcattgtggcggagctgcaggcccctgacctgaggaatttccgggcagttttcatggctgtggtgatggggcagggccagagagtggctgagctgatcctgcatcatgcccgggccagcgagtgcagggacgtggaggggttcaaaaccgagatggccatgctggtgacccaggccaggaagaacaccatcaccctggagaagcttcatgtgtccagccttctctctagtgtctttaagttgctgatgactcacaaggtaaagcttgagagcaactttgcctccattgtgtttgccatcatggtgttggaggggcttggccgccagtgtgccccccgtgatggggcagtggcctctgtgggcccttgtcaagagctggaggccactcccaagagcctctcctatggcagctgggacgttttaaaattgggacaccaatttcaaatgtaaccctccagtggtggaaggcacaccatggcttcctctgcttggtttgagggtctgttcaaaagctttgggccaattagggagtaaaaggagggaaggggcctatccattccattgtggaagctgggccaggtgccagggacactctccttcagggaaaatgttatgtggaggaggacgaataaatttattttgttttcc

SEQ ID NO: 370117 - DNA, 1857 bp, Homo sapiens
gccccgccctcccggcccccgcctgcgcccgcgccctgggctggtgcccgccaccccagcgatctcatactggcccctgggcgcacggtgaccctgcggctgcccggcccctgcctccgcccgcgcggccccctcgctcaggtcgcgggcgcccggggcctggcttcgcgtgggtcctggctcctcccgttccgcagttggtgccgtctgacagccccttccgcgcggcgcggcgcggcgcggcgggtgtcgggcggggcgcgggcctccggcctgaggcccggcgaggtgctggagggagcggggcgcggatccggcccagatgggcagctccgtccgcggggtcagggccgggcttcggcttcaccgcagcctcgcctgagcgggcgcctctgaagtggagggcgggccgcctgggccgcgggcctcgggaggatggtggcgccctggcgcgtctccgtcagggtttgcctgtcgcacctgaggtgcttcgagctcagacagggactcagcctcctgaggccctccgagtgccctcgcgatgccaggctctgctggcttctgctgggcactttgcccaaggtcgtctccctgtgcggggacgtgggtgagggggcccctgacgttctgagtcggcgaagggtccgctgcagcggggcggctggcgcggggcccgcggagagcctcccccgagcgggacctctgggcggcgtcttcctgcatctccgcctctggcttcgcgccggcgctctgttggtgaaattcttccccctcctactcctctaccccctcacctacctggctcccagcgtctccaccctctggctccacctgcttctgaaagccaccgagacctcaggcccaacctacatcaaactgggccagtgggccagcacccggcgcgatctgttttcggaggctttctgtgcccaattttccaagctgcatgtccgagtgacgccccacccgtggactcacactgagcgcttccttcggcaggcttttggggatgactgggggagcatcctctcttttgagaaccgggaacctgtgggctcaggctgcgtggcccaggtgtacaaagcatacgccaacactgccttcctggagactgacagcgtccagagacttggcagggcctcctgtctgccgcccttctcacatactggggcagtcggtgggctgagagagctctttggataccttggaaatggccggaaacctccagaaaatctcgcagaccagtcgtttctagaaaggctgctcctccctaaagctgacctggttggatcaaatgcaggggtgtctcgggctcaggtccctggccaccaacctgaggccaccaacctcatctccgtggcagtgaaagtgttgcaccctggcctgctcgctcaggtgcatatggacctgctgctgatgaagattggcagccgagtcctgggagttttgccaggcatcaagtggcttagcttgcctgagattgtggaggaatttgagaagctgatggtccaacagattgacctgcgttacgaagctcagaatctagaacacttccaggtcaacttccggaatgtgaaagccgtcaagttccccactcccaagagcctctcctatggcagctgggacgttttaaaattgggacaccaatttcaaatgtaaccctccagtggtggaaggcacaccatggcttcctctgcttggtttgagggtctgttcaaaagctttgggccaattagggagtaaaaggagggaaggggcctatccattccattgtggaagctgggccaggtgccagggacactctccttcagggaaaatgttatgtggaggaggacgaataaatttattttgttttcc

SEQ ID NO: 370118 - DNA, 2634 bp, Homo sapiens
gccccgccctcccggcccccgcctgcgcccgcgccctgggctggtgcccgccaccccagcgatctcatactggcccctgggcgcacggtgaccctgcggctgcccggcccctgcctccgcccgcgcggccccctcgctcaggtcgcgggcgcccggggcctggcttcgcgtgggtcctggctcctcccgttccgcagttggtgccgtctgacagccccttccgcgcggcgcggcgcggcgcggcgggtgtcgggcggggcgcgggcctccggcctgaggcccggcgaggtgctggagggagcggggcgcggatccggcccagatgggcagctccgtccgcggggtcagggccgggcttcggcttcaccgcagcctcgcctgagcgggcgcctctgaagtggagggcgggccgcctgggccgcgggcctcgggaggatggtggcgccctggcgcgtctccgtcagggtttgcctgtcgcacctgaggtgcttcgagctcagacagggactcagcctcctgaggccctccgagtgccctcgcgatgccaggctctgctggcttctgctgggcactttgcccaaggtcgtctccctgtgcggggacgtgggtgagggggcccctgacgttctgagtcggcgaagggtccgctgcagcggggcggctggcgcggggcccgcggagagcctcccccgagcgggacctctgggcggcgtcttcctgcatctccgcctctggcttcgcgccggcgctctgttggtgaaattcttccccctcctactcctctaccccctcacctacctggctcccagcgtctccaccctctggctccacctgcttctgaaagccaccgagacctcaggcccaacctacatcaaactgggccagtgggccagcacccggcgcgatctgttttcggaggctttctgtgcccaattttccaagctgcatgtccgagtgacgccccacccgtggactcacactgagcgcttccttcggcaggcttttggggatgactgggggagcatcctctcttttgagaaccgggaacctgtgggctcaggctgcgtggcccaggtgtacaaagcatacgccaacactgccttcctggagactgacagcgtccagagacttggcagggcctcctgtctgccgcccttctcacatactggggcagtcggtgggctgagagagctctttggataccttggaaatggccggaaacctccagaaaatctcgcagaccagtcgtttctagaaaggctgctcctccctaaagctgacctggttggatcaaatgcaggggtgtctcgggctcaggtccctggccaccaacctgaggccaccaacctcatctccgtggcagtgaaagtgttgcaccctggcctgctcgctcaggtgcatatggacctgctgctgatgaagattggcagccgagtcctgggagttttgccaggcatcaagtggcttagcttgcctgagattgtggaggaatttgagaagctgatggtccaacagattgacctgcgttacgaagctcagaatctagaacacttccaggtcaacttccggaatgtgaaagccgtcaagttccccacccctctgcgcccctttgtcaccagagaagtcttggtggaaacgtatgaagagagtgtgcctgtgtccagttaccagcaggcaggaattcccgtggacttgaaaaggaagattgcacggctggggatcaacatgctcctgaagatgatatttgtggataactttgtccatgcagaccttcaccctggaaacatcctggttcagggtgccaacggcctgtcctcgagtcaggaggcgcagctgcagcaggcggacatctgtgacactctggtggtggccgtgccatcttccctctgcccgctgcgactggtgctgctggatgctggcattgtggcggagctgcaggcccctgacctgaggaatttccgggcagttttcatggctgtggtgatggggcagggccagagagtggctgagctgatcctgcatcatgcccgggccagcgagtgcagggacgtggaggggttcaaaaccgagatggccatgctggtgacccaggccaggaagaacaccatcaccctggagaagcttcatgtgtccagccttctctctagtgtctttaagttgctgatgactcacaaggtaaaatcacagtttatccctgcaccttcatagattatgttgctcgtcttagagaccaccaggcagcgaatggagtcaagcccttgcgctctccgagagtcctgccctgactacaggactagtttctcccattctttccttctccaggataaagttcctcattcctgtcttttagtgagcagtatggtttaggtggacagagattcctttggtgcagtttttttcaaggaggtgatgttattttttccttcccaggtcttgaggggacattcaaagcaggcagagaggggttgggatggctccagatggctgggagggagaacaccagctggtcacgcagcccctcgtgccagtgcgcatcaggtacagtgtggaggcgggaaagggacaaaaagacggcagtctcttccctgagcctatgccaacccagccttaaagccagtggatcgaatcaagcca

SEQ ID NO: 370119 - DNA, 622 bp, Homo sapiens
gattcctggctacatcgttcaacccccccaaccgaaaaaagagcttaggggcaccgatggcctgaggcttccaccactaaacgcaaagctgtagatacctattgcttggattataagccttccaagggaagaaggtgggctgcaagagcaccaagcaccagaatcacatatgggactatcaccaaagagagagactactgcgcggaagaccagactatcgagagctggagagaagaaggtttcccagtgggcttgaagcttgctgtgcttggtattttcatcattgtggtgtttgtctacctgactgtggaaaataagtcgctgtttggttaagtaatttaggagcaaagcaatgctccaagcgaggcctcctgcttcaggaaagaaccaaaacactaccctgaagggccagcctagcctgcagccctcccttgcagggagccttcccttgcactgtgctgctctcacagatcggtgtctgggctcagccaggtggaaggaacctgcctaaccaggcacctgtgttaagagcatgatggttaggaaatcccccaagtcatgtcaactctcattaaaggtgcttccatatttgagcaggcgtcaaacaaggaaaaaaaaaggc

SEQ ID NO: 370120 - DNA, 757 bp, Homo sapiens
acctcagagtgaaactcacccagctttagtaaccaactcgattgcatagactttagataaccatgtgaaggggattctaccatcagaaaagaggccaaacttctatcatcatggtggatgtgaagtgtctgagtgactgtaaattgcagaaccaacttgagaagcttggattttcacctggcccaatactactggcctgaggcttccaccactaaacgcaaagctgtagatacctattgcttggattataagccttccaagggaagaaggtgggctgcaagagcaccaagcaccagaatcacatatgggactatcaccaaagagagagactactgcgcggaagaccagactatcgagagctggagagaagaaggtttcccagtgggcttgaagcttgctgtgcttggtattttcatcattgtggtgtttgtctacctgactgtggaaaataagtcgctgtttggttaagtaatttaggagcaaagcaatgctccaagcgaggcctcctgcttcaggaaagaaccaaaacactaccctgaagggccagcctagcctgcagccctcccttgcagggagccttcccttgcactgtgctgctctcacagatcggtgtctgggctcagccaggtggaaggaacctgcctaaccaggcacctgtgttaagagcatgatggttaggaaatcccccaagtcatgtcaactctcattaaaggtgcttccatatttgagcaggcgtcaaacaaggaaaaaaaaaggc

SEQ ID NO: 370121 - DNA, 814 bp, Homo sapiens
agtggctctgcggggaattgtgaggcggactgcgagggaaagggggccttgttgagtccgccaggattctaccatcagaaaagaggccaaacttctatcatcatggtggatgtgaagtgtctgagtgactgtaaattgcagaaccaacttgagaagcttggattttcacctggcccaatactacagcttaatatcattttgcaaggaaatatcatactctcaacagaaaaaagcaagaaactcaaaaaatggcctgaggcttccaccactaaacgcaaagctgtagatacctattgcttggattataagccttccaagggaagaaggtgggctgcaagagcaccaagcaccagaatcacatatgggactatcaccaaagagagagactactgcgcggaagaccagactatcgagagctggagagaagaaggtttcccagtgggcttgaagcttgctgtgcttggtattttcatcattgtggtgtttgtctacctgactgtggaaaataagtcgctgtttggttaagtaatttaggagcaaagcaatgctccaagcgaggcctcctgcttcaggaaagaaccaaaacactaccctgaagggccagcctagcctgcagccctcccttgcagggagccttcccttgcactgtgctgctctcacagatcggtgtctgggctcagccaggtggaaggaacctgcctaaccaggcacctgtgttaagagcatgatggttaggaaatcccccaagtcatgtcaactctcattaaaggtgcttccatatttgagcaggcgtcaaacaaggaaaaaaaaaggc

SEQ ID NO: 370122 - DNA, 672 bp, Homo sapiens
agtggctctgcggggaattgtgaggcggactgcgagggaaagggggccttgttgagtccgccaggattctaccatcagaaaagaggccaaacttctatcatcatggtggatgtgaagtgtctgagtgactgtaaattgcagaaccaacttgagaagcttggattttcacctggcccaatactacgtgggctgcaagagcaccaagcaccagaatcacatatgggactatcaccaaagagagagactactgcgcggaagaccagactatcgagagctggagagaagaaggtttcccagtgggcttgaagcttgctgtgcttggtattttcatcattgtggtgtttgtctacctgactgtggaaaataagtcgctgtttggttaagtaatttaggagcaaagcaatgctccaagcgaggcctcctgcttcaggaaagaaccaaaacactaccctgaagggccagcctagcctgcagccctcccttgcagggagccttcccttgcactgtgctgctctcacagatcggtgtctgggctcagccaggtggaaggaacctgcctaaccaggcacctgtgttaagagcatgatggttaggaaatcccccaagtcatgtcaactctcattaaaggtgcttccatatttgagcaggcgtcaaacaaggaaaaaaaaaggc

SEQ ID NO: 370123 - DNA, 518 bp, Homo sapiens
gacaccatttggtttggtagcagctccttacttgctgtgcataatgataacttctccgcatctcttgacattgtatcatgggcagtgtgcctatgaagtcaaccagtacctccttttgtttgaactttggttaaattaatcatctgatttgcacatcaatctgttgctatgggggttactgatgtcacactgtcagtattatgattaccataatatctaacaggcaaaaagggactggttgctagtggaaacctcagagtgaaactcacccagctttagtaaccaactcgattgcatagactttagataaccatgtgaaggggtaagtgaattaatcatccagttggattccatttgaatatttttcttccatatgtgtgttccctctaggcaattgtctagtgccacttgaaattgttgagggctctattggaggttatttttgggaagctggtgaaacaacagacagctgttctcaggaacaaatgtcataggatctgccgaagcaagcttccagt

SEQ ID NO: 370124 - DNA, 795 bp, Homo sapiens
agtggctctgcggggaattgtgaggcggactgcgagggaaagggggccttgttgagtccgccaggattctaccatcagaaaagaggccaaacttctatcatcatggtggatgtgaagtgtctgagtgactgtaaattgcagaaccaacttgagaagcttggattttcacctggcccaatactaccttccaccagaaagttgtatgaaaaaaagttagtacagttgttggtctcacctccctgtgcaccacctgtgatgaatggacccagagagctggatggagcgcaggacagtgatgacagcgaaggtgggctgcaagagcaccaagcaccagaatcacatatgggactatcaccaaagagagagactactgcgcggaagaccagactatcgagagctggagagaagaaggtttcccagtgggcttgaagcttgctgtgcttggtattttcatcattgtggtgtttgtctacctgactgtggaaaataagtcgctgtttggttaagtaatttaggagcaaagcaatgctccaagcgaggcctcctgcttcaggaaagaaccaaaacactaccctgaagggccagcctagcctgcagccctcccttgcagggagccttcccttgcactgtgctgctctcacagatcggtgtctgggctcagccaggtggaaggaacctgcctaaccaggcacctgtgttaagagcatgatggttaggaaatcccccaagtcatgtcaactctcattaaaggtgcttccatatttgagcaggcgtcaaacaaggaaaaaaaaaggc

SEQ ID NO: 370125 - DNA, 945 bp, Homo sapiens
acctcagagtgaaactcacccagctttagtaaccaactcgattgcatagactttagataaccatgtgaaggggattctaccatcagaaaagaggccaaacttctatcatcatggtggatgtgaagtgtctgagtgactgtaaattgcagaaccaacttgagaagcttggattttcacctggcccaatactaccttccaccagaaagttgtatgaaaaaaagttagtacagttgttggtctcacctccctgtgcaccacctgtgatgaatggacccagagagctggatggagcgcaggacagtgatgacagcgaagagcttaatatcattttgcaaggaaatatcatactctcaacagaaaaaagcaagaaactcaaaaaatggcctgaggcttccaccactaaacgcaaagctgtagatacctattgcttggattataagccttccaagggaagaaggtgggctgcaagagcaccaagcaccagaatcacatatgggactatcaccaaagagagagactactgcgcggaagaccagactatcgagagctggagagaagaaggtttcccagtgggcttgaagcttgctgtgcttggtattttcatcattgtggtgtttgtctacctgactgtggaaaataagtcgctgtttggttaagtaatttaggagcaaagcaatgctccaagcgaggcctcctgcttcaggaaagaaccaaaacactaccctgaagggccagcctagcctgcagccctcccttgcagggagccttcccttgcactgtgctgctctcacagatcggtgtctgggctcagccaggtggaaggaacctgcctaaccaggcacctgtgttaagagcatgatggttaggaaatcccccaagtcatgtcaactctcattaaaggtgcttccatatttgagcaggcgtcaaacaaggaaaaaaaaaggc

SEQ ID NO: 370126 - DNA, 651 bp, Homo sapiens
atcgtgccctggaccaggcggcccgtggcgcgggtggcggctgctgtgctggctgtggggacggaggcggtgaagtgccatcttcggctaggtcgtcacaggctccggctcatggcatcaagtggcatccatcataagatcgttaactgaagacaatatgcaaaattctcacatggatgaatacagaaattctagtaatggcagcacaggcaacagttcagaggtagtggtagaacatcctactgatttcagtactgagattatgaacgttacagaaatggaacagtcacctgatgactctcccaatgtgaatgcatctacagaagaaactgaaatggcaagtgctgtggaccttccagtgacgctgacagaaacagaagcaaatttccctccagaatatgaaaaattttggaaaactgtagaaaataatcctcaggattttacaggctgggtatatttgcttcaatatgtagaacaggaggttagtaactattaaaatggtatcagaagggacaaattaatcaagtcattaatttataatgaaacagtagaccttattgtttatgattaaaattgactcataattttcaaatgaagttgaataacattaggtagctacatttttagctttgaaaatagcttacagctttt

SEQ ID NO: 370127 - DNA, 3416 bp, Homo sapiens
atcgtgccctggaccaggcggcccgtggcgcgggtggcggctgctgtgctggctgtggggacggaggcggtgaagtgccatcttcggctaggtcgtcacaggctccggctcatggcatcaagtggcatccatcataagatcgttaactgaagacaatatgcaaaattctcacatggatgaatacagaaattctagtaatggcagcacaggcaacagttcagaggtagtggtagaacatcctactgatttcagtactgagattatgaacgttacagaaatggaacagtcacctgatgactctcccaatgtgaatgcatctacagaagaaactgaaatggcaagtgctgtggaccttccagtgacgctgacagaaacagaagcaaatttccctccagaatatgaaaaattttggaaaactgtagaaaataatcctcaggattttacaggctgggtatatttgcttcaatatgtagaacaggagaatcacttgatggctgccaggaaggcatttgacagatttttcatacactatccgtattgctatggttactggaaaaagtatgcagaccttgaaaagcggcacgacaacattaaaccatcagatgaggtttatcggcgggggcttcaggcaatacctcttagtgttgacctttggatacattatataaacttcttaaaagaaacattggaccctggtgatcctgagacaaacaatacaataagaggaacttttgagcatgctgttctagctgcaggaacagatttccgttctgacagactgtgggaaatgtatataaactgggaaaatgagcagggaaacctgagagaagttacagctatatatgatcgtattcttggtattccaacacagctgtatagtcatcattttcagagatttaaagaacatgtacagaataatttgcctagagatcttttaactggtgaacagtttattcagttgcgaagggaattagcttctgtaaatggtcatagtggtgatgatggtcctcctggtgatgatctaccatcgggaattgaagacataaccgatcctgcaaagctaattacagaaatagaaaacatgagacatagaatcattgagattcatcaagaaatgtttaattataatgagcatgaagttagtaaaaggtggacatttgaagaaggtattaaaagaccttactttcatgtgaaacctttggaaaaggcacaactaaaaaactggaaagaatacttagaatttgaaattgaaaatgggactcatgaacgagtgtggttctctttgaaagatgtgtcatatcatgtgccctctatgaggagttttggattaaggtaagaaaatcatgtgctcttaaacttgaatatattataaacattgatctagtgactaaccttttttgtacttctgttgaatgttgttcatataactatatctgttgcattaggagatggtctgcttgcaaccagatttgactgctgcatatgccaacctcgttgcctctcttcgtccttccttacagaaactagtctagtggttcaataaaggtgctgaatgggtttaaaaatagaattttatcgttctgtcacaaatttaatggcttgttcaactgtaaattattcagtatttcctcttttctgtatgtagtatgccaagtacatggaaaaccatagcattgaaggagtgaggcatgtcttcagcagagcttgtactatacatctcccaaagaaacccatggtgcatatgctttgggcagcttttgaggaacagcagggtaatattaatgaagccaggaatatcttgaaaacatttgaagaatgtgttctaggattggcaatggttcgtttacgaagagtaagtttagaacgacggcatggaaatctggaagaagctgaacatttgcttcaggatgccattaagaatgccaaatcaaataatgaatcttcattttatgctgtcaaactagcccggcatcttttcaaaatacagaaaaaccttccaaaatcaagaaaggtgcttttggaagcaatcgaaagagacaaagagaacacaaagttatacctcaatttacttgaaatggaatatagtggtgacctcaaacaaaatgaagaaaatatcctaaattgttttgacaaagctgtacatggttcattacctattaaaatgagaattacattttctcagagaaaagtggaatttcttgaagattttggttccgatgttaataagcttctgaatgcttatgatgaacatcaaacactcctgaaagaacaggattctttaaaaaggaaagcagaaaatggatcagaagaaccagaggaaaagaaagcacatacagaagatacaacttcatcatctacacagatgattgatggtgatttacaggcaaaccaagctgtatataattatagtgcgtggtatcaagtgagtctgcataattataattctttgttcatagatgttattagcataaattaggatagtttctttttttttaaaaaaagtttttgttccaattgtgtaatacattctttggtggttaagtactagaattttagcagtgaacacttgcttgttttcttaaacatagctgctttaattatacttttacatatggaactctgccacagttctaatatgctaacatacttactttttcctttcagtacaattatcagaatccttggaattatggacaatattatcctccccctccaacctgatgggaaaaatgtaaatttcaaatgcagtgtgtgaaaagtatgaaattattattttttttaatgagggatgtaaacagtataagcttgttgtatttgataacctgtcttccttgtttctgtgtaacatgatttgtttagtaatagggggaaaatgtcaattagtagcttaccacagatactgtttcctaccatttataaaatttactttttattgaaaaactattttttgatttttgcattaagtggtctagaattcttttgcaatgcatttgcaacagaattttgtagccttaaggggtaggaagaaaaacctgactgcaaatcatgtcagtgtagtacaaaattctgaaaacacataagggctggttatttacctccttttttttttttttttttaaagaaaaaaggacttttaacctttgctgacaaggttttgtctgtttcagttatacttgtgaattgtgatctaactgcagaaaggatacattattaaaatactttgccttggaatagattataaatgagaaaatggaatgtttgcatccctttaaaaatgaaaatcatatcaaaagtatgttgtttcaggagactttgtatttagaatattcatgtaaaacttgtgaacaagctttcattttgatcaaactgatcttcatttttgtaataaaacggaagactcatccaaaaaaaaaaaa

SEQ ID NO: 370128 - DNA, 3425 bp, Homo sapiens
atcgtgccctggaccaggcggcccgtggcgcgggtggcggctgctgtgctggctgtggggacggaggcggtgaagtgccatcttcggctaggtcgtcacaggctccggctcatggcatcaagtggcatccatcataagatcgttaactgaagacaatatgcaaaattctcacatggatgaatacagaaattctagtaatggcagcacaggcaacagttcagaggtagtggtagaacatcctactgatttcagtactgagattatgaacgttacagaaatggaacagtcacctgatgactctcccaatgtgaatgcatctacagaagaaactgaaatggcaagtgctgtggaccttccagtgacgctgacagaaacagaagcaaatttccctccagaatatgaaaaattttggaaaactgtagaaaataatcctcaggattttacaggctgggtatatttgcttcaatatgtagaacaggagaatcacttgatggctgccaggaaggcatttgacagatttttcatacactatccgtattgctatggttactggaaaaagtatgcagaccttgaaaagcggcacgacaacattaaaccatcagatgaggtgcgtacatcactgaataaacttatctccaataggtactgtaagccaattaataacaaaacaaagatttttttttttttttttttttggctggcagtacctaccatttatggtcaaacaatttttatagggtatttatttgcatttgtcactcttgtggcatttgtagctaatattttctctctttgttggcaggtgcgttaaacctctacagtttgtcaagctttgcagtgcaagcctctgtattacactgcagcttaacaagtagggcagggcttttctctcacttacatttatttctcattttccaaacaatatagttggtttgctagtcacatttgctacgtcttattgcatttttggtcagacgctgtcattgatgctctaatgggtctgtgccctatggtctgtaacccaaagcctgcccacacaacccggtcagaatgcagggactgctgcgctttgaagatcaagactctgcacgtggggatcagaacattgccatgttctatccaacctccacccaaatggtttatcggcgggggcttcaggcaatacctcttagtgttgacctttggatacattatataaacttcttaaaagaaacattggaccctggtgatcctgagacaaacaatacaataagaggaacttttgagcatgctgttctagctgcaggaacagatttccgttctgacagactgtgggaaatgtatataaactgggaaaatgagcagggaaacctgagagaagttacagctatatatgatcgtattcttggtattccaacacagctgtatagtcatcattttcagagctaattacagaaatagaaaacatgagacatagaatcattgagattcatcaagaaatgtttaattataatgagcatgaagttagtaaaaggtggacatttgaagaaggtattaaaagaccttactttcatgtgaaacctttggaaaaggcacaactaaaaaactggaaagaatacttagaatttgaaattgaaaatgggactcatgaacgagtgtggttctctttgaaagatgtgtcatatcatgtgccctctatgaggagttttggattaaggagatggtctgcttgcaaccagatttgactgctgcatatgccaacctcgttgcctctcttcgtccttccttacagaaactagtctagtggttcaataaaggtgctgaatgggtttaaaaatagaattttatcgttctgtcacaaatttaatggcttgttcaactgtaaattattcagtatttcctcttttctgtatgtagtatgccaagtacatggaaaaccatagcattgaaggagtgaggcatgtcttcagcagagcttgtactatacatctcccaaagaaacccatggtgcatatgctttgggcagcttttgaggaacagcagggtaatattaatgaagccaggaatatcttgaaaacatttgaagaatgtgttctaggattggcaatggttcgtttacgaagagtaagtttagaacgacggcatggaaatctggaagaagctgaacatttgcttcaggatgccattaagaatgccaaatcaaataatgaatcttcattttatgctgtcaaactagcccggcatcttttcaaaatacagaaaaaccttccaaaatcaagaaaggtgcttttggaagcaatcgaaagagacaaagagaacacaaagttatacctcaatttacttgaaatggaatatagtggtgacctcaaacaaaatgaagaaaatatcctaaattgttttgacaaagctgtacatggttcattacctattaaaatgagaattacattttctcagagaaaagtggaatttcttgaagattttggttccgatgttaataagcttctgaatgcttatgatgaacatcaaacactcctgaaagaacaggattctttaaaaaggaaagcagaaaatggatcagaagaaccagaggaaaagaaagcacatacagaagatacaacttcatcatctacacagatgattgatggtgatttacaggcaaaccaagctgtatataattatagtgcgtggtatcaatacaattatcagaatccttggaattatggacaatattatcctccccctccaacctgatgggaaaaatgtaaatttcaaatgcagtgtgtgaaaagtatgaaattattattttttttaatgagggatgtaaacagtataagcttgttgtatttgataacctgtcttccttgtttctgtgtaacatgatttgtttagtaatagggggaaaatgtcaattagtagcttaccacagatactgtttcctaccatttataaaatttactttttattgaaaaactattttttgatttttgcattaagtggtctagaattcttttgcaatgcatttgcaacagaattttgtagccttaaggggtaggaagaaaaacctgactgcaaatcatgtcagtgtagtacaaaattctgaaaacacataagggctggttatttacctccttttttttttttttttttaaagaaaaaaggacttttaacctttgctgacaaggttttgtctgtttcagttatacttgtgaattgtgatctaactgcagaaaggatacattattaaaatactttgccttggaatagattataaatgagaaaatggaatgtttgcatccctttaaaaatgaaaatcatatcaaaagtatgttgtttcaggagactttgtatttagaatattcatgtaaaacttgtgaacaagctttcattttgatcaaactgatcttcatttttgtaataaaacggaagactcatccaaaaaaaaaaaa

SEQ ID NO: 370129 - DNA, 1439 bp, Homo sapiens
  misc_feature (5)..(5): n is a, c, g, or t
ctggnatgtggacagaagggtgtggcacgtgtctgggagctgctgagtcaggttgcgggcaatgccaagagtacgtgactcaatgtgctcagcacagtgggactcatcagtatcatcatatccaatgctccttttccactctacccatgagaggtagacctcgtgccgaattcggcacgagggaatgccaaatcaaataatgaatcttcattttatgctgtcaaactagcccggcatcttttcaaaatacagaaaaaccttccaaaatcaagaaaggtgcttttggaagcaatcgaaagagacaaagagaacacaaagttatacctcaatttacttgaaatggaatatagtggtgacctcaaacaaaatgaagaaaatatcctaaattgttttgacaaagctgtacatggttcattacctattaaaatgagaattacattttctcagagaaaagtggaatttcttgaagattttggttccgatgttaataagcttctgaatgcttatgatgaacatcaaacactcctgaaagaacaggattctttaaaaaggaaagcagaaaatggatcagaagaaccagaggaaaagaaagcacatacagaagatacaacttcatcatctacacagatgattgatggtgatttacaggcaaaccaagctgtatataattatagtgcgtggtatcaatacaattatcagaatccttggaattatggacaatattatcctccccctccaacctgatgggaaaaatgtaaatttcaaatgcagtgtgtgaaaagtatgaaattattattttttttaatgagggatgtaaacagtataagcttgttgtatttgataacctgtcttccttgtttctgtgtaacatgatttgtttagtaatagggggaaaatgtcaattagtagcttaccacagatactgtttcctaccatttataaaatttactttttattgaaaaactattttttgatttttgcattaagtggtctagaattcttttgcaatgcatttgcaacagaattttgtagccttaaggggtaggaagaaaaacctgactgcaaatcatgtcagtgtagtacaaaattctgaaaacacataagggctggttatttacctccttttttttttttttttttaaagaaaaaaggacttttaacctttgctgacaaggttttgtctgtttcagttatacttgtgaattgtgatctaactgcagaaaggatacattattaaaatactttgccttggaatagattataaatgagaaaatggaatgtttgcatccctttaaaaatgaaaatcatatcaaaagtatgttgtttcaggagactttgtatttagaatattcatgtaaaacttgtgaacaagctttcattttgatcaaactgatcttcatttttgtaataaaacggaagactcatccaaaaaaaaaaaa

SEQ ID NO: 370130 - DNA, 2930 bp, Homo sapiens
atcgtgccctggaccaggcggcccgtggcgcgggtggcggctgctgtgctggctgtggggacggaggcggtgaagtgccatcttcggctaggtcgtcacaggctccggctcatggcatcaagtggcatccatcataagatcgttaactgaagacaatatgcaaaattctcacatggatgaatacagaaattctagtaatggcagcacaggcaacagttcagaggtagtggtagaacatcctactgatttcagtactgagattatgaacgttacagaaatggaacagtcacctgatgactctcccaatgtgaatgcatctacagaagaaactgaaatggcaagtgctgtggaccttccagtgacgctgacagaaacagaagcaaatttccctccagaatatgaaaaattttggaaaactgtagaaaataatcctcaggattttacaggctgggtatatttgcttcaatatgtagaacaggagaatcacttgatggctgccaggaaggcatttgacagatttttcatacactatccgtattgctatggttactggaaaaagtatgcagaccttgaaaagcggcacgacaacattaaaccatcagatgaggtgcgtacatcactgaataaacttatctccaataggtactgtaagccaattaataacaaaacaaagatttttttttttttttttttttggctggcagtacctaccatttatggtcaaacaatttttatagggtatttatttgcatttgtcactcttgtggcatttgtagctaatattttctctctttgttggcaggtgcgttaaacctctacagtttgtcaagctttgcagtgcaagcctctgtattacactgcagcttaacaagtagggcagggcttttctctcacttacatttatttctcattttccaaacaatatagttggtttgctagtcacatttgctacgtcttattgcatttttggtcagacgctgtcattgatgctctaatgggtctgtgccctatggtctgtaacccaaagcctgcccacacaacccggtcagaatgcagggactgctgcgctttgaagatcaagactctgcacgtggggatcagaacattgccatgttctatccaacctccacccaaatggtttatcggcgggggcttcaggcaatacctcttagtgttgacctttggatacattatataaacttcttaaaagaaacattggaccctggtgatcctgagacaaacaatacaataagaggaacttttgagcatgctgttctagctgcaggaacagatttccgttctgacagactgtgggaaatgtatataaactgggaaaatgagcagggaaacctgagagaagttacagctatatatgatcgtattcttggtattccaacacagctgtatagtcatcattttcagagatttaaagaacatgtacagaataatttgcctagagatcttttaactggtgaacagtttattcagttgcgaagggaattagcttctgtaaatggtcatagtggtgatgatggtcctcctggtgatgatctaccatcgggaattgaagacataaccgatcctgcaaagctaattacagaaatagaaaacatgagacatagaatcattgagattcatcaagaaatgtttaattataatgagcatgaagttagtaaaaggtggacatttgaagaaggtattaaaagaccttactttcatgtgaaacctttggaaaaggcacaactaaaaaactggaaagaatacttagaatttgaaattgaaaatgggactcatgaacgagtgtggttctctttgaaagatgtgtcatatcatgtgccctctatgaggagttttggattaagtatgccaagtacatggaaaaccatagcattgaaggagtgaggcatgtcttcagcagagcttgtactatacatctcccaaagaaacccatggtgcatatgctttgggcagcttttgaggaacagcagggtaatattaatgaagccaggaatatcttgaaaacatttgaagaatgtgttctaggattggcaatggttcgtttacgaagagtaagtttagaacgacggcatggaaatctggaagaagctgaacatttgcttcaggatgccattaagaatgccaaatcaaataatgaatcttcattttatgctgtcaaactagcccggcatcttttcaaaatacagaaaaaccttccaaaatcaagaaaggtgcttttggaagcaatcgaaagagacaaagtatgcatttgtatttttaagagtatcttctattaaaaaaaccagtggtcagtgtattttcactgtggcaactgtgatgaaagatttggtctgtatgtaatagattttattactaaatgaggacaacagtccctctaaactgatgttgccatttaaaaatttttttcaaattgttttgaattaaaagttttagacattaagattattgggttaaaattgttgtagacattgtgatactttatattttccctttagaaattatcaacaaatttactgattactaagtagaacagaggacttgggagaatacttcataaacaaaagcataggcgttgcctatgttgtaagcacatttagaagtgagatgattttgcttctccatagagtactttttatattttttatatatcaattgaaaaaggcagtgtataggtaataggtaatttctcaagttttaggattttagttattgccaggtctgtttaagatacagatttatagcagtttgcttctagctgcagtttaagatgtttatctttttttttttgagtctgtcgcctaagctggagtgcagtggtgccatcttggctcacttcaacctctgcctcctgggttcaagtgattgcatgcctgtaatcccagctattcgggaggctgaggcaggagaatcgc

SEQ ID NO: 370131 - DNA, 3196 bp, Homo sapiens
atcgtgccctggaccaggcggcccgtggcgcgggtggcggctgctgtgctggctgtggggacggaggcggtgaagtgccatcttcggctaggtcgtcacaggctccggctcatggcatcaagtggcatccatcataagatcgttaactgaagacaatatgcaaaattctcacatggatgaatacagaaattctagtaatggcagcacaggcaacagttcagaggtagtggtagaacatcctactgatttcagtactgagattatgaacgttacagaaatggaacagtcacctgatgactctcccaatgtgaatgcatctacagaagaaactgaaatggcaagtgctgtggaccttccagtgacgctgacagaaacagaagcaaatttccctccagaatatgaaaaattttggaaaactgtagaaaataatcctcaggattttacaggctgggtatatttgcttcaatatgtagaacaggagaatcacttgatggctgccaggaaggcatttgacagatttttcatacactatccgtattgctatggttactggaaaaagtatgcagaccttgaaaagcggcacgacaacattaaaccatcagatgaggtgcgttaaacctctacagtttgtcaagctttgcagtgcaagcctctgtattacactgcagcttaacaagtagggcagggcttttctctcacttacatttatttctcattttccaaacaatatagttggtttgctagtcacatttgctacgtcttattgcatttttggtcagacgctgtcattgatgctctaatgggtctgtgccctatggtctgtaacccaaagcctgcccacacaacccggtcagaatgcagggactgctgcgctttgaagatcaagactctgcacgtggggatcagaacattgccatgttctatccaacctccacccaaatggtttatcggcgggggcttcaggcaatacctcttagtgttgacctttggatacattatataaacttcttaaaagaaacattggaccctggtgatcctgagacaaacaatacaataagaggaacttttgagcatgctgttctagctgcaggaacagatttccgttctgacagactgtgggaaatgtatataaactgggaaaatgagcagggaaacctgagagaagttacagctatatatgatcgtattcttggtattccaacacagctgtatagtcatcattttcagagatttaaagaacatgtacagaataatttgcctagagatcttttaactggtgaacagtttattcagttgcgaagggaattagcttctgtaaatggtcatagtggtgatgatggtcctcctggtgatgatctaccatcgggaattgaagacataaccgatcctgcaaagctaattacagaaatagaaaacatgagacatagaatcattgagattcatcaagaaatgtttaattataatgagcatgaagttagtaaaaggtggacatttgaagaaggtattaaaagaccttactttcatgtgaaacctttggaaaaggcacaactaaaaaactggaaagaatacttagaatttgaaattgaaaatgggactcatgaacgagtgtggttctctttgaaagatgtgtcatatcatgtgccctctatgaggagttttggattaagtatgccaagtacatggaaaaccatagcattgaaggagtgaggcatgtcttcagcagagcttgtactatacatctcccaaagaaacccatggtgcatatgctttgggcagcttttgaggaacagcagggtaatattaatgaagccaggaatatcttgaaaacatttgaagaatgtgttctaggattggcaatggttcgtttacgaagagtaagtttagaacgacggcatggaaatctggaagaagctgaacatttgcttcaggatgccattaagaatgccaaatcaaataatgaatcttcattttatgctgtcaaactagcccggcatcttttcaaaatacagaaaaaccttccaaaatcaagaaaggtgcttttggaagcaatcgaaagagacaaagagaacacaaagttatacctcaatttacttgaaatggaatatagtggtgacctcaaacaaaatgaagaaaatatcctaaattgttttgacaaagctgtacatggttcattacctattaaaatgagaattacattttctcagagaaaagtggaatttcttgaagattttggttccgatgttaataagcttctgaatgcttatgatgaacatcaaacactcctgaaagaacaggattctttaaaaaggaaagcagaaaatggatcagaagaaccagaggaaaagaaagcacatacagaagatacaacttcatcatctacacagatgattgatggtgatttacaggcaaaccaagctgtatataattatagtgcgtggtatcaatacaattatcagaatccttggaattatggacaatattatcctccccctccaacctgatgggaaaaatgtaaatttcaaatgcagtgtgtgaaaagtatgaaattattattttttttaatgagggatgtaaacagtataagcttgttgtatttgataacctgtcttccttgtttctgtgtaacatgatttgtttagtaatagggggaaaatgtcaattagtagcttaccacagatactgtttcctaccatttataaaatttactttttattgaaaaactattttttgatttttgcattaagtggtctagaattcttttgcaatgcatttgcaacagaattttgtagccttaaggggtaggaagaaaaacctgactgcaaatcatgtcagtgtagtacaaaattctgaaaacacataagggctggttatttacctccttttttttttttttttttaaagaaaaaaggacttttaacctttgctgacaaggttttgtctgtttcagttatacttgtgaattgtgatctaactgcagaaaggatacattattaaaatactttgccttggaatagattataaatgagaaaatggaatgtttgcatccctttaaaaatgaaaatcatatcaaaagtatgttgtttcaggagactttgtatttagaatattcatgtaaaacttgtgaacaagctttcattttgatcaaactgatcttcatttttgtaataaaacggaagactcatccaaaaaaaaaaaa

SEQ ID NO: 370132 - DNA, 3946 bp, Homo sapiens
atcgtgccctggaccaggcggcccgtggcgcgggtggcggctgctgtgctggctgtggggacggaggcggtgaagtgccatcttcggctaggtcgtcacaggctccggctcatggcatcaagtggcatccatcataagatcgttaactgaagacaatatgcaaaattctcacatggatgaatacagaaattctagtaatggcagcacaggcaacagttcagaggtagtggtagaacatcctactgatttcagtactgagattatgaacgttacagaaatggaacagtcacctgatgactctcccaatgtgaatgcatctacagaagaaactgaaatggcaagtgctgtggaccttccagtgacgctgacagaaacagaagcaaatttccctccagaatatgaaaaattttggaaaactgtagaaaataatcctcaggattttacaggctgggtatatttgcttcaatatgtagaacaggagaatcacttgatggctgccaggaaggcatttgacagatttttcatacactatccgtattgctatggttactggaaaaagtatgcagaccttgaaaagcggcacgacaacattaaaccatcagatgaggtgcgtacatcactgaataaacttatctccaataggtactgtaagccaattaataacaaaacaaagatttttttttttttttttttttggctggcagtacctaccatttatggtcaaacaatttttatagggtatttatttgcatttgtcactcttgtggcatttgtagctaatattttctctctttgttggcaggtgcgttaaacctctacagtttgtcaagctttgcagtgcaagcctctgtattacactgcagcttaacaagtagggcagggcttttctctcacttacatttatttctcattttccaaacaatatagttggtttgctagtcacatttgctacgtcttattgcatttttggtcagacgctgtcattgatgctctaatgggtctgtgccctatggtctgtaacccaaagcctgcccacacaacccggtcagaatgcagggactgctgcgctttgaagatcaagactctgcacgtggggatcagaacattgccatgttctatccaacctccacccaaatggtttatcggcgggggcttcaggcaatacctcttagtgttgacctttggatacattatataaacttcttaaaagaaacattggaccctggtgatcctgagacaaacaatacaataagaggaacttttgagcatgctgttctagctgcaggaacagatttccgttctgacagactgtgggaaatgtatataaactgggaaaatgagcagggaaacctgagagaagttacagctatatatgatcgtattcttggtattccaacacagctgtatagtcatcattttcagagatttaaagaacatgtacagaataatttgcctagagatcttttaactggtgaacagtttattcagttgcgaagggaattagcttctgtaaatggtcatagtggtgatgatggtcctcctggtgatgatctaccatcgggaattgaagacataaccgatcctgcaaagctaattacagaaatagaaaacatgagacatagaatcattgagattcatcaagaaatgtttaattataatgagcatgaagttagtaaaaggtggacatttgaagaaggtattaaaagaccttactttcatgtgaaacctttggaaaaggcacaactaaaaaactggaaagaatacttagaatttgaaattgaaaatgggactcatgaacgagtgtggttctctttgaaagatgtgtcatatcatgtgccctctatgaggagttttggattaaggtaagaaaatcatgtgctcttaaacttgaatatattataaacattgatctagtgactaaccttttttgtacttctgttgaatgttgttcatataactatatctgttgcattaggagatggtctgcttgcaaccagatttgactgctgcatatgccaacctcgttgcctctcttcgtccttccttacagaaactagtctagtggttcaataaaggtgctgaatgggtttaaaaatagaattttatcgttctgtcacaaatttaatggcttgttcaactgtaaattattcagtatttcctcttttctgtatgtagtatgccaagtacatggaaaaccatagcattgaaggagtgaggcatgtcttcagcagagcttgtactatacatctcccaaagaaacccatggtgcatatgctttgggcagcttttgaggaacagcagggtaatattaatgaagccaggaatatcttgaaaacatttgaagaatgtgttctaggattggcaatggttcgtttacgaagagtaagtttagaacgacggcatggaaatctggaagaagctgaacatttgcttcaggatgccattaagaatgccaaatcaaataatgaatcttcattttatgctgtcaaactagcccggcatcttttcaaaatacagaaaaaccttccaaaatcaagaaaggtgcttttggaagcaatcgaaagagacaaagagaacacaaagttatacctcaatttacttgaaatggaatatagtggtgacctcaaacaaaatgaagaaaatatcctaaattgttttgacaaagctgtacatggttcattacctattaaaatgagaattacattttctcagagaaaagtggaatttcttgaagattttggttccgatgttaataagcttctgaatgcttatgatgaacatcaaacactcctgaaagaacaggattctttaaaaaggaaagcagaaaatggatcagaagaaccagaggaaaagaaagcacatacagaagatacaacttcatcatctacacagatgattgatggtgatttacaggcaaaccaagctgtatataattatagtgcgtggtatcaagtgagtctgcataattataattctttgttcatagatgttattagcataaattaggatagtttctttttttttaaaaaaagtttttgttccaattgtgtaatacattctttggtggttaagtactagaattttagcagtgaacacttgcttgttttcttaaacatagctgctttaattatacttttacatatggaactctgccacagttctaatatgctaacatacttactttttcctttcagtacaattatcagaatccttggaattatggacaatattatcctccccctccaacctgatgggaaaaatgtaaatttcaaatgcagtgtgtgaaaagtatgaaattattattttttttaatgagggatgtaaacagtataagcttgttgtatttgataacctgtcttccttgtttctgtgtaacatgatttgtttagtaatagggggaaaatgtcaattagtagcttaccacagatactgtttcctaccatttataaaatttactttttattgaaaaactattttttgatttttgcattaagtggtctagaattcttttgcaatgcatttgcaacagaattttgtagccttaaggggtaggaagaaaaacctgactgcaaatcatgtcagtgtagtacaaaattctgaaaacacataagggctggttatttacctccttttttttttttttttttaaagaaaaaaggacttttaacctttgctgacaaggttttgtctgtttcagttatacttgtgaattgtgatctaactgcagaaaggatacattattaaaatactttgccttggaatagattataaatgagaaaatggaatgtttgcatccctttaaaaatgaaaatcatatcaaaagtatgttgtttcaggagactttgtatttagaatattcatgtaaaacttgtgaacaagctttcattttgatcaaactgatcttcatttttgtaataaaacggaagactcatccaaaaaaaaaaaa

SEQ ID NO: 370133 - DNA, 1174 bp, Homo sapiens
atcgtgccctggaccaggcggcccgtggcgcgggtggcggctgctgtgctggctgtggggacggaggcggtgaagtgccatcttcggctaggtcgtcacaggctccggctcatggcatcaagtggcatccatcataagatcgttaactgaagacaatatgcaaaattctcacatggatgaatacagaaattctagtaatggcagcacaggcaacagttcagaggtagtggtagaacatcctactgatttcagtactgagattatgaacgttacagaaatggaacagtcacctgatgactctcccaatgtgaatgcatctacagaagaaactgaaatggcaagtgctgtggaccttccagtgacgctgacagaaacagaagcaaatttccctccagaatatgaaaaattttggaaaactgtagaaaataatcctcaggattttacaggctgggtatatttgcttcaatatgtagaacaggagaatcacttgatggctgccaggaaggcatttgacagatttttcatacactatccgtattgctatggttactggaaaaagtatgcagaccttgaaaagcggcacgacaacattaaaccatcagatgaggtgcgtacatcactgaataaacttatctccaataggtactgtaagccaattaataacaaaacaaagatttttttttttttttttttttggctggcagtacctaccatttatggtcaaacaatttttatagggtatttatttgcatttgtcactcttgtggcatttgtagctaatattttctctctttgttggcaggtgcgttaaacctctacagtttgtcaagctttgcagtgcaagcctctgtattacactgcagcttaacaagtagggcagggcttttctctcacttacatttatttctcattttccaaacaatatagttggtttgctagtcacatttgctacgtcttattgcatttttggtcagacgctgtcattgatgctctaatgggtctgtgccctatggtctgtaacccaaagcctgcccacacaacccggtcagaatgcagggactgctgcgctttgaagatcaagactctgcacgtggggatcagaacattgccatgttctatccaacctccacccaaatggtaatggtagattatttaaacaaaatgccagtaatta

SEQ ID NO: 370134 - DNA, 194 bp, Homo sapiens
gaagaaagtgtacatgcttttgaaggaagaaaaaaaaagaaaataagaaggatctcaaatcagaaacctaactttacacctcaagcaactagaaaaagaacaaactaaacctaaagttaaaagggagagactaataaagattagaacagaaataaataaaatagagaatagaagaaaaaactaagagttgggtt

SEQ ID NO: 370135 - DNA, 322 bp, Homo sapiens
tcctcttggcatatatcttttgggactagtcttatcattgttatgcatgcaaacagcaccttgcacagtgctattttcttggcaggctaccctgggagctccgtcgaatccttgccagacaggggtcctcctgatcttcagtagtgtagcactttggatcacgatgagttgctaatagttgttcttgtcttcttcttccttaggcccatatacaggtgctcctggaattatgatgggtcacaccccaacaaacccaccataagttgaaattattgctaagttgaaaatatatttaataccctgataagcccatcataatata

SEQ ID NO: 370136 - DNA, 235 bp, Homo sapiens
tgcagtgagccgagatcatgctattgcaccccagcctgggcaacagagcaagactgcgtctcagaaaaaaaataaaaataataaataataaaagagaaggaggcaacaactaggagagaagttgtcaggtaagcttgggcagcaagacaaaggtgaggatgctcaagggggagcctcatgggaggggaagaggaaatgttcctccaaagcaaacatagggttccatggagggaag

SEQ ID NO: 370137 - DNA, 640 bp, Homo sapiens
gatccatactccaaacctcagcatcatgcaatatacccatttaacaaacttgcatatataccctttgtttttaaaataaaagttgaaatttgaaaggaaagaaataataaagatcaaataactaaataattagaagtaaaaaatggaatagattaacaaaatgaaaagttgttttatttgcagacataaacaaaattgaaaaactacaagctagaagaattaagaagaaaagaccaaaataaacaaaattggatttgaagaaggagacattacaactgataccatagaaatacaaaggataattagagactgttatgaagaattatacaccaacaaattggaaaccctggagggaatgggtaaattcttgggaccataaaatatgccaagattgaactaggaagaaatagaaaacttgaacaagcaatgaaaagtaatgagattgaatcagtaacagaaagtcgttcaacaaaagaaagcccaggactgatggctttactactgaattttaccaatctttttaaaaaagaagtaacaaaaattattctcaagcaattttcaaaaattgaagaaggaattattcctaactcattccatgagagtagcattaccctgatacctacaccagataagaacagac

SEQ ID NO: 370138 - DNA, 427 bp, Homo sapiens
cagctagctgtgtggccccagccagtcactctccaagtcaaaatataaaataaaaagatcagacgaaattatcacacagtttccctccgactctaacattccatgacttctcatctgatatctatcacctttagtcatgtgaaccttcttttcaaaatgtattcttggtggccgggagtggtggctcatgcctgtaatcccagcactatgagaggccaaggccggaggatcacttgaggtcaggagttcgagaccagcctggccaacatggcaaaacctcgtatctactcaaaatacaaaaaaaaaaaaaaaaaaaaaatcagctgggcgcatgcctgtaatcccagctactcaggaggccaaggctgcagtgaaccaagattatcccacttcactccagctcggtgacagaatgagactccacctc

SEQ ID NO: 370139 - DNA, 5722 bp, Homo sapiens
cgcccctctccgcgggaggcgtcggggcccgcggctgggtggcgggtagttcccgccggctgtgcgcgcccgcctcggggctcgctctgagaggacgcggcggcagcggactcggagccctcggcgcgcaggcgggcggaccggccgagctgcgcggggctgcgcgccgcccctgctccgccgccaggccccgcgcggctcccgcgcccggcgctcccctttgtccgcgggccggagcggcggcggcagcggcggtgtccgagcggcggtcggagcctgctgcggcagttgaggcggcggcgcccctgcggctgtgcgccagcgccctcgcgccgaggcgatgccggaccagatctccgtgtcggaattcgtggccgagacccatgaggactacaaggcgcccacggcctccagcttcaccacccgcacggcgcagtgccggaacactgtggcggccatcgaggaggctttggacgtggaccggatggttctttacaaaatgaagaaatccgtgaaagcaatcaacagctctgggctggctcacgtggaaaatgaagagcagtacacccaggctctggagaagtttggcggcaactgtgtatgcagagatgacccagatttaggaagtgcgttcctgaagttctcagtgtttacaaaggagttgacagcacttttcaaaaacctgattcagaatatgaacaacataatctccttccctttggacagtttgctgaagggggacctgaaaggagtgaaaggggatctgaaaaagccttttgataaagcttggaaggactatgaaacaaaaataaccaagatagaaaaggagaaaaaggaacacgccaagctccatgggatgattcggactgaaataagcggagcggaaattgccgaagagatggaaaaggagaggcgcttcttccagctacagatgtgcgagtatctgctgaaggtcaacgaaatcaagattaaaaagggagtagatttacttcagaatctgatcaaatactttcatgcccaatgcaatttttttcaggatggactcaaagccgtggaaagcctcaaaccttccattgaaacgctgtctacggatcttcacacgatcaaacaggcccaggatgaagaaagaaggcagttgatacagcttcgagatattttgaaatccgcattgcaggttgaacagaaagaggactcccaaattcgtcagagcacagcttatagcttacatcagcctcagggaaacaaggaacatgggaccgagcggaacggcagcctctacaagaagagtgacgggatccgaaaagtgtggcagaaaaggaaatgttcagttaaaaatggttttctgaccatatcccatggtaccgctaaccggcctcctgcaaagctcaacctgctaacctgccaggtgaagaccaaccctgaggagaagaagtgctttgaccttatttcacatgacagaacttaccactttcaagctgaagatgaacaggaatgtcaaatatggatgtctgtgctgcaaaatagcaaagaagaagctttaaacaatgcatttaagggggatgacaatactggagaaaataacatcgtccaagaactgacaaaggagatcatctcagaagtgcagaggatgacgggcaatgacgtctgctgtgactgtggggcgccagatcctacatggctttccaccaacctgggcatcctgacctgcatcgagtgttccggaatccaccgagagctgggggttcattattccaggatgcagtccctgaccttagatgtactgggaacatctgagctgctgctcgccaagaatattgggaatgcaggctttaatgagatcatggaatgttgcctaccagctgaggactcagtcaaacccaacccaggcagcgacatgaatgcaagaaaggactacatcacagccaagtacatcgagaggagatacgcaaggaagaagcacgcggataacgcggcgaagcttcacagtctttgcgaggccgtcaaaacgagagatatttttggattgctccaagcttatgctgatggtgtggatcttacggaaaaaatcccactggccaacggacatgagccggatgaaacggccctccaccttgcagtcagatccgtggatcgaacctctcttcacattgtagactttttagttcagaacagtgggaacctggataaacagacagggaaaggcagcacagccctgcactactgctgcctgaccgacaatgccgagtgcctcaagttgctcctgcgggggaaggcctccatcgagatagcaaacgagtcaggagagactccgctggacattgccaagcgcctcaagcacgagcactgtgaggagctgctgacccaagccttatctggaagatttaattctcacgttcacgttgaatatgaatggcgactactccacgaagacctggatgaaagtgatgacgacatggatgagaaattgcagcccagtcccaaccggcgggaagaccggcccatcagcttctaccagctgggctccaaccagcttcagtctaacgctgtatctttggccagagatgctgcaaaccttgccaaggagaagcagagggctttcatgcccagcatcttgcagaatgagacttacggagccctcctgagtggcagcccacctcccgcccagcctgcagcccccagcaccaccagcgcccccccgcttcctccacggaatgttggcaaagttcagacagcctcctctgctaacaccctgtggaagacaaactctgtaagtgtggacggtggaagccggcagcgatcttcgtcagatccgccagctgtccatccaccgctgccccctcttcgcgtgacatctaccaatcccctgacccccacgccgcccccacccgttgccaagacgcccagcgtaatggaagccttgagccagccgagcaagcctgccccgcctgggatctcacagatcaggcccccacctctgcccccacagccgcccagccgcctcccgcagaagaagcctgcgccgggggctgacaagtccaccccactgaccaacaaaggccaaccgagaggacctgtggatctctctgcaacggaagctctgggtcctctgtccaatgctatggtcctgcagccccctgcacccatgcctaggaagtcgcaggcaaccaagttgaagcctaagcgggtgaaagcgctctataactgtgtggctgacaaccccgatgagctcaccttctccgagggggatgtgatcatcgtggacggggaggaggaccaggagtggtggattggccacattgatggagatcctggtcgcaaaggcgcattcccggtgtcatttgtgcactttatcgctgactgaattgctactgaacaaaagcattaacagttatgttcctgtttcgttattggtaccaaaactcttgccagataaccagtttcatgaactgtttgtatggcagcccatgttctctaatgccactgctctgttttaaaaactcagaggcaatttttacatatcagtaattgtttttataatttgtggttttcatgaaacattgctatgcatttattaggaaaaactgaatttcccaacaggtgaactgaaaagttattttaactattatacataatcaagatcctgcctctacggaattagctaaacctaaaaatgtttgcattaatgaataaattcttcctgcattccttggcccagttctggagttggtgacctttatcacaattattattttaggcggccagtgaactgctgcttcagaagtccatagcccagctctgaactttctcgataaaatgccatcagttcacctttaaagacacacattcctttgaaatccacccagtgtttaaaaagcaacttggaaatttacacattagcattgtactttctagccctaatttgtgaggttgcagctatcattatattctgcatgtatgtataacctgttgtgaacaatcatacttaacaaaactactgatggtttatgacaacgtagggtaactacagttcattctgttccaggttatataaaactgcatttcctgaatttggttaaaaactaaggatgatggattgcaaaacagttcttttaaattagtttatatgctttaggtgttttggaatttgccttcttgaacttcctgagtcacacagaaagcaactgtacacagtagaattctgtggcgcagaccatgctgtattaacacatcacttgctgtttcctactgagtgtaccactgccttcccttctagcccaggagaatgtttactcagtttagtgtcttgtatttctataatactccaacaggaatggtagtcacactgtcttgaaattgaatctgtccatctgtttataatcaagaacatatcagaaatatataggtcccaggtaatactcccaaacatcccactttttactgtttcaggccatcatatcattcttaagctacttggggtggtagtagaggattaggttgtctattataaaaccaaaactcattcgtttaatgaacttgactgtcatacctctatttagtaattgcgagggtaagattcatagtaggaatattggaaattttggcactctgagaataaataggcatatgatacccacttggacttttaacaaaagtaaaggaataaatttgcatataggcttggaaagtgaggcagcaatgctgttaactgcatttgttgtgatggtgcatttgattgaagcagcttgtctttattatgcaagactgtgtagagttttttttttttttggcattgtactttttgtttttgttataaaggaagacagaacaaactggaatgttttatgatgttgtatagcaatcgctttttacctttcaaagttccgggtaaaaatgtgttatatctgtagttttttgtttttgtttttttttaaagcactacatctgttttcactaattgttaatttctgtttgaacccttcatttaattttctcatagatttaagtaaacagatgtattttgcacagtgcacttatgtctattttaacaatcctcctgcatctgtattttatagtcagccttttgaccacctggtgccagctatataaggaataaagttgattcatatcaacattagaactccagtcccaaactaatctgtcaggttcactggtacataaatacctaggaaatatttttccagtctacaatttggtgctattgtgcagtaactaatagtactcttaccagaggagaaattatattaacgaccctgctaatatcctttcttagttatttgctccttgcaaattaaaaaagcaactaagagaaagaaaaacattgtagatatctatttatatttaaagtttatgtttcatgaactgcagctgcaggattctggcattttgcatgccattctccatcagatctgggatgatggctcagaacatgtacacagactaagagtaactgtgtgatctgttaaggggtggataacataatatgcagcttaggatgctattttgagatgtatgatattcagttcattcacctgattactttggttgcagcacaactgtatatattgtataaccgaaattgattattttcattgtccttaatgcagtgatttataattagagcatgtttaataagtttactcttcttgttaactagtcatttgactggaaaaaaataaaatacttttaaatggaaaaaaaaaaa

SEQ ID NO: 370140 - DNA, 352 bp, Homo sapiens
taataattgagtatcctgaaatagactttcatttttgcagctcgccaagaatattgggaatgcaggctttaatgagatcatggaatgttgcctaccagctgaggactcagtcaaacccaacccaggcagcgacatgaatgcaagaaaggactacatcacagccaagtacatcgagaggagatacgcaaggaagaagcacgcggataacgcggcgaagcttcacagtctttgcgaggccgtcaaaacgagagatatttttggattgctccaagcttatgctgatggtgtggatcttacggaaaaaatcccactggccaacggacatgtaagagtgtgggttgttgctacttta

SEQ ID NO: 370141 - DNA, 2440 bp, Homo sapiens
agtcctacaaacagggatacagataatgagtcatcttttctactctcttcaagttttctactctctacatctcctctttaatttttgcacaaaataatactatgcaacaaatagtctataagtcttttagggcaccaatcttgccagataaccagtttcatgaactgtttgtatggcagcccatgttctctaatgccactgctctgttttaaaaactcagaggcaatttttacatatcagtaattgtttttataatttgtggttttcatgaaacattgctatgcatttattaggaaaaactgaatttcccaacaggtgaactgaaaagttattttaactattatacataatcaagatcctgcctctacggaattagctaaacctaaaaatgtttgcattaatgaataaattcttcctgcattccttggcccagttctggagttggtgacctttatcacaattattattttaggcggccagtgaactgctgcttcagaagtccatagcccagctctgaactttctcgataaaatgccatcagttcacctttaaagacacacattcctttgaaatccacccagtgtttaaaaagcaacttggaaatttacacattagcattgtactttctagccctaatttgtgaggttgcagctatcattatattctgcatgtatgtataacctgttgtgaacaatcatacttaacaaaactactgatggtttatgacaacgtagggtaactacagttcattctgttccaggttatataaaactgcatttcctgaatttggttaaaaactaaggatgatggattgcaaaacagttcttttaaattagtttatatgctttaggtgttttggaatttgccttcttgaacttcctgagtcacacagaaagcaactgtacacagtagaattctgtggcgcagaccatgctgtattaacacatcacttgctgtttcctactgagtgtaccactgccttcccttctagcccaggagaatgtttactcagtttagtgtcttgtatttctataatactccaacaggaatggtagtcacactgtcttgaaattgaatctgtccatctgtttataatcaagaacatatcagaaatatataggtcccaggtaatactcccaaacatcccactttttactgtttcaggccatcatatcattcttaagctacttggggtggtagtagaggattaggttgtctattataaaaccaaaactcattcgtttaatgaacttgactgtcatacctctatttagtaattgcgagggtaagattcatagtaggaatattggaaattttggcactctgagaataaataggcatatgatacccacttggacttttaacaaaagtaaaggaataaatttgcatataggcttggaaagtgaggcagcaatgctgttaactgcatttgttgtgatggtgcatttgattgaagcagcttgtctttattatgcaagactgtgtagagttttttttttttttggcattgtactttttgtttttgttataaaggaagacagaacaaactggaatgttttatgatgttgtatagcaatcgctttttacctttcaaagttccgggtaaaaatgtgttatatctgtagttttttgtttttgtttttttttaaagcactacatctgttttcactaattgttaatttctgtttgaacccttcatttaattttctcatagatttaagtaaacagatgtattttgcacagtgcacttatgtctattttaacaatcctcctgcatctgtattttatagtcagccttttgaccacctggtgccagctatataaggaataaagttgattcatatcaacattagaactccagtcccaaactaatctgtcaggttcactggtacataaatacctaggaaatatttttccagtctacaatttggtgctattgtgcagtaactaatagtactcttaccagaggagaaattatattaacgaccctgctaatatcctttcttagttatttgctccttgcaaattaaaaaagcaactaagagaaagaaaaacattgtagatatctatttatatttaaagtttatgtttcatgaactgcagctgcaggattctggcattttgcatgccattctccatcagatctgggatgatggctcagaacatgtacacagactaagagtaactgtgtgatctgttaaggggtggataacataatatgcagcttaggatgctattttgagatgtatgatattcagttcattcacctgattactttggttgcagcacaactgtatatattgtataaccgaaattgattattttcattgtccttaatgcagtgatttataattagagcatgtttaataagtttactcttcttgttaactagtcatttgactggaaaaaaataaaatacttttaaatggaaaaaaaaaaa

SEQ ID NO: 370142 - DNA, 3715 bp, Homo sapiens
  misc_feature (3664)..(3664): n is a, c, g, or t
cgcccctctccgcgggaggcgtcggggcccgcggctgggtggcgggtagttcccgccggctgtgcgcgcccgcctcggggctcgctctgagaggacgcggcggcagcggactcggagccctcggcgcgcaggcgggcggaccggccgagctgcgcggggctgcgcgccgcccctgctccgccgccaggccccgcgcggctcccgcgcccggcgctcccctttgtccgcgggccggagcggcggcggcagcggcggtgtccgagcggcggtcggagcctgctgcggcagttgaggcggcggcgcccctgcggctgtgcgccagcgccctcgcgccgaggcgatgccggaccagatctccgtgtcggaattcgtggccgagacccatgaggactacaaggcgcccacggcctccagcttcaccacccgcacggcgcagtgccggaacactgtggcggccatcgaggaggctttggacgtggaccggatggttctttacaaaatgaagaaatccgtgaaagcaatcaacagctctgggctggctcacgtggaaaatgaagagcagtacacccaggctctggagaagtttggcggcaactgtgtatgcagagatgacccagatttaggaagtgcgttcctgaagttctcagtgtttacaaaggagttgacagcacttttcaaaaacctgattcagaatatgaacaacataatctccttccctttggacagtttgctgaagggggacctgaaaggagtgaaaggggatctgaaaaagccttttgataaagcttggaaggactatgaaacaaaaataaccaagatagaaaaggagaaaaaggaacacgccaagctccatgggatgattcggactgaaataagcggagcggaaattgccgaagagatggaaaaggagaggcgcttcttccagctacagatgtgcgagtatctgctgaaggtcaacgaaatcaagattaaaaagggagtagatttacttcagaatctgatcaaatactttcatgcccaatgcaatttttttcaggatggactcaaagccgtggaaagcctcaaaccttccattgaaacgctgtctacggatcttcacacgatcaaacaggcccaggatgaagaaagaaggcagttgatacagcttcgagatattttgaaatccgcattgcaggttgaacagaaagaggactcccaaattcgtcagagcacagcttatagcttacatcagcctcagggaaacaaggaacatgggaccgagcggaacggcagcctctacaagaagagtgacgggatccgaaaagtgtggcagaaaaggaaatgttcagttaaaaatggttttctgaccatatcccatggtaccgctaaccggcctcctgcaaagctcaacctgctaacctgccaggtgaagaccaaccctgaggagaagaagtgctttgaccttatttcacatgacagaacttaccactttcaagctgaagatgaacaggaatgtcaaatatggatgtctgtgctgcaaaatagcaaagaagaagctttaaacaatgcatttaagggggatgacaatactggagaaaataacatcgtccaagaactgacaaaggagatcatctcagaagtgcagaggatgacgggcaatgacgtctgctgtgactgtggggcgccagatcctacatggctttccaccaacctgggcatcctgacctgcatcgagtgttccggaatccaccgagagctgggggttcattattccaggatgcagtccctgaccttagatgtactgggaacatctgagctgctgctcgccaagaatattgggaatgcaggctttaatgagatcatggaatgttgcctaccagctgaggactcagtcaaacccaacccaggcagcgacatgaatgcaagaaaggactacatcacagccaagtacatcgagaggagatacgcaaggaagaagcacgcggataacgcggcgaagcttcacagtctttgcgaggccgtcaaaacgagagatatttttggattgctccaagcttatgctgatggtgtggatcttacggaaaaaatcccactggccaacggacatgagccggatgaaacggccctccaccttgcagtcagatccgtggatcgaacctctcttcacattgtagactttttagttcagaacagtgggaacctggataaacagacagggaaaggcagcacagccctgcactactgctgcctgaccgacaatgccgagtgcctcaagttgctcctgcgggggaaggcctccatcgagatagcaaacgagtcaggagagactccgctggacattgccaagcgcctcaagcacgagcactgtgaggagctgctgacccaagccttatctggaagatttaattctcacgttcacgttgaatatgaatggcgactactccacgaagacctggatgaaagtgatgacgacatggatgagaaattgcagcccagtcccaaccggcgggaagaccggcccatcagcttctaccagctgggctccaaccagcttcagtctaacgctgtatctttggccagagatgctgcaaaccttgccaaggagaagcagagggctttcatgcccagcatcttgcagaatgagacttacggagccctcctgagtggcagcccacctcccgcccagcctgcagcccccagcaccaccagcgcccccccgcttcctccacggaatgttggcaaagttcagacagcctcctctgctaacaccctgtggaagacaaactctgtaagtgtggacggtggaagccggcagcgatcttcgtcagatccgccagctgtccatccaccgctgccccctcttcgcgtgacatctaccaatcccctgacccccacgccgcccccacccgttgccaagacgcccagcgtaatggaagccttgagccagccgagcaagcctgccccgcctgggatctcacagatcaggcccccacctctgcccccacagccgcccagccgcctcccgcagaagaagcctgcgccgggggctgacaagtccaccccactgaccaacaaaggccaaccgagaggacctgtggatctctctgcaacggaagctctgggtcctctgtccaatgctatggtcctgcagccccctgcacccatgcctaggaagtcgcaggcaaccaagttgaagcctaagcgggtgaaagcgctctataactgtgtggctgacaaccccgatgagctcaccttctccgagggggatgtgatcatcgtggacggggaggaggaccaggagtggtggattggccacattgatggagatcctggtcgcaaaggcgcattcccggtgtcatttgtgcactttatcgctgactgaattgctactgaacaaaagcattaacagttatgttcctgtttcgttattggtaccaaaactcttgccagataaccagtttcatgaactgtttgtatggcagcccatgttctctaatgccactgctctgttttaaaaactcagaggcaatttttacatatcagtaattgtttttataatttgtggttttcatgaaacattgctatgcatttattaggaaaaactgaatttcccaacaggtgaactgaaaagttattttaactattatacataatcaagatcctgcctctacggaattagctaacntacgcgttgcataatgaattcctgggggcggtggggtgaggtgagggtggt

SEQ ID NO: 370143 - DNA, 2756 bp, Homo sapiens
cgcccctctccgcgggaggcgtcggggcccgcggctgggtggcgggtagttcccgccggctgtgcgcgcccgcctcggggctcgctctgagaggacgcggcggcagcggactcggagccctcggcgcgcaggcgggcggaccggccgagctgcgcggggctgcgcgccgcccctgctccgccgccaggccccgcgcggctcccgcgcccggcgctcccctttgtccgcgggccggagcggcggcggcagcggcggtgtccgagcggcggtcggagcctgctgcggcagttgaggcggcggcgcccctgcggctgtgcgccagcgccctcgcgccgaggcgatgccggaccagatctccgtgtcggaattcgtggccgagacccatgaggactacaaggcgcccacggcctccagcttcaccacccgcacggcgcagtgccggaacactgtggcggccatcgaggaggctttggacgtggaccggatggttctttacaaaatgaagaaatccgtgaaagcaatcaacagctctgggctggctcacgtggaaaatgaagagcagtacacccaggctctggagaagtttggcggcaactgtgtatgcagagatgacccagatttaggaagtgcgttcctgaagttctcagtgtttacaaaggagttgacagcacttttcaaaaacctgattcagaatatgaacaacataatctccttccctttggacagtttgctgaagggggacctgaaaggagtgaaaggggatctgaaaaagccttttgataaagcttggaaggactatgaaacaaaaataaccaagatagaaaaggagaaaaaggaacacgccaagctccatgggatgattcggactgaaataagcggagcggaaattgccgaagagatggaaaaggagaggcgcttcttccagctacagatgtgcgagtatctgctgaaggtcaacgaaatcaagattaaaaagggagtagatttacttcagaatctgatcaaatactttcatgcccaatgcaatttttttcaggatggactcaaagccgtggaaagcctcaaaccttccattgaaacgctgtctacggatcttcacacgatcaaacaggcccaggatgaagaaagaaggcagttgatacagcttcgagatattttgaaatccgcattgcaggttgaacagaaagaggactcccaaattcgtcagagcacagcttatagcttacatcagcctcagggaaacaaggaacatgggaccgagcggaacggcagcctctacaagaagagtgacgggatccgaaaagtgtggcagaaaaggaaatgttcagttaaaaatggttttctgaccatatcccatggtaccgctaaccggcctcctgcaaagctcaacctgctaacctgccaggtgaagaccaaccctgaggagaagaagtgctttgaccttatttcacatgacagaacttaccactttcaagctgaagatgaacaggaatgtcaaatatggatgtctgtgctgcaaaatagcaaagaagaagctttaaacaatgcatttaagggggatgacaatactggagaaaataacatcgtccaagaactgacaaaggagatcatctcagaagtgcagaggatgacgggcaatgacgtctgctgtgactgtggggcgccagatcctacatggctttccaccaacctgggcatcctgacctgcatcgagtgttccggaatccaccgagagctgggggttcattattccaggatgcagtccctgaccttagatgtactgggaacatctgagctgctgctcgccaagaatattgggaatgcaggctttaatgagatcatggaatgttgcctaccagctgaggactcagtcaaacccaacccaggcagcgacatgaatgcaagaaaggactacatcacagccaagtacatcgagaggagatacgcaaggaagaagcacgcggataacgcggcgaagcttcacagtctttgcgaggccgtcaaaacgagagatatttttggattgctccaagcttatgctgatggtgtggatcttacggaaaaaatcccactggccaacggacatgagccggatgaaacggccctccaccttgcagtcagatccgtggatcgaacctctcttcacattgtagactttttagttcagaacagtgggaacctggataaacagacagggaaaggcagcacagccctgcactactgctgcctgaccgacaatgccgagtgcctcaagttgctcctgcgggggaaggcctccatcgagatagcaaacgagtcaggagagactccgctggacattgccaagcgcctcaagcacgagcactgtgaggagctgctgacccaagccttatctggaagatttaattctcacgttcacgttgaatatgaatggcgactactccacgaagacctggatgaaagtgatgacgacatggatgagaaattgcagcccagtcccaaccggcgggaagaccggcccatcagcttctaccagctgggctccaaccagcttcagtctaacgctgtatctttggccagagatgctgcaaaccttgccaaggagaagcagagggctttcatgcccagcatcttgcagaatgagacttacggagccctcctgagtggcagcccacctcccgcccagcctgcagcccccagcaccaccagcgcccccccgcttcctccacggaatgttggcaaagatcccctgacccccaagccgagccctatgcagt

SEQ ID NO: 370144 - DNA, 271 bp, Homo sapiens
aatactggagaaaataacatcgtccaagaactgacaaaggagatcatctcagaagtgcagaggatgacgggcaatgacgtctgctgtgactgtggggcgccaggtgacccagggaccccacccgaccctgggctctaggacatttcaatcccattctgattcacagaatccgttcattgattttcactttcatttcaaacacgaaattaagtgcagctcagcctgagttcatcccattacacaaatgcttaatgaactgtgcagaccgcgg

SEQ ID NO: 370145 - DNA, 783 bp, Homo sapiens
gatattgcaaagcatacagatagagaggtgcgtagggcaaggtgtgggggaggggacatgggggttccatgccctccctgggtgccaccctccaggaccctctgtgtggtttgccatcctgaagctcgagaaccagtcctctttgatttttatggaagcttcttggtgtcagcatctcttcccccagggtacagggtgagaccctctctggggagggccttaagacccacagtcagaaaagtgggggacgataagagtcctgccttggggcaggagaagttcagagagattctgtctcctgaggccttaacactccatgttataaccgaagactgtaacaagggatttgagagttacgagccgggaactgtggatgaaaactaatacagtttacaaagcctttgctgggacataccagctttgagtttcaaggttacgctgtgaagtaggcagaggggcgggggcttcacctgagacccagagatttccatgcatttgccttggactagaaggcaggcctcctgcctgcacacttcagtgggtccagatgcatggccgagtgtatgagcaacagcactgaccatccctctgttctctcagctgacccaagccttatctggaagatttaattctcacgttcacgttgaatatgaatggcgactactccacgaagacctggatgaaagtgatgacgacatggatgagaaattgcaggtctgtgccaggttgctaaccattaagagttttgatcagcttcatccagaacagtgtgggtcctaatct

SEQ ID NO: 370146 - DNA, 5447 bp, Homo sapiens
atcgaacctctcttcacattgtagactttttagttcagaacagtgggaacctggataaacagacagggaaaggcagcacagccctgcactactgctgcctgaccgacaatgccgagtgcctcaagttgctcctgcgggggaaggcctccatcgagatagcaaacgagtcaggagagactccgctggacattgccaagcgcctcaagcacgagcactgtgaggagctgctgacccaagccttatctggaagatttaattctcacgctcacgtggaaaatgaagagcagtacacccaggctctggagaagtttggcggcaactgtgtatgcagagatgacccagatttaggaagtgcgttcctgaagttctcagtgtttacaaaggagttgacagcacttttcaaaaacctgattcagaatatgaacaacataatctccttccctttggacagtttgctgaagggggacctgaaaggagtgaaaggggatctgaaaaagccttttgataaagcttggaaggactatgaaacaaaaataaccaagatagaaaaggagaaaaaggaacacgccaagctccatgggatgattcggactgaaataagcggagcggaaattgccgaagagatggaaaaggagaggcgcttcttccagctacagatgtgcgagtatctgctgaaggtcaacgaaatcaagattaaaaagggagtagatttacttcagaatctgatcaaatactttcatgcccaatgcaatttttttcaggatggactcaaagccgtggaaagcctcaaaccttccattgaaacgctgtctacggatcttcacacgatcaaacaggcccaggatgaagaaagaaggcagttgatacagcttcgagatattttgaaatccgcattgcaggttgaacagaaagaggactcccaaattcgtcagagcacagcttatagcttacatcagcctcagggaaacaaggaacatgggaccgagcggaacggcagcctctacaagaagagtgacgggatccgaaaagtgtggcagaaaaggaaatgttcagttaaaaatggttttctgaccatatcccatggtaccgctaaccggcctcctgcaaagctcaacctgctaacctgccaggtgaagaccaaccctgaggagaagaagtgctttgaccttatttcacatgacagaacttaccactttcaagctgaagatgaacaggaatgtcaaatatggatgtctgtgctgcaaaatagcaaagaagaagctttaaacaatgcatttaagggggatgacaatactggagaaaataacatcgtccaagaactgacaaaggagatcatctcagaagtgcagaggatgacgggcaatgacgtctgctgtgactgtggggcgccagatcctacatggctttccaccaacctgggcatcctgacctgcatcgagtgttccggaatccaccgagagctgggggttcattattccaggatgcagtccctgaccttagatgtactgggaacatctgagctgctgctcgccaagaatattgggaatgcaggctttaatgagatcatggaatgttgcctaccagctgaggactcagtcaaacccaacccaggcagcgacatgaatgcaagaaaggactacatcacagccaagtacatcgagaggagatacgcaaggaagaagcacgcggataacgcggcgaagcttcacagtctttgcgaggccgtcaaaacgagagatatttttggattgctccaagcttatgctgatggtgtggatcttacggaaaaaatcccactggccaacggacatgagccggatgaaacggccctccaccttgcagtcagatccgtggatcgaacctctcttcacattgtagactttttagttcagaacagtgggaacctggataaacagacagggaaaggcagcacagccctgcactactgctgcctgaccgacaatgccgagtgcctcaagttgctcctgcgggggaaggcctccatcgagatagcaaacgagtcaggagagactccgctggacattgccaagcgcctcaagcacgagcactgtgaggagctgctgacccaagccttatctggaagatttaattctcacgttcacgttgaatatgaatggcgactactccacgaagacctggatgaaagtgatgacgacatggatgagaaattgcagcccagtcccaaccggcgggaagaccggcccatcagcttctaccagctgggctccaaccagcttcagtctaacgctgtatctttggccagagatgctgcaaaccttgccaaggagaagcagagggctttcatgcccagcatcttgcagaatgagacttacggagccctcctgagtggcagcccacctcccgcccagcctgcagcccccagcaccaccagcgcccccccgcttcctccacggaatgttggcaaagttcagacagcctcctctgctaacaccctgtggaagacaaactctgtaagtgtggacggtggaagccggcagcgatcttcgtcagatccgccagctgtccatccaccgctgccccctcttcgcgtgacatctaccaatcccctgacccccacgccgcccccacccgttgccaagacgcccagcgtaatggaagccttgagccagccgagcaagcctgccccgcctgggatctcacagatcaggcccccacctctgcccccacagccgcccagccgcctcccgcagaagaagcctgcgccgggggctgacaagtccaccccactgaccaacaaaggccaaccgagaggacctgtggatctctctgcaacggaagctctgggtcctctgtccaatgctatggtcctgcagccccctgcacccatgcctaggaagtcgcaggcaaccaagttgaagcctaagcgggtgaaagcgctctataactgtgtggctgacaaccccgatgagctcaccttctccgagggggatgtgatcatcgtggacggggaggaggaccaggagtggtggattggccacattgatggagatcctggtcgcaaaggcgcattcccggtgtcatttgtgcactttatcgctgactgaattgctactgaacaaaagcattaacagttatgttcctgtttcgttattggtaccaaaactcttgccagataaccagtttcatgaactgtttgtatggcagcccatgttctctaatgccactgctctgttttaaaaactcagaggcaatttttacatatcagtaattgtttttataatttgtggttttcatgaaacattgctatgcatttattaggaaaaactgaatttcccaacaggtgaactgaaaagttattttaactattatacataatcaagatcctgcctctacggaattagctaaacctaaaaatgtttgcattaatgaataaattcttcctgcattccttggcccagttctggagttggtgacctttatcacaattattattttaggcggccagtgaactgctgcttcagaagtccatagcccagctctgaactttctcgataaaatgccatcagttcacctttaaagacacacattcctttgaaatccacccagtgtttaaaaagcaacttggaaatttacacattagcattgtactttctagccctaatttgtgaggttgcagctatcattatattctgcatgtatgtataacctgttgtgaacaatcatacttaacaaaactactgatggtttatgacaacgtagggtaactacagttcattctgttccaggttatataaaactgcatttcctgaatttggttaaaaactaaggatgatggattgcaaaacagttcttttaaattagtttatatgctttaggtgttttggaatttgccttcttgaacttcctgagtcacacagaaagcaactgtacacagtagaattctgtggcgcagaccatgctgtattaacacatcacttgctgtttcctactgagtgtaccactgccttcccttctagcccaggagaatgtttactcagtttagtgtcttgtatttctataatactccaacaggaatggtagtcacactgtcttgaaattgaatctgtccatctgtttataatcaagaacatatcagaaatatataggtcccaggtaatactcccaaacatcccactttttactgtttcaggccatcatatcattcttaagctacttggggtggtagtagaggattaggttgtctattataaaaccaaaactcattcgtttaatgaacttgactgtcatacctctatttagtaattgcgagggtaagattcatagtaggaatattggaaattttggcactctgagaataaataggcatatgatacccacttggacttttaacaaaagtaaaggaataaatttgcatataggcttggaaagtgaggcagcaatgctgttaactgcatttgttgtgatggtgcatttgattgaagcagcttgtctttattatgcaagactgtgtagagttttttttttttttggcattgtactttttgtttttgttataaaggaagacagaacaaactggaatgttttatgatgttgtatagcaatcgctttttacctttcaaagttccgggtaaaaatgtgttatatctgtagttttttgtttttgtttttttttaaagcactacatctgttttcactaattgttaatttctgtttgaacccttcatttaattttctcatagatttaagtaaacagatgtattttgcacagtgcacttatgtctattttaacaatcctcctgcatctgtattttatagtcagccttttgaccacctggtgccagctatataaggaataaagttgattcatatcaacattagaactccagtcccaaactaatctgtcaggttcactggtacataaatacctaggaaatatttttccagtctacaatttggtgctattgtgcagtaactaatagtactcttaccagaggagaaattatattaacgaccctgctaatatcctttcttagttatttgctccttgcaaattaaaaaagcaactaagagaaagaaaaacattgtagatatctatttatatttaaagtttatgtttcatgaactgcagctgcaggattctggcattttgcatgccattctccatcagatctgggatgatggctcagaacatgtacacagactaagagtaactgtgtgatctgttaaggggtggataacataatatgcagcttaggatgctattttgagatgtatgatattcagttcattcacctgattactttggttgcagcacaactgtatatattgtataaccgaaattgattattttcattgtccttaatgcagtgatttataattagagcatgtttaataagtttactcttcttgttaactagtcatttgactggaaaaaaataaaatacttttaaatggaaaaaaaaaaa

SEQ ID NO: 370147 - DNA, 5669 bp, Homo sapiens
cgcccctctccgcgggaggcgtcggggcccgcggctgggtggcgggtagttcccgccggctgtgcgcgcccgcctcggggctcgctctgagaggacgcggcggcagcggactcggagccctcggcgcgcaggcgggcggaccggccgagctgcgcggggctgcgcgccgcccctgctccgccgccaggccccgcgcggctcccgcgcccggcgctcccctttgtccgcgggccggagcggcggcggcagcggcggtgtccgagcggcggtcggagcctgctgcggcagttgaggcggcggcgcccctgcggctgtgcgccagcgccctcgcgccgaggcgatgccggaccagatctccgtgtcggaattcgtggccgagacccatgaggactacaaggcgcccacggcctccagcttcaccacccgcacggcgcagtgccggaacactgtggcggccatcgaggaggctttggacgtggaccggatggttctttacaaaatgaagaaatccgtgaaagcaatcaacagctctgggctggctcacgtggaaaatgaagagcagtacacccaggctctggagaagtttggcggcaactgtgtatgcagagatgacccagatttaggaagtgcgttcctgaagttctcagtgtttacaaaggagttgacagcacttttcaaaaacctgattcagaatatgaacaacataatctccttccctttggacagtttgctgaagggggacctgaaaggagtgaaaggggatctgaaaaagccttttgataaagcttggaaggactatgaaacaaaaataaccaagatagaaaaggagaaaaaggaacacgccaagctccatgggatgattcggactgaaataagcggagcggaaattgccgaagagatggaaaaggagaggcgcttcttccagctacagatgtgcgagtatctgctgaaggtcaacgaaatcaagattaaaaagggagtagatttacttcagaatctgatcaaatactttcatgcccaatgcaatttttttcaggatggactcaaagccgtggaaagcctcaaaccttccattgaaacgctgtctacggatcttcacacgatcaaacaggcccaggatgaagaaagaaggcagttgatacagcttcgagatattttgaaatccgcattgcaggttgaacagaaagaggactcccaaattcgtcagagcacagcttatagcttacatcagcctcagggaaacaaggaacatgggaccgagcggaacggcagcctctacaagaagagtgacgggatccgaaaagtgtggcagaaaaggaaatgttcagttaaaaatggttttctgaccatatcccatggtaccgctaaccggcctcctgcaaagctcaacctgctaacctgccaggtgaagaccaaccctgaggagaagaagtgctttgaccttatttcacatgacagaacttaccactttcaagctgaagatgaacaggaatgtcaaatatggatgtctgtgctgcaaaatagcaaagaagaagctttaaacaatgcatttaagggggatgacaatactggagaaaataacatcgtccaagaactgacaaaggagatcatctcagaagtgcagaggatgacgggcaatgacgtctgctgtgactgtggggcgccagatcctacatggctttccaccaacctgggcatcctgacctgcatcgagtgttccggaatccaccgagagctgggggttcattattccaggatgcagtccctgaccttagatgtactgggaacatctgagctgctgctcgccaagaatattgggaatgcaggctttaatgagatcatggaatgttgcctaccagctgaggactcagtcaaacccaacccaggcagcgacatgaatgcaagaaaggactacatcacagccaagtacatcgagaggagatacgcaaggaagaagcacgcggataacgcggcgaagcttcacagtctttgcgaggccgtcaaaacgagagatatttttggattgctccaagcttatgctgatggtgtggatcttacggaaaaaatcccactggccaacggacatgagccggatgaaacggccctccaccttgcagtcagatccgtggatcgaacctctcttcacattgtagactttttagttcagaacagtgggaacctggataaacagacagggaaaggcagcacagccctgcactactgctgcctgaccgacaatgccgagtgcctcaagttgctcctgcgggggaaggcctccatcgagatagcaaacgagtcaggagagactccgctggacattgccaagcgcctcaagcacgagcactgtgaggagctgctgacccaagccttatctggaagatttaattctcacgttcacgttgaatatgaatggcgactactccacgaagacctggatgaaagtgatgacgacatggatgagaaattgcagcccagtcccaaccggcgggaagaccggcccatcagcttctaccagctgggctccaaccagcttcagtctaacgctgtatctttggccagagatgctgcaaaccttgccaaggagaagcagagggctttcatgcccagcatcttgcagaatgagacttacggagccctcctgagtggcagcccacctcccgcccagcctgcagcccccagcaccaccagcgcccccccgcttcctccacggaatgttggcaaagttcagacagcctcctctgctaacaccctgtggaagacaaactctgtaagtgtggacggtggaagccggcagcgatcttcgtcagatccgccagctgtccatccaccgctgccccctcttcgcgtgacatctaccaatcccctgacccccacgccgcccccacccgttgccaagacgcccagcgtaatggaagccttgagccagccgagcaagcctgccccgcctgggatctcacagatcaggcccccacctctgcccccacagccgcccagccgcctcccgcagaagaagcctgcgccgggggctgacaagtccaccccactgaccaacaaaggccaaccgagaggacctgtggatctctctgcaacggaagctctgggtcctctgtccaatgctatggtcctgcagccccctgcacccatgcctaggaagtcgcaggcaaccaagttgaagcctaagcgggtgaaagcgctctataactgtgtggctgacaaccccgatgagctcaccttctccgagggggatgtgatcatcgtggacggggaggaggaccaggagtggtggattggccacattgatggagatcctggtcgcaaaggcgcattcccggtgtcatttgtgcactttatcgctgactgaattgctactgaacaaaagcattaacagttatgttcctgtttcgttattggtaccaaaactcttgccagataaccagtttcatgaactgtttgtatggcagcccatgttctctaatgccactgctctgttttaaaaactcagaggcaatttttacatatcagtaattgtttttataatttgtggttttcatgaaacattgctatgcatttattaggaaaaactgaatttcccaacaggtgaactgaaaagttattttaactattatacataatcaagatcctgcctctacggaattagctaaacctaaaaatgtttgcattaatgaataaattcttcctgcattccttggcccagttctggagttggtgacctttatcacaattattattttaggcggccagtgaactgctgcttcagaagtccatagcccagctctgaactttctcgataaaatgccatcagttcacctttaaagacacacattcctttgaaatccacccagtgtttaaaaagcaacttggaaatttacacattagcattgtactttctagccctaatttgtgaggttgcagctatcattatattctgcatgtatgtataacctgttgtgaacaatcatacttaacaaaactactgatggtttatgacaacgtagggtaactacagttcattctgttccaggttatataaaactgcatttcctgaatttggttaaaaactaaggatgatggattgcaaaacagttcttttaaattagtttatatgctttaggtgttttggaatttgccttcttgaacttcctgagtcacacagaaagcaactgtacacagtagaattctgtggcgcagaccatgctgtattaacacatcacttgctgtttcctactgagtgtaccactgccttcccttctagcccaggagaatgtttactcagtttagtgtcttgtatttctataatactccaacaggaatggtagtcacactgtcttgaaattgaatctgtccatctgtttataatcaagaacatatcagaaatatataggtcccaggtaatactcccaaacatcccactttttactgtttcaggccatcatatcattcttaagctacttggggtggtagtagaggattaggttgtctattataaaaccaaaactcattcgtttaatgaacttgactgtcatacggcactctgagaataaataggcatatgatacccacttggacttttaacaaaagtaaaggaataaatttgcatataggcttggaaagtgaggcagcaatgctgttaactgcatttgttgtgatggtgcatttgattgaagcagcttgtctttattatgcaagactgtgtagagttttttttttttttggcattgtactttttgtttttgttataaaggaagacagaacaaactggaatgttttatgatgttgtatagcaatcgctttttacctttcaaagttccgggtaaaaatgtgttatatctgtagttttttgtttttgtttttttttaaagcactacatctgttttcactaattgttaatttctgtttgaacccttcatttaattttctcatagatttaagtaaacagatgtattttgcacagtgcacttatgtctattttaacaatcctcctgcatctgtattttatagtcagccttttgaccacctggtgccagctatataaggaataaagttgattcatatcaacattagaactccagtcccaaactaatctgtcaggttcactggtacataaatacctaggaaatatttttccagtctacaatttggtgctattgtgcagtaactaatagtactcttaccagaggagaaattatattaacgaccctgctaatatcctttcttagttatttgctccttgcaaattaaaaaagcaactaagagaaagaaaaacattgtagatatctatttatatttaaagtttatgtttcatgaactgcagctgcaggattctggcattttgcatgccattctccatcagatctgggatgatggctcagaacatgtacacagactaagagtaactgtgtgatctgttaaggggtggataacataatatgcagcttaggatgctattttgagatgtatgatattcagttcattcacctgattactttggttgcagcacaactgtatatattgtataaccgaaattgattattttcattgtccttaatgcagtgatttataattagagcatgtttaataagtttactcttcttgttaactagtcatttgactggaaaaaaataaaatacttttaaatggaaaaaaaaaaa

SEQ ID NO: 370148 - DNA, 4314 bp, Homo sapiens
cgcccctctccgcgggaggcgtcggggcccgcggctgggtggcgggtagttcccgccggctgtgcgcgcccgcctcggggctcgctctgagaggacgcggcggcagcggactcggagccctcggcgcgcaggcgggcggaccggccgagctgcgcggggctgcgcgccgcccctgctccgccgccaggccccgcgcggctcccgcgcccggcgctcccctttgtccgcgggccggagcggcggcggcagcggcggtgtccgagcggcggtcggagcctgctgcggcagttgaggcggcggcgcccctgcggctgtgcgccagcgccctcgcgccgaggcgatgccggaccagatctccgtgtcggaattcgtggccgagacccatgaggactacaaggcgcccacggcctccagcttcaccacccgcacggcgcagtgccggaacactgtggcggccatcgaggaggctttggacgtggaccggatggttctttacaaaatgaagaaatccgtgaaagcaatcaacagctctgggctggctcacgtggaaaatgaagagcagtacacccaggctctggagaagtttggcggcaactgtgtatgcagagatgacccagatttaggaagtgcgttcctgaagttctcagtgtttacaaaggagttgacagcacttttcaaaaacctgattcagaatatgaacaacataatctccttccctttggacagtttgctgaagggggacctgaaaggagtgaaaggggatctgaaaaagccttttgataaagcttggaaggactatgaaacaaaaataaccaagatagaaaaggagaaaaaggaacacgccaagctccatgggatgattcggactgaaataagcggagcggaaattgccgaagagatggaaaaggagaggcgcttcttccagctacagatgtgcgagtatctgctgaaggtcaacgaaatcaagattaaaaagggagtagatttacttcagaatctgatcaaatactttcatgcccaatgcaatttttttcaggatggactcaaagccgtggaaagcctcaaaccttccattgaaacgctgtctacggatcttcacacgatcaaacaggcccaggatgaagaaagaaggcagttgatacagcttcgagatattttgaaatccgcattgcaggttgaacagaaagaggactcccaaattcgtcagagcacagcttatagcttacatcagcctcagggaaacaaggaacatgggaccgagcggaacggcagcctctacaagaagagtgacgggatccgaaaagtgtggcagaaaaggaaatgttcagttaaaaatggttttctgaccatatcccatggtaccgctaaccggcctcctgcaaagctcaacctgctaacctgccaggtgaagaccaaccctgaggagaagaagtgctttgaccttatttcacatgacagaacttaccactttcaagctgaagatgaacaggaatgtcaaatatggatgtctgtgctgcaaaatagcaaagaagaagctttaaacaatgcatttaagggggatgacaatactggagaaaataacatcgtccaagaactgacaaaggagatcatctcagaagtgcagaggatgacgggcaatgacgtctgctgtgactgtggggcgccagatcctacatggctttccaccaacctgggcatcctgacctgcatcgagtgttccggaatccaccgagagctgggggttcattattccaggatgcagtccctgaccttagatgtactgggaacatctgagctgctgctcgccaagaatattgggaatgcaggctttaatgagatcatggaatgttgcctaccagctgaggactcagtcaaacccaacccaggcagcgacatgaatgcaagaaaggactacatcacagccaagtacatcgagaggagatacgcaaggaagaagcacgcggataacgcggcgaagcttcacagtctttgcgaggccgtcaaaacgagagatatttttggattgctccaagcttatgctgatggtgtggatcttacggaaaaaatcccactggccaacggacatgagccggatgaaacggccctccaccttgcagtcagatccgtggatcgaacctctcttcacattgtagactttttagttcagaacagtgggaacctggataaacagacagggaaaggcagcacagccctgcactactgctgcctgaccgacaatgccgagtgcctcaagttgctcctgcgggggaaggcctccatcgagatagcaaacgagtcaggagagactccgctggacattgccaagcgcctcaagcacgagcactgtgaggagctgctgacccaagccttatctggaagatttaattctcacgttcacgttgaatatgaatggcgactactccacgaagacctggatgaaagtgatgacgacatggatgagaaattgcagcccagtcccaaccggcgggaagaccggcccatcagcttctaccagctgggctccaaccagcttcagtctaacgctgtatctttggccagagatgctgcaaaccttgccaaggagaagcagagggctttcatgcccagcatcttgcagaatgagacttacggagccctcctgagtggcagcccacctcccgcccagcctgcagcccccagcaccaccagcgcccccccgcttcctccacggaatgttggcaaagttcagacagcctcctctgctaacaccctgtggaagacaaactctgtaagtgtggacggtggaagccggcagcgatcttcgtcagatccgccagctgtccatccaccgctgccccctcttcgcgtgacatctaccaatcccctgacccccacgccgcccccacccgttgccaagacgcccagcgtaatggaagccttgagccagccgagcaagcctgccccgcctgggatctcacagatcaggcccccacctctgcccccacagccgcccagccgcctcccgcagaagaagcctgcgccgggggctgacaagtccaccccactgaccaacaaaggccaaccgagaggacctgtggatctctctgcaacggaagctctgggtcctctgtccaatgctatggtcctgcagccccctgcacccatgcctaggaagtcgcaggcaaccaagttgaagcctaagcgggtgaaagcgctctataactgtgtggctgacaaccccgatgagctcaccttctccgagggggatgtgatcatcgtggacggggaggaggaccaggagtggtggattggccacattgatggagatcctggtcgcaaaggcgcattcccggtgtcatttgtgcactttatcgctgactgaattgctactgaacaaaagcattaacagttatgttcctgtttcgttattggtaccaaaactcttgccagataaccagtttcatgaactgtttgtatggcagcccatgttctctaatgccactgctctgttttaaaaactcagaggcaatttttacatatcagtaattgtttttataatttgtggttttcatgaaacattgctatgcatttattaggaaaaactgaatttcccaacaggtgaactgaaaagttattttaactattatacataatcaagatcctgcctctacggaattagctaaacctaaaaatgtttgcattaatgaataaattcttcctgcattccttggcccagttctggagttggtgacctttatcacaattattattttaggcggccagtgaactgctgcttcagaagtccatagcccagctctgaactttctcgataaaatgccatcagttcacctttaaagacacacattcctttgaaatccacccagtgtttaaaaagcaacttggaaatttacacattagcattgtactttctagccctaatttgtgaggttgcagctatcattatattctgcatgtatgtataacctgttgtgaacaatcatacttaacaaaactactgatggtttatgacaacgtagggtaactacagttcattctgttccaggttatataaaactgcatttcctgaatttggttaaaattaggtatggttggaaagttttaatggttaaggtaggtggggaatgcctgtaatcgggacgaaactgttcggaattggggccagtttacacttgggcccaggcacgcctatcgaggtattgtgttataccaggggctaaacagttaaacaatgcgcctgttttttttttttgattttttatttgtctcataattatagtaaaataagatgtcatggatagaatggtatataagacg

SEQ ID NO: 370149 - DNA, 2667 bp, Homo sapiens
cgcccctctccgcgggaggcgtcggggcccgcggctgggtggcgggtagttcccgccggctgtgcgcgcccgcctcggggctcgctctgagaggacgcggcggcagcggactcggagccctcggcgcgcaggcgggcggaccggccgagctgcgcggggctgcgcgccgcccctgctccgccgccaggccccgcgcggctcccgcgcccggcgctcccctttgtccgcgggccggagcggcggcggcagcggcggtgtccgagcggcggtcggagcctgctgcggcagttgaggcggcggcgcccctgcggctgtgcgccagcgccctcgcgccgaggcgatgccggaccagatctccgtgtcggaattcgtggccgagacccatgaggactacaaggcgcccacggcctccagcttcaccacccgcacggcgcagtgccggaacactgtggcggccatcgaggaggctttggacgtggaccggatggttctttacaaaatgaagaaatccgtgaaagcaatcaacagctctgggctggctcacgtggaaaatgaagagcagtacacccaggctctggagaagtttggcggcaactgtgtatgcagagatgacccagatttaggaagtgcgttcctgaagttctcagtgtttacaaaggagttgacagcacttttcaaaaacctgattcagaatatgaacaacataatctccttccctttggacagtttgctgaagggggacctgaaaggagtgaaaggggatctgaaaaagccttttgataaagcttggaaggactatgaaacaaaaataaccaagatagaaaaggagaaaaaggaacacgccaagctccatgggatgattcggactgaaataagcggagcggaaattgccgaagagatggaaaaggagaggcgcttcttccagctacagatgtgcgagtatctgctgaaggtcaacgaaatcaagattaaaaagggagtagatttacttcagaatctgatcaaatactttcatgcccaatgcaatttttttcaggatggactcaaagccgtggaaagcctcaaaccttccattgaaacgctgtctacggatcttcacacgatcaaacaggcccaggatgaagaaagaaggcagttgatacagcttcgagatattttgaaatccgcattgcaggttgaacagaaagaggactcccaaattcgtcagagcacagcttatagcttacatcagcctcagggaaacaaggaacatgggaccgagcggaacggcagcctctacaagaagagtgacgggatccgaaaagtgtggcagaaaaggaaatgttcagttaaaaatggttttctgaccatatcccatggtaccgctaaccggcctcctgcaaagctcaacctgctaacctgccaggtgaagaccaaccctgaggagaagaagtgctttgaccttatttcacatgacagaacttaccactttcaagctgaagatgaacaggaatgtcaaatatggatgtctgtgctgcaaaatagcaaagaagaagctttaaacaatgcatttaagggggatgacaatactggagaaaataacatcgtccaagaactgacaaaggagatcatctcagaagtgcagaggatgacgggcaatgacgtctgctgtgactgtggggcgccagatcctacatggctttccaccaacctgggcatcctgacctgcatcgagtgttccggaatccaccgagagctgggggttcattattccaggatgcagtccctgaccttagatgtactgggaacatctgagctgctgctcgccaagaatattgggaatgcaggctttaatgagatcatggaatgttgcctaccagctgaggactcagtcaaacccaacccaggcagcgacatgaatgcaagaaaggactacatcacagccaagtacatcgagaggagatacgcaaggaagaagcacgcggataacgcggcgaagcttcacagtctttgcgaggccgtcaaaacgagagatatttttggattgctccaagcttatgctgatggtgtggatcttacggaaaaaatcccactggccaacggacatgagccggatgaaacggccctccaccttgcagtcagatccgtggatcgaacctctcttcacattgtagactttttagttcagaacagtgggaacctggataaacagacagggaaaggcagcacagccctgcactactgctgcctgaccgacaatgccgagtgcctcaagttgctcctgcgggggaaggcctccatcgagatagcaaacgagtcaggagagactccgctggacattgccaagcgcctcaagcacgagcactgtgaggagctgctgacccaagccttatctggaagatttaattctcacgttcacgttgaatatgaatggcgactactccacgaagacctggatgaaagtgatgacgacatggatgagaaattgcaggggtgagccccaggaaggttgctgccttcacgcaggacttggagctgagagtcagacttaggccttgtgacccaaagccctggctcctagccgcgacccacttccatctgtccttcagcatggtgcttcgaggcatgtctggaatgtgctctgtgctgaattagtggcaaatgccacattaaacacattttcatgga

SEQ ID NO: 370150 - DNA, 432 bp, Homo sapiens
acatggccttagacaaagggaggccggacggcgggtagaagcccttcatgatttgcaaggcaattacgtttggtttcaggaatgcaagaaaggactacatcacagccaagtacatcgagaggagatacgcaaggaagaagcacgcggataacgcggcgaagcttcacagtctttgcgaggccgtcaaaacgagagatatttttggattgctccaagcttatgctgatggtgtggatcttacggaaaaaatcccactggccaacggacatgtaagagtgtgggttgttgctactttaaaaaaaaaaaaaaggccggccacggtggctcatgcctgggatccagtactttacttcaggaggccaaggcggaggatcctttgagctcaggagtttgagatcagcctgggcaccatagggaggccccatctctaca

SEQ ID NO: 370151 - DNA, 2983 bp, Homo sapiens
taaaagggccacgaattaagcccaggagtttttacattttatcgtggtggccttttgggcacggttgcgccaccaacgttgaccccagggaagttccattaggtttccgaggctttaaggataagcggcacttctttcacaatttcttttcattgttcattgcggatatctggaagccttccaggtcccctgaatgtagtagacacttcagcagccgtctcctaccccttttgccactaaatgcttcaaaactgccttttttcctcgccgccgggccaggcggaacgcctaagtccgggtcagtctcgtccgtcggtcggggctggcgcggtgcatcgtgggcactgtagtttccgccgcgtttatggccgcgttaagtctgagtgccgctttgagttgttgaatgaagtgaacttcatttgtcagcgttcggttcatgaactggaatgtaagaggcaccagaggattcctgctctgtcccctggtttgcggcttgcgacgttggacatccccggattgttgtttaatagagaaaactcacctgccttcttgcttttaagtagccccaaaagcagaaccttgatttgtctgtaaggaagaaacacaaaccttttaaaaagttccacttcgactctgcaccgccgacccccaatctctttaattttgccatagaagaggggttttttcaacatctctctcactatctggtgctgatctcactgcataatgactttctatttgtttggtattcgaagctttccgaagctttggaagagcccataccttgggctaggcccagggcactcttatgtctcgctgtttctggcagaccgctgtggcatcaggaaccagcagaggttgttttctcttaaaacaatgtctccacagaataccaaagcaacgaatctgattgccaaggccagatatctcaggaaagatgagggcagtaataagcaagtttattctgttcctcatttttttttagctggagcagctaaggagagatcacagatgaattctcaaactgaagatcatgccttggcacctgtgaggaacactattcaactcccaacacaacctttgaattcagaggagtgggataaacttaaggaagatttaaaagaaaacaccggaaagaccagtttcgaaagttggatcatttcacagatggctggctgtcatagctctatagatgtggctaaatctctgctggcatgggtagcagccaaaaataatggtattgtaagttacgatttactggtcaagtatttgtatctctgtgtctttcatatgcagacatctgaagttattgatgtctttgaaattatgaaagccagatataagactttagaacctagaggttacagtcttctcatccggggattgatccattcagacagatggagagaagcattgttgctgttagaggacatcaaaaaagttataactccttcaaaaaagaactataatgactgtatccagggagctctccttcatcaagatgtaaacacagcttggaatttatatcaggaattgctaggtcatgatattgttcctatgttggaaactttaaaagctttctttgattttggaaaagacataaaggatgataactattcaaataaactactagatattctttcatatctaagaaataatcagctgtatccaggggagtcatttgcacacagtataaaaacatggtttgagagtgttcctggaaaacaatggaaaggacaattcaccacagtccgaaaaagtggccagtgttcgggctgtggaaaaaccatagagtctattcagctgagtccagaagaatatgaatgtcttaagggaaaaatcatgagggatgtgatagatggaggtgaccagtacagaaagacaacacctcaggaacttaagagatttgagaacttcataaaatctcgtcctccttttgatgttgtcattgatggtctcaatgttgccaaaatgtttcctaaagttcgtgaatctcaacttctcttgaatgtcgtctctcaactagccaaacggaatctgcgactgctggtcctaggccggaagcacatgctaagacggagttcccagtggagtcgggatgagatggaagaggtgcaaaagcaagccagctgtttttttgctgatgacatctcggaggatgatccattccttctgtatgccacactgcactccgggaatcactgcaggtttatcacaagagacctgatgcgggaccacaaggcctgtctgcctgatgccaagacccaacgcctgttttttaagtggcagcagggacatcagctggcaattgtaaataggtttccaggatcaaaactaacctttcagcgtattctcagctatgacacagtggtgcaaacaactggagactcgtggcacataccatatgatgaagacttggtagaaagatgttcctgtgaagtaccaaccaaatggctttgcctccaccaaaagacatagagattcttacctctatgctaagtttgtgtttgggtaccctctaggttggcatcagaggctcttgagctggtgtttgtttagggcattgcctctgtcctgaagataaaaggattctattaacagcattgacattgattttttaatgaaatgagatatatcttttcataaccagctgcgtttttttcccctaacatttgtttttggaggcttatcaagagttggagaacttagtgtagagcaaaacctgcatttctcctactgggccagctattccacttagcttgggtgactaatagtgcttttggtatccattttttgctacttctgaccttgccttccaggcctaccaatagcagaatcaatccatctgtccctgagatactcatgttgtttcaaatgcctcctcccatttctggcatagtctcattctctgtatgttatgccctatccacatggaatcatttatcgtcctctgtaataaactggccaagatactaaaggctta

SEQ ID NO: 370152 - DNA, 1981 bp, Homo sapiens
  misc_feature (22)..(22): n is a, c, g, or t
cggctaggtcgagcccggggtnaatcggccgagggcttggcacctgtgaggaacactattcaactcccaacacaacctttgaattcagaggagtgggataaacttaaggaagatttaaaagaaaacaccggaaagaccagtttcgaaagttggatcatttcacagatggctggctgtcatagctctatagatgtggctaaatctctgctggcatgggtagcagccaaaaataatggtattgtaagttacgatttactggtcaagtatttgtatctctgtgtctttcatatgcagacatctgaagttattgatgtctttgaaattatgaaagccagatataagactttagaacctagaggttacagtcttctcatccggggattgatccattcagacagatggagagaagcattgttgctgttagaggacatcaaaaaagttataactccttcaaaaaagaactataatgactgtatccagggagctctccttcatcaagatgtaaacacagcttggaatttatatcaggaattgctaggtcatgatattgttcctatgttggaaactttaaaagctttctttgattttggaaaagacataaaggatgataactattcaaataaactactagatattctttcatatctaagaaataatcagctgtatccaggggagtcatttgcacacagtataaaaacatggtttgagagtgttcctggaaaacaatggaaaggacaattcaccacagtccgaaaaagtggccagtgttcgggctgtggaaaaaccatagagtctattcagctgagtccagaagaatatgaatgtcttaagggaaaaatcatgagggatgtgatagatggaggtgaccagtacagaaagacaacacctcaggaacttaagagatttgagaacttcataaaatctcgtcctccttttgatgttgtcattgatggtctcaatgttgccaaaatgtttcctaaagttcgtgaatctcaacttctcttgaatgtcgtctctcaactagccaaacggaatctgcgactgctggtcctaggccggaagcacatgctaagacggagttcccagtggagtcgggatgagatggaagaggtgcaaaagcaagccagctgtttttttgctgatgacatctcggaggatgatccattccttctgtatgccacactgcactccgggaatcactgcaggtttatcacaagagacctgatgcgggaccacaaggcctgtctgcctgatgccaagacccaacgcctgttttttaagtggcagcagggacatcagctggcaattgtaaataggtttccaggatcaaaactaacctttcagcgtattctcagctatgacacagtggtgcaaacaactggagactcgtggcacataccatatgatgaagacttggtagaaagatgttcctgtgaagtaccaaccaaatggctttgcctccaccaaaagacatagagattcttacctctatgctaagtttgtgtttgggtaccctctaggttggcatcagaggctcttgagctggtgtttgtttagggcattgcctctgtcctgaagataaaaggattctattaacagcattgacattgattttttaatgaaatgagatatatcttttcataaccagctgcgtttttttcccctaacatttgtttttggaggcttatcaagagttggagaacttagtgtagagcaaaacctgcatttctcctactgggccagctattccacttagcttgggtgactaatagtgcttttggtatccattttttgctacttctgaccttgccttccaggcctaccaatagcagaatcaatccatctgtccctgagatactcatgttgtttcaaatgcctcctcccatttctggcatagtctcattctctgtatgttatgccctatccacatggaatcatttatcgtcctctgtaataaactggccaagatactaaaggctta

SEQ ID NO: 370153 - DNA, 2929 bp, Homo sapiens
taaaagggccacgaattaagcccaggagtttttacattttatcgtggtggccttttgggcacggttgcgccaccaacgttgaccccagggaagttccattaggtttccgaggctttaaggataagcggcacttctttcacaatttcttttcattgttcattgcggatatctggaagccttccaggtcccctgaatgtagtagacacttcagcagccgtctcctaccccttttgccactaaatgcttcaaaactgccttttttcctcgccgccgggccaggcggaacgcctaagtccgggtcagtctcgtccgtcggtcggggctggcgcggtgcatcgtgggcactgtagtttccgccgcgtttatggccgcgttaagtctgagtgccgctttgagttgttgaatgaagtgaacttcatttgtcagcgttcggttcatgaactggaatgtaagaggcaccagaggattcctgctctgtcccctggtttgcggcttgcgacgttggacatccccggattgttgtttaatagagaaaactcacctgccttcttgcttttaagtagccccaaaagcagaaccttgatttgtctgtaaggaagaaacacaaaccttttaaaaagttccacttcgactctgcaccgccgacccccaatctctttaattttgccatagaagaggggttttttcaacatctctctcactatctggtgctgatctcactgcataatgactttctatttgtttggtattcgaagctttccgaagctttggaagagcccataccttgggctaggcccagggcactcttatgtctcgctgtttctggcagaccgctgtggcatcaggaaccagcagaggttgttttctcttaaaacaatgtctccacagaataccaaagcaacgaatctgattgccaaggccagatatctcaggaaagatgagggcagtaataagcaagtttattctgttcctcatttttttttagctggagcagctaaggagagatcacagatgaattctcaaactgaagatcatgccttggcacctgtgaggaacactattcaactcccaacacaacctttgaattcagaggagtgggataaacttaaggaagatttaaaagaaaacaccggaaagaccagtttcgaaagttggatcatttcacagatggctggctgtcatagctctatagatgtggctaaatctctgctggcatgggtagcagccaaaaataatggtattgtaagttacgatttactggtcaagtatttgtatctctgtgtctttcatatgcagacatctgaagttattgatgtctttgaaattatgaaagccagatataagactttagaacctagaggttacagtcttctcatccggggattgatccattcagacagatggagagaagcattgttgctgttagaggacatcaaaaaagttataactccttcaaaaaagaactataatgactgtatccagggagctctccttcatcaagatgtaaacacagcttggaatttatatcaggaattgctaggtcatgatattgttcctatgttggaaactttaaaagctttctttgattttggaaaagacataaaggatgataactattcaaataaactactagatattctttcatatctaagaaataatcagctgtatccaggggagtcatttgcacacagtataaaaacatggtttgagagtgttcctggaaaacaatggaaaggacaattcaccacagtccgaaaaagtggccagtgttcgggctgtggaaaaaccatagagtctattcagctgagtccagaagaatatgaatgtcttaagggaaaaatcatgagggatgtgatagatggaggtgaccagtacagaaagacaacacctcaggaacttaagagatttgagaacttcataaaatctcgtcctccttttgatgttgtcattgatggtctcaatgttgccatagccaaacggaatctgcgactgctggtcctaggccggaagcacatgctaagacggagttcccagtggagtcgggatgagatggaagaggtgcaaaagcaagccagctgtttttttgctgatgacatctcggaggatgatccattccttctgtatgccacactgcactccgggaatcactgcaggtttatcacaagagacctgatgcgggaccacaaggcctgtctgcctgatgccaagacccaacgcctgttttttaagtggcagcagggacatcagctggcaattgtaaataggtttccaggatcaaaactaacctttcagcgtattctcagctatgacacagtggtgcaaacaactggagactcgtggcacataccatatgatgaagacttggtagaaagatgttcctgtgaagtaccaaccaaatggctttgcctccaccaaaagacatagagattcttacctctatgctaagtttgtgtttgggtaccctctaggttggcatcagaggctcttgagctggtgtttgtttagggcattgcctctgtcctgaagataaaaggattctattaacagcattgacattgattttttaatgaaatgagatatatcttttcataaccagctgcgtttttttcccctaacatttgtttttggaggcttatcaagagttggagaacttagtgtagagcaaaacctgcatttctcctactgggccagctattccacttagcttgggtgactaatagtgcttttggtatccattttttgctacttctgaccttgccttccaggcctaccaatagcagaatcaatccatctgtccctgagatactcatgttgtttcaaatgcctcctcccatttctggcatagtctcattctctgtatgttatgccctatccacatggaatcatttatcgtcctctgtaataaactggccaagatactaaaggctta

SEQ ID NO: 370154 - DNA, 878 bp, Homo sapiens
ctcttcagctgtgcttgattgtgtcctttcttatgcctggttcagctcggaggatgatccattccttctgtatgccacactgcactccgggaatcactgcaggtttatcacaagagacctgatgcgggaccacaaggcctgtctgcctgatgccaagacccaacgcctgttttttaagtggcagcagggacatcagctggcaattgtaaataggtttccaggatcaaaactaacctttcagcgtattctcagctatgacacagtggtgcaaacaactggagactcgtggcacataccatatgatgaagacttggtagaaagatgttcctgtgaagtaccaaccaaatggctttgcctccaccaaaagacatagagattcttacctctatgctaagtttgtgtttgggtaccctctaggttggcatcagaggctcttgagctggtgtttgtttagggcattgcctctgtcctgaagataaaaggattctattaacagcattgacattgattttttaatgaaatgagatatatcttttcataaccagctgcgtttttttcccctaacatttgtttttggaggcttatcaagagttggagaacttagtgtagagcaaaacctgcatttctcctactgggccagctattccacttagcttgggtgactaatagtgcttttggtatccattttttgctacttctgaccttgccttccaggcctaccaatagcagaatcaatccatctgtccctgagatactcatgttgtttcaaatgcctcctcccatttctggcatagtctcattctctgtatgttatgccctatccacatggaatcatttatcgtcctctgtaataaactggccaagatactaaaggctta

SEQ ID NO: 370155 - DNA, 6044 bp, Homo sapiens
taaaagggccacgaattaagcccaggagtttttacattttatcgtggtggccttttgggcacggttgcgccaccaacgttgaccccagggaagttccattaggtttccgaggctttaaggataagcggcacttctttcacaatttcttttcattgttcattgcggatatctggaagccttccaggtcccctgaatgtagtagacacttcagcagccgtctcctaccccttttgccactaaatgcttcaaaactgccttttttcctcgccgccgggccaggcggaacgcctaagtccgggtcagtctcgtccgtcggtcggggctggcgcggtgcatcgtgggcactgtagtttccgccgcgtttatggccgcgttaagtctgagtgccgctttgagttgttgaatgaagtgaacttcatttgtcagcgttcggttcatgaactggaatgtaagaggcaccagaggattcctgctctgtcccctggtttgcggcttgcgacgttggacatccccggattgttgtttaatagagaaaactcacctgccttcttgcttttaagtagccccaaaagcagaaccttgatttgtctgtaaggaagaaacacaaaccttttaaaaagttccacttcgactctgcaccgccgacccccaatctctttaattttgccatagaagaggggttttttcaacatctctctcactatctggtgctgatctcactgcataatgactttctatttgtttggtattcgaagctttccgaagctttggaagagcccataccttgggctaggcccagggcactcttatgtctcgctgtttctggcagaccgctgtggcatcaggaaccagcagaggttgttttctcttaaaacaatgtctccacagaataccaaagcaacgaatctgattgccaaggccagatatctcaggaaagatgagggcagtaataagcaagtttattctgttcctcatttttttttagctggagcagctaaggagagatcacagatgaattctcaaactgaagatcatgccttggcacctgtgaggaacactattcaactcccaacacaacctttgaattcagaggagtgggataaacttaaggaagatttaaaagaaaacaccggaaagaccagtttcgaaagttggatcatttcacagatggctggctgtcatagctctatagatgtggctaaatctctgctggcatgggtagcagccaaaaataatggtattgtaagttacgatttactggtcaagtatttgtatctctgtgtctttcatatgcagacatctgaagttattgatgtctttgaaattatgaaagccagatataagactttagaacctagaggttacagtcttctcatccggggattgatccattcagacagatggagagaagcattgttgctgttagaggacatcaaaaaagttataactccttcaaaaaagaactataatgactgtatccagggagctctccttcatcaagatgtaaacacagcttggaatttatatcaggaattgctaggtcatgatattgttcctatgttggaaactttaaaagctttctttgattttggaaaagacataaaggatgataactattcaaataaactactagatattctttcatatctaagaaataatcagctgtatccaggggagtcatttgcacacagtataaaaacatggtttgagagtggccagtgttcgggctgtggaaaaaccatagagtctattcagctgagtccagaagaatatgaatgtcttaagggaaaaatcatgagggatgtgatagatggaggtgaccagtacagaaagacaacacctcaggaacttaagagatttgagaacttcataaaatctcgtcctccttttgatgttgtcattgatggtctcaatgttgccaaaatgtttcctaaagttcgtgaatctcaacttctcttgaatgtcgtctctcaactagccaaacggaatctgcgactgctggtcctaggccggaagcacatgctaagacggagttcccagtggagtcgggatgagatggaagaggtgcaaaagcaagccagctgtttttttgctgatgacatctcggaggatgatccattccttctgtatgccacactgcactccgggaatcactgcaggtttatcacaagagacctgatgcgggaccacaaggcctgtctgcctgatgccaagacccaacgcctgttttttaagtggcagcagggacatcagctggcaattgtaaataggtttccaggatcaaaactaacctttcagcgtattctcagctatgacacagtggtgcaaacaactggagactcgtggcacataccatatgatgaagacttggtagaaagatgttcctgtgaagtaccaaccaaatggctttgcctccaccaaaagacatagagattcttacctctatgctaagtttgtgtttgggtaccctctaggttggcatcagaggctcttgagctggtgtttgtttagggcattgcctctgtcctgaagataaaaggattctattaacagcattgacattgattttttaatgaaatgagatatatcttttcataaccagctgcgtttttttcccctaacatttgtttttggaggcttatcaagagttggagaacttagtgtagagcaaaacctgcatttctcctactgggccagctattccacttagcttgggtgactaatagtgcttttggtatccattttttgctacttctgaccttgccttccaggcctaccaatagcagaatcaatccatctgtccctgagatactcatgttgtttcaaatgcctcctcccatttctggcatagtctcattctctgtatgttatgccctatccacatggaatcatttatcgtcctctgtaataaactggccaagatactaaaggcttactattcatagcagtttttaattacttatcatccaattatttggattggagaagagggggcattcactcctctttttcttattttttttggaaatagagtctcaactcactctagcctgggtgacagagcgagaccttgtctcaaaacaaaacaaagtgctggaattgcagacttgagccacagtgcccagcctcacttctctagactatgatggttttttcttcattctataatctcttttccaaattggttcaacattttgtgaacactattaatttcatcattcagtatatgtgggctttctaaaatatgccaatttttttccacttaatcaagtttgacttaatttaacaaagtgattatattttaatagttacatttctgttttttccactcactagccagcttacagtttattagcccttgatttcagctgaaaatattcatgtctgcaccccttcatgatagttctttctttacgtatacatactgtattcaatatgcaagaacaggcaaaaactactctattgtgataaaaatcagaatagtaattgcctgaggaaagggatatgagagaacttgagagaactttctcggggtgatggaaagtttcttatattgatttgggtaatagtaacatagctatatgtatatattagttaaaattcctcacactaaacattttaaattgatatatttacatttatgacaatatacctcaaagtaagttagggtaagaaaagataattacttacatgaaataaacaatgacctcttttatatcaaaccatatacatgtgtataattagggtatgtattatgcacagagaaacaatttaggaaaatccaaggaggggacgttttatcttcttacctatttactgaatgcaacattactgcacaccaagacaaaagagctctccaggaaaacattggatatattgagagcattaaaagatactgcaaaagctctaataaattcagtctgcttattttccaaatttcataaactacatacttaggaaactgtgctttcagtgagctaaacttctttttttaagtaactatcatagttttaagaaaaacattttaagaagacaaaaagtatttattaagcccatctaaaaggctaatgcaaattcccaaaaaaggagcacatagagatagaggaggaggccgaagtggtggctcatacctgttaattccagcactttgggaggccaagacaggaggatcactttaggcccagagttggagaccaacctgggcaacatagcaagaccctgtctcttaaaaaaaaaaaaaaagacgggagaagctacaagaagaaaactagaactttagagcaggagtaaaccttagagcatgtaaagtccattttggagatgaggaacagacccaggaagatgacctggcttccctgaatcccacggctagttagtgcagacatttcagccataacccagctcttctaattcccaaatactctttcttctactggcacatagagatgggggaggagtcagggcatggtggcccacacctacagttccagcactttgggaggccaaatgggagaattgcttgaagccaggagttggagaccagcctaggcaacacagggagacccgtgtcgacaaaaaatttaaaaattagctgggcatggtagcacatgcctgtggtcccagctactcagagggctgaggtgggaggatcacttgagccccagaggtcaaggctgcagtgagctgtgatcatgctactacactccagcctaggtgacagagtgagaccctgtctcaaagggagggaggtaagaatgagaagaaggaacaggggtgtacctcttttaagggcccaagtatcctgaatggctcagcagtatagaacattgtggtagagaaattacattttaaaataactctaataccgtttagaaacaaaaccctaacttctgcttgagataaactgaagtgcatctgtcccttgtccaggagtggggaaccattgtagggttgctcagcataagtcatactgccacggtgaccttgaggagtgcagggattccctgaaggaagcagctggtaccagacacttaggctgcccatttgtgttctgatcatttgagtgaaaaaaaggtacctgtcaagcaagctcctggacaccacaagaaggaggaattattttaaaagctgtactcttaaattgttagtatctttaaaatcagttgtgaacaatgaaggatttgaaagagcattgactttgccacttaaaagtatttctaaaatactttgtgcttcccccttgcattctgaatttatacacttttcctcctgctgttctcagacccagtggaaagaaaatctcaaggaagaaggctgagtttattctctcagggctctgttgggtctacctcatctgaggtggcttattcttcataggaaattaatttttcttctcaagtatgcacttaaatataattactgcttccttggtcctctagcagatttctcacttttatttatttttttttttgagacagagtcttgatcttttttcatctaggctggagtgcaatggtttgatctcagttcactgcaacctctgcctcctgggttcaagcaattctcatgcctctgcctctcgggcagctggaattacaggcatgcgccatgacgcctggctaatttttgcatttttagtagagacgggttttcaccatgttgccccggttgctctcaaactcctgacctcaggtgatccacccgcctcagcctcccaaagtgctgggattacaggtgtgagtcaccccgcacagcctgaaatgaggcatctctatctatagtccagcagccctacaggaggcaggaggggagcaagaataagaaaggaaatttgtaaaaggcacttaggagtgagcagaaaggaaataggaccagcttttacctgcccagtcctggccagtgacaagcagtctgcttgagtctgtgctaaataaacaaaggaagttccatttagagctctacagaggggaagccatagaaattaacaggatgaaaatacaagagacaggaacacagatgaataaatgtaataaaatttgagaaat

SEQ ID NO: 370156 - DNA, 2652 bp, Homo sapiens
cagtccatggccgacttccgcgcagcagcttctgcatttgctgtttcctacctgctccacccctaccagctcaggcgtcagcaccgccaggccccgtaaaggttcatgaactggaatgtaagaggcaccagaggattcctgctctgtcccctggtttgcggcttgcgacgttggacatccccggattgttgtttaatagagaaaactcacctgccttcttgcttttaagtagccccaaaagcagaaccttgatttgtctgtaaggaagaaacacaaaccttttaaaaagttccacttcgactctgcaccgccgacccccaatctctttaattttgccatagaagaggggttttttcaacatctctctcactatctggtgctgatctcactgcataatgactttctatttgtttggtattcgaagctttccgaagctttggaagagcccataccttgggctaggcccagggcactcttatgtctcgctgtttctggcagaccgctgtggcatcaggaaccagcagaggttgttttctcttaaaacaatgtctccacagaataccaaagcaacgaatctgattgccaaggccagatatctcaggaaagatgagggcagtaataagcaagtttattctgttcctcatttttttttagctggagcagctaaggagagatcacagatgaattctcaaactgaagatcatgccttggcacctgtgaggaacactattcaactcccaacacaacctttgaattcagaggagtgggataaacttaaggaagatttaaaagaaaacaccggaaagaccagtttcgaaagttggatcatttcacagatggctggctgtcatagctctatagatgtggctaaatctctgctggcatgggtagcagccaaaaataatggtattgtaagttacgatttactggtcaagtatttgtatctctgtgtctttcatatgcagacatctgaagttattgatgtctttgaaattatgaaagccagatataagactttagaacctagaggttacagtcttctcatccggggattgatccattcagacagatggagagaagcattgttgctgttagaggacatcaaaaaagttataactccttcaaaaaagaactataatgactgtatccagggagctctccttcatcaagatgtaaacacagcttggaatttatatcaggaattgctaggtcatgatattgttcctatgttggaaactttaaaagctttctttgattttggaaaagacataaaggatgataactattcaaataaactactagatattctttcatatctaagaaataatcagctgtatccaggggagtcatttgcacacagtataaaaacatggtttgagagtgttcctggaaaacaatggaaaggacaattcaccacagtccgaaaaagtggccagtgttcgggctgtggaaaaaccatagagtctattcagctgagtccagaagaatatgaatgtcttaagggaaaaatcatgagggatgtgatagatggaggtgaccagtacagaaagacaacacctcaggaacttaagagatttgagaacttcataaaatctcgtcctccttttgatgttgtcattgatggtctcaatgttgccaaaatgtttcctaaagttcgtgaatctcaacttctcttgaatgtcgtctctcaactagccaaacggaatctgcgactgctggtcctaggccggaagcacatgctaagacggagttcccagtggagtcgggatgagatggaagaggtgcaaaagcaagccagctgtttttttgctgatgacatctcggaggatgatccattccttctgtatgccacactgcactccgggaatcactgcaggtttatcacaagagacctgatgcgggaccacaaggcctgtctgcctgatgccaagacccaacgcctgttttttaagtggcagcagggacatcagctggcaattgtaaataggtttccaggatcaaaactaacctttcagcgtattctcagctatgacacagtggtgcaaacaactggagactcgtggcacataccatatgatgaagacttggtagaaagatgttcctgtgaagtaccaaccaaatggctttgcctccaccaaaagacatagagattcttacctctatgctaagtttgtgtttgggtaccctctaggttggcatcagaggctcttgagctggtgtttgtttagggcattgcctctgtcctgaagataaaaggattctattaacagcattgacattgattttttaatgaaatgagatatatcttttcataaccagctgcgtttttttcccctaacatttgtttttggaggcttatcaagagttggagaacttagtgtagagcaaaacctgcatttctcctactgggccagctattccacttagcttgggtgactaatagtgcttttggtatccattttttgctacttctgaccttgccttccaggcctaccaatagcagaatcaatccatctgtccctgagatactcatgttgtttcaaatgcctcctcccatttctggcatagtctcattctctgtatgttatgccctatccacatggaatcatttatcgtcctctgtaataaactggccaagatactaaaggctta

SEQ ID NO: 370157 - DNA, 1978 bp, Homo sapiens
taaaagggccacgaattaagcccaggagtttttacattttatcgtggtggccttttgggcacggttgcgccaccaacgttgaccccagggaagttccattaggtttccgaggctttaaggataagcggcacttctttcacaatttcttttcattgttcattgcggatatctggaagccttccaggtcccctgaatgtagtagacacttcagcagccgtctcctaccccttttgccactaaatgcttcaaaactgccttttttcctcgccgccgggccaggcggaacgcctaagtccgggtcagtctcgtccgtcggtcggggctggcgcggtgcatcgtgggcactgtagtttccgccgcgtttatggccgcgttaagtctgagtgccgctttgagttgttgaatgaagtgaacttcatttgtcagcgttcggtacgcagtctaggcagcgcccttcctgtacctctcttcctttcctgagtcgttggcgcagctgactcgccacctcctccctcctcgtccccccaccggaggagttttgcggtctgtagagagctatgcagggtgagggcccctagacttcggctttcgccgctgttggtggtaggctggagttgggggtccctggatacggttttggctttacaccccctttccagcaagcttcccgtgggaatctgttccttttcaggacagctgtgatccactgttcctggaaaacaatggaaaggacaattcaccacagtccgaaaaagtggccagtgttcgggctgtggaaaaaccatagagtctattcagctgagtccagaagaatatgaatgtcttaagggaaaaatcatgagggatgtgatagatggaggtgaccagtacagaaagacaacacctcaggaacttaagagatttgagaacttcataaaatctcgtcctccttttgatgttgtcattgatggtctcaatgttgccaaaatgtttcctaaagttcgtgaatctcaacttctcttgaatgtcgtctctcaactagccaaacggaatctgcgactgctggtcctaggccggaagcacatgctaagacggagttcccagtggagtcgggatgagatggaagaggtgcaaaagcaagccagctgtttttttgctgatgacatctcggaggatgatccattccttctgtatgccacactgcactccgggaatcactgcaggtttatcacaagagacctgatgcgggaccacaaggcctgtctgcctgatgccaagacccaacgcctgttttttaagtggcagcagggacatcagctggcaattgtaaataggtttccaggatcaaaactaacctttcagcgtattctcagctatgacacagtggtgcaaacaactggagactcgtggcacataccatatgatgaagacttggtagaaagatgttcctgtgaagtaccaaccaaatggctttgcctccaccaaaagacatagagattcttacctctatgctaagtttgtgtttgggtaccctctaggttggcatcagaggctcttgagctggtgtttgtttagggcattgcctctgtcctgaagataaaaggattctattaacagcattgacattgattttttaatgaaatgagatatatcttttcataaccagctgcgtttttttcccctaacatttgtttttggaggcttatcaagagttggagaacttagtgtagagcaaaacctgcatttctcctactgggccagctattccacttagcttgggtgactaatagtgcttttggtatccattttttgctacttctgaccttgccttccaggcctaccaatagcagaatcaatccatctgtccctgagatactcatgttgtttcaaatgcctcctcccatttctggcatagtctcattctctgtatgttatgccctatccacatggaatcatttatcgtcctctgtaataaactggccaagatactaaaggctta

SEQ ID NO: 370158 - DNA, 1930 bp, Homo sapiens
taaaagggccacgaattaagcccaggagtttttacattttatcgtggtggccttttgggcacggttgcgccaccaacgttgaccccagggaagttccattaggtttccgaggctttaaggataagcggcacttctttcacaatttcttttcattgttcattgcggatatctggaagccttccaggtcccctgaatgtagtagacacttcagcagccgtctcctaccccttttgccactaaatgcttcaaaactgccttttttcctcgccgccgggccaggcggaacgcctaagtccgggtcagtctcgtccgtcggtcggggctggcgcggtgcatcgtgggcactgtagtttccgccgcgtttatggccgcgttaagtctgagtgccgctttgagttgttgaatgaagtgaacttcatttgtcagcgttcggtacgcagtctaggcagcgcccttcctgtacctctcttcctttcctgagtcgttggcgcagctgactcgccacctcctccctcctcgtccccccaccggaggagttttgcggtctgtagagagctatgcagggtgagggcccctagacttcggctttcgccgctgttggtggtaggctggagttgggggtccctggatacggttttggctttacaccccctttccagcaagcttcccgtgggaatctgttccttttcaggacagctgtgatccactggccagtgttcgggctgtggaaaaaccatagagtctattcagctgagtccagaagaatatgaatgtcttaagggaaaaatcatgagggatgtgatagatggaggtgaccagtacagaaagacaacacctcaggaacttaagagatttgagaacttcataaaatctcgtcctccttttgatgttgtcattgatggtctcaatgttgccaaaatgtttcctaaagttcgtgaatctcaacttctcttgaatgtcgtctctcaactagccaaacggaatctgcgactgctggtcctaggccggaagcacatgctaagacggagttcccagtggagtcgggatgagatggaagaggtgcaaaagcaagccagctgtttttttgctgatgacatctcggaggatgatccattccttctgtatgccacactgcactccgggaatcactgcaggtttatcacaagagacctgatgcgggaccacaaggcctgtctgcctgatgccaagacccaacgcctgttttttaagtggcagcagggacatcagctggcaattgtaaataggtttccaggatcaaaactaacctttcagcgtattctcagctatgacacagtggtgcaaacaactggagactcgtggcacataccatatgatgaagacttggtagaaagatgttcctgtgaagtaccaaccaaatggctttgcctccaccaaaagacatagagattcttacctctatgctaagtttgtgtttgggtaccctctaggttggcatcagaggctcttgagctggtgtttgtttagggcattgcctctgtcctgaagataaaaggattctattaacagcattgacattgattttttaatgaaatgagatatatcttttcataaccagctgcgtttttttcccctaacatttgtttttggaggcttatcaagagttggagaacttagtgtagagcaaaacctgcatttctcctactgggccagctattccacttagcttgggtgactaatagtgcttttggtatccattttttgctacttctgaccttgccttccaggcctaccaatagcagaatcaatccatctgtccctgagatactcatgttgtttcaaatgcctcctcccatttctggcatagtctcattctctgtatgttatgccctatccacatggaatcatttatcgtcctctgtaataaactggccaagatactaaaggctta

SEQ ID NO: 370159 - DNA, 476 bp, Homo sapiens
tagagaggcaacatgccatcctgagagaatacagggctggtgcctcaaagtttttccacagacaaggtacgcagcctggggcaaactattttaactgcagctttctcagctgtgaaaaatgagaatggcaatccttactgctttggaagagagttgtgtttattaattagtttgtatttcaaagtgcttcacaactggaaagtttcactattggattaaggaaaaatttcctttcattttatccctctccacattaggatgaaaagaaactgtgcttgctgaggctgggagaaaaacggaggggattcaggcaaaaaagctaacaaacctgacttccatggtagtggctcatttccccggctgtaagatggcacccattaaagggagctttgtaaattaggtatcttaaagggcagccaaacctgccatctgaagaattacttttgttttagacttaatttttatgattgcttcaa

SEQ ID NO: 370160 - DNA, 2029 bp, Homo sapiens
  misc_feature (2023)..(2025): n is a, c, g, or t
  misc_feature (2027)..(2028): n is a, c, g, or t
ccggcagccagcgcagctccgggcctcgctccctgtgcgtcctgcgggggcggaggcgcggagaggcggcaagcgcagccggggagggtgggggggcagaggcacagacagaggcgcggaggctcggagagagaagacgtggagggagggacagagcctggacagcggtggacacggcatcgtgcgcggggaagagggcagcacgcagcaggcgccgagcgccgggcaccgagaagggcagcccgggtgatctccggccgtccatgcacagagcgccttcccccacagccgagcagccgccgggcggaggggacagcgcccgccggaccctgcagcccagactcaagcccagtgcccgagccatggcactgcctcggacgctgggggagctgcagctgtaccgggtcctgcagcgcgccaacctcctttcctactatgagaccttcatccagcagggaggggacgacgtgcagcagctgtgtgaggcgggtgaggaggagtttctggagatcatggcacttgtgggcatggccaccaagcccctccatgtccggcgcctgcagaaggcactgagagagtgggccaccaatccagggctcttcagtcaaccagtgcctgctgttcccgtctccagcatcccgctcttcaagatctctgagactgcgggtacccggaaagggagcatgagcaatgggcatggcagcccaggggaaaaggcaggcagtgcccgcagttttagccccaagagcccccttgaacttggagagaagctatcaccactgcctgggggacctggggcaggggacccccggatctggccaggccggagcactccagagtcggacgttggggcaggaggagaagaggaggctggagcaggtgggactgggggtggtccagaccgactggagccagagatggtaccgccagcctgtctggggagagtctggatggacatttgcaggctgtggggtcatgtccaaggctgacgccgccccctgctgacctgcctctggcattgccagcccatgggctatggagccgacacatcctgcagcagacactgatggacgaggggctgcggctcgcccgcctcgtctcccacgaccgcgtgggccgcctcagcccctgtgtgcctgcgaagccacctctcgcagagttcgaggaagggctgctggacagatgtcctgccccaggaccccatcccgcgctggtggagggtcgcaggagcagcgtgaaagtggaggctgaggccagccggcagtgagggttggactggtgtcttcagacccaggacctcagacttctggctcacacagacccccacgctctccatccccggaatctagtcacaaccctggatccttcctctgcccttctcctgcctccccacctgctccatgggcataagactgtggggcttcaagcaataacaagcagaggcctggagagaggacacaaggagggtgcgtggtgccctcacccctgcccagagcgagggggcaaggactctgcctccagggcatctggggttttcccctccctcacacaacacactcccattctctttaggtttgcaccagtggtgtgagcagttggactcagtttggacaagggggaaagggggacttccctgggaaggtccagctaaaagtggcaacatttgcccccagaattgggggcctgggaacactggacctgctccttctcccctctccttccccgtttttgtgcttctggtttgtttctttaattaatttaacaagtgctgcagtttgccctcccattcccatctatcccccaagtcctttgcaatttcttccctgccctacataggggcggtgggtgtgggatcccttcactggccccctcgggaggcctgggttggactcagggtctcctccagctgggggctggaccgcagcacctatctgagcagttagagcgtctttcttttcagattgtgtacagtagattatttattttgttattttggaataaaatttattttatggcttaggannnanna

SEQ ID NO: 370161 - DNA, 2603 bp, Homo sapiens
  misc_feature (2597)..(2599): n is a, c, g, or t
  misc_feature (2601)..(2602): n is a, c, g, or t
ccggcagccagcgcagctccgggcctcgctccctgtgcgtcctgcgggggcggaggcgcggagaggcggcaagcgcagccggggagggtgggggggcagaggcacagacagaggcgcggaggctcggagagagaagacgtggagggagggacagagcctggacagcggtggacacggcatcgtgcgcggggaagagggcagcacgcagcaggcgccgagcgccgggcaccgagaagggcagcccgggtgatctccggccgtccatgcacagagcgccttcccccacagccgagcagccgccgggcggaggggacagcgcccgccggaccctgcagcccagactcaagcccagtgcccgagccatggcactgcctcggacgctgggggagctgcagctgtaccgggtcctgcagcgcgccaacctcctttcctactatgagaccttcatccagcagggaggggacgacgtgcagcagctgtgtgaggcgggtgaggaggagtttctggagatcatggcacttgtgggcatggccaccaagcccctccatgtccggcgcctgcagaaggcactgagagagtgggccaccaatccagggctcttcagtcaaccagtgcctgctgttcccgtctccagcatcccgctcttcaagatctctgagactgcgggtacccggaaagggagcatgagcaatgggcatggcagcccaggggaaaaggcaggcagtgcccgcagttttagccccaagagcccccttgaacttggagagaagctatcaccactgcctgggggacctggggcaggggacccccggatctggccaggccggagcactccagagtcggacgttggggcaggaggagaagaggaggctggctcgccccccttctccccccctgcagggggaggagtccctgaggggactggggctggggggctggcagcaggtgggactgggggtggtccagaccgactggagccagagatggtacgcatggtggtggaaagtgtggagaggatcttccggagcttcccaaggggggatgctggggaggtcacatccctgctaaagctgaataagaagctggcacggagcgttgggcacatctttgagatggatgataatgacagccagaaggaagaggagatccgcaaatacagcatcatctatggccgtttcgactctaagcggcgggagggcaagcagctcagcctgcacgagctcaccatcaacgaggctgctgcccagttctgcatgagggacaacacgctcttattacggagagtggagctcttctctttgtcccgccaagtagcccgagagagcacctacttgtcctccttgaagggctccaggcttcaccctgaagaactgggaggccctccactgaagaagctgaaacaagaggttggagaacagagtcaccctgaaatccagcagcctcccccaggccctgagtcctatgtacccccataccgccccagcctggaggaggacagcgccagcctgtctggggagagtctggatggacatttgcaggctgtggggtcatgtccaaggctgacgccgccccctgctgacctgcctctggcattgccagcccatgggctatggagccgacacatcctgcagcagacactgatggacgaggggctgcggctcgcccgcctcgtctcccacgaccgcgtgggccgcctcagcccctgtgtgcctgcgaagccacctctcgcagagttcgaggaagggctgctggacagatgtcctgccccaggaccccatcccgcgctggtggagggtcgcaggagcagcgtgaaagtggaggctgaggccagccggcagtgagggttggactggtgtcttcagacccaggacctcagacttctggctcacacagacccccacgctctccatccccggaatctagtcacaaccctggatccttcctctgcccttctcctgcctccccacctgctccatgggcataagactgtggggcttcaagcaataacaagcagaggcctggagagaggacacaaggagggtgcgtggtgccctcacccctgcccagagcgagggggcaaggactctgcctccagggcatctggggttttcccctccctcacacaacacactcccattctctttaggtttgcaccagtggtgtgagcagttggactcagtttggacaagggggaaagggggacttccctgggaaggtccagctaaaagtggcaacatttgcccccagaattgggggcctgggaacactggacctgctccttctcccctctccttccccgtttttgtgcttctggtttgtttctttaattaatttaacaagtgctgcagtttgccctcccattcccatctatcccccaagtcctttgcaatttcttccctgccctacataggggcggtgggtgtgggatcccttcactggccccctcgggaggcctgggttggactcagggtctcctccagctgggggctggaccgcagcacctatctgagcagttagagcgtctttcttttcagattgtgtacagtagattatttattttgttattttggaataaaatttattttatggcttaggannnanna

SEQ ID NO: 370162 - DNA, 3400 bp, Homo sapiens
  misc_feature (3394)..(3396): n is a, c, g, or t
  misc_feature (3398)..(3399): n is a, c, g, or t
ccggcagccagcgcagctccgggcctcgctccctgtgcgtcctgcgggggcggaggcgcggagaggcggcaagcgcagccggggagggtgggggggcagaggcacagacagaggcgcggaggctcggagagagaagacgtggagggagggacagagcctggacagcggtggacacggcatcgtgcgcggggaagagggcagcacgcagcaggcgccgagcgccgggcaccgagaagggcagcccgggtgatctccggccgtccatgcacagagcgccttcccccacagccgagcagccgccgggcggaggggacagcgcccgccggaccctgcagcccagactcaagcccagtgcccgagccatggcactgcctcggacgctgggggagctgcagctgtaccgggtcctgcagcgcgccaacctcctttcctactatgagaccttcatccagcagggaggggacgacgtgcagcagctgtgtgaggcgggtgaggaggagtttctggagatcatggcacttgtgggcatggccaccaagcccctccatgtccggcgcctgcagaaggcactgagagagtgggccaccaatccagggctcttcagtcaaccagtgcctgctgttcccgtctccagcatcccgctcttcaagatctctgagactgcgggtacccggaaagggagcatgagcaatgggcatggcagcccaggggaaaaggcaggcagtgcccgcagttttagccccaagagcccccttgaacttggagagaagctatcaccactgcctgggggacctggggcaggggacccccggatctggccaggccggagcactccagagtcggacgttggggcaggaggagaagaggaggctggctcgccccccttctccccccctgcagggggaggagtccctgaggggactggggctggggggctggcagcaggtgggactgggggtggtccagaccgactggagccagagatggtacgcatggtggtggaaagtgtggagaggatcttccggagcttcccaaggggggatgctggggaggtcacatccctgctaaagctgaataagaagctggcacggagcgttgggcacatctttgagatggatgataatgacagccagaaggaagaggagatccgcaaatacagcatcatctatggccgtttcgactctaagcggcgggagggcaagcagctcagcctgcacgaggtgagaacccccaggcctcctaggattgcccttgacttccaggtctccagccgcttacctctgcgagtttctacagtctccgactatctttcattatctcttgaccaggaccccaggccctgatcccctccccaacaggcccctaccccagcggccgcagtgcttccatcctcagctgagggggaagcagagatacaggcagcaccgagctgttcagctccttgtcactcaggaccccacaggagaggaggaggccccgggcattcctaggaagctgtgggtgctgacctctgtcttcccacctcagaaagctcccatgtagtgtcaaaaccaaagcaagcgtctgatggatgggcctcatttgtccaatggtgaaggggtgtgaggaggtctggtgaggcagcggggaagttcgaattctgactctcctggctgccctccctccacagctcaccatcaacgaggctgctgcccagttctgcatgagggacaacacgctcttattacggagagtggagctcttctctttgtcccgccaagtagcccgagagagcacctacttgtcctccttgaagggctccaggtgagaccccttccccaggtccttcctggactggaatcctgctatggagttagatcatgtcctaaccttcagctcaggcagctctaggcctgcttcccgcccacctggatgtcctgcttttggccaagtcagcttgtctcaggtctggtctctcctcccatccatgtcgggtccccccaaccccctacaacaatagtgcttgaactagagactctttctcggccagcttcttggcaaaggttttaaataacacatgcctctggctgggttctgtgctctgccagtcgagtggccctcgtcagcctcatccactttattcttacccatcttttcaggcttcactgaagagcttcaccctgaagaactgggaggccctccactgaagaagctgaaacaagaggttggagaacagagtcaccctgaaatccagcagcctcccccaggccctgagtcctatgtacccccataccgccccagcctggaggaggacagcgccagcctgtctggggagagtctggatggacatttgcaggctgtggggtcatgtccaaggctgacgccgccccctgctgacctgcctctggcattgccagcccatgggctatggagccgacacatcctgcagcagacactgatggacgaggggctgcggctcgcccgcctcgtctcccacgaccgcgtgggccgcctcagcccctgtgtgcctgcgaagccacctctcgcagagttcgaggaagggctgctggacagatgtcctgccccaggaccccatcccgcgctggtggagggtcgcaggagcagcgtgaaagtggaggctgaggccagccggcagtgagggttggactggtgtcttcagacccaggacctcagacttctggctcacacagacccccacgctctccatccccggaatctagtcacaaccctggatccttcctctgcccttctcctgcctccccacctgctccatgggcataagactgtggggcttcaagcaataacaagcagaggcctggagagaggacacaaggagggtgcgtggtgccctcacccctgcccagagcgagggggcaaggactctgcctccagggcatctggggttttcccctccctcacacaacacactcccattctctttaggtttgcaccagtggtgtgagcagttggactcagtttggacaagggggaaagggggacttccctgggaaggtccagctaaaagtggcaacatttgcccccagaattgggggcctgggaacactggacctgctccttctcccctctccttccccgtttttgtgcttctggtttgtttctttaattaatttaacaagtgctgcagtttgccctcccattcccatctatcccccaagtcctttgcaatttcttccctgccctacataggggcggtgggtgtgggatcccttcactggccccctcgggaggcctgggttggactcagggtctcctccagctgggggctggaccgcagcacctatctgagcagttagagcgtctttcttttcagattgtgtacagtagattatttattttgttattttggaataaaatttattttatggcttaggannnanna

SEQ ID NO: 370163 - DNA, 3537 bp, Homo sapiens
  misc_feature (594)..(594): n is a, c, g, or t
  misc_feature (3531)..(3533): n is a, c, g, or t
  misc_feature (3535)..(3536): n is a, c, g, or t
ccggcagccagcgcagctccgggcctcgctccctgtgcgtcctgcgggggcggaggcgcggagaggcggcaagcgcagccggggagggtgggggggcagaggcacagacagaggcgcggaggctcggagagagaagacgtggagggagggacagagcctggacagcggtggacacggcatcgtgcgcggggaagagggcagcacgcagcaggcgccgagcgccgggcaccgagaagggcagcccgggtgatctccggccgtccatgcacagagcgccttcccccacagccgagcagccgccgggcggaggggacagcgcccgccggaccctgcagcccagactcaagcccagtgcccgagccatggcactgcctcggacgctgggggagctgcagctgtaccgggtcctgcagcgcgccaacctcctttcctactatgagaccttcatccagcagggaggggacgacgtgcagcagctgtgtggagggcgcgagtgaagcgatggacgtttctgggaagaatcattgcgcactatgtgcgtgacattggtcacaacacaaaggcacacactcgcaaatgtccggagaccgtccntgcgacgagaggcacctcgatgaggacgtagggcactaccacacattccaacgtggtactcgttacatggtccaaaccctagttagccttgtcttggctatcctcggatcgtcacaaagtcgagtcgcactggctcttgtcaaaggattcgtcgtagaggcaatgtctgggggatacccgcaggggagagatgcgggacgtcgaacttgaaggcaaaaatgggggtggcaatttgggctaaggcccagggggggaaaaggcaggcagtgcccgcagttttagccccaagagcccccttgaacttggagagaagctatcaccactgcctgggggacctggggcaggggacccccggatctggccaggccggagcactccagagtcggacgttggggcaggaggagaagaggaggctggctcgccccccttctccccccctgcagggggaggagtccctgaggggactggggctggggggctggcagcaggtgggactgggggtggtccagaccgactggagccagagatggtacgcatggtggtggaaagtgtggagaggatcttccggagcttcccaaggggggatgctggggaggtcacatccctgctaaagctgaataagaagctggcacggagcgttgggcacatctttgagatggatgataatgacagccagaaggaagaggagatccgcaaatacagcatcatctatggccgtttcgactctaagcggcgggagggcaagcagctcagcctgcacgaggtgagaacccccaggcctcctaggattgcccttgacttccaggtctccagccgcttacctctgcgagtttctacagtctccgactatctttcattatctcttgaccaggaccccaggccctgatcccctccccaacaggcccctaccccagcggccgcagtgcttccatcctcagctgagggggaagcagagatacaggcagcaccgagctgttcagctccttgtcactcaggaccccacaggagaggaggaggccccgggcattcctaggaagctgtgggtgctgacctctgtcttcccacctcagaaagctcccatgtagtgtcaaaaccaaagcaagcgtctgatggatgggcctcatttgtccaatggtgaaggggtgtgaggaggtctggtgaggcagcggggaagttcgaattctgactctcctggctgccctccctccacagctcaccatcaacgaggctgctgcccagttctgcatgagggacaacacgctcttattacggagagtggagctcttctctttgtcccgccaagtagcccgagagagcacctacttgtcctccttgaagggctccaggtgagaccccttccccaggtccttcctggactggaatcctgctatggagttagatcatgtcctaaccttcagctcaggcagctctaggcctgcttcccgcccacctggatgtcctgcttttggccaagtcagcttgtctcaggtctggtctctcctcccatccatgtcgggtccccccaaccccctacaacaatagtgcttgaactagagactctttctcggccagcttcttggcaaaggttttaaataacacatgcctctggctgggttctgtgctctgccagtcgagtggccctcgtcagcctcatccactttattcttacccatcttttcaggcttcactgaagagcttcaccctgaagaactgggaggccctccactgaagaagctgaaacaagaggttggagaacagagtcaccctgaaatccagcagcctcccccaggccctgagtcctatgtacccccataccgccccagcctggaggaggacagcgccagcctgtctggggagagtctggatggacatttgcaggctgtggggtcatgtccaaggctgacgccgccccctgctgacctgcctctggcattgccagcccatgggctatggagccgacacatcctgcagcagacactgatggacgaggggctgcggctcgcccgcctcgtctcccacgaccgcgtgggccgcctcagcccctgtgtgcctgcgaagccacctctcgcagagttcgaggaagggctgctggacagatgtcctgccccaggaccccatcccgcgctggtggagggtcgcaggagcagcgtgaaagtggaggctgaggccagccggcagtgagggttggactggtgtcttcagacccaggacctcagacttctggctcacacagacccccacgctctccatccccggaatctagtcacaaccctggatccttcctctgcccttctcctgcctccccacctgctccatgggcataagactgtggggcttcaagcaataacaagcagaggcctggagagaggacacaaggagggtgcgtggtgccctcacccctgcccagagcgagggggcaaggactctgcctccagggcatctggggttttcccctccctcacacaacacactcccattctctttaggtttgcaccagtggtgtgagcagttggactcagtttggacaagggggaaagggggacttccctgggaaggtccagctaaaagtggcaacatttgcccccagaattgggggcctgggaacactggacctgctccttctcccctctccttccccgtttttgtgcttctggtttgtttctttaattaatttaacaagtgctgcagtttgccctcccattcccatctatcccccaagtcctttgcaatttcttccctgccctacataggggcggtgggtgtgggatcccttcactggccccctcgggaggcctgggttggactcagggtctcctccagctgggggctggaccgcagcacctatctgagcagttagagcgtctttcttttcagattgtgtacagtagattatttattttgttattttggaataaaatttattttatggcttaggannnanna

SEQ ID NO: 370164 - DNA, 2411 bp, Homo sapiens
  misc_feature (2405)..(2407): n is a, c, g, or t
  misc_feature (2409)..(2410): n is a, c, g, or t
ccggcagccagcgcagctccgggcctcgctccctgtgcgtcctgcgggggcggaggcgcggagaggcggcaagcgcagccggggagggtgggggggcagaggcacagacagaggcgcggaggctcggagagagaagacgtggagggagggacagagcctggacagcggtggacacggcatcgtgcgcggggaagagggcagcacgcagcaggcgccgagcgccgggcaccgagaagggcagcccgggtgatctccggccgtccatgcacagagcgccttcccccacagccgagcagccgccgggcggaggggacagcgcccgccggaccctgcagcccagactcaagcccagtgcccgagccatggcactgcctcggacgctgggggagctgcagctgtaccgggtcctgcagcgcgccaacctcctttcctactatgagaccttcatccagcagggaggggacgacgtgcagcagctgtgtgaggcgggtgaggaggagtttctggagatcatggcacttgtgggcatggccaccaagcccctccatgtccggcgcctgcagaaggcactgagagagtgggccaccaatccagggctcttcagtcaaccagtgcctgctgttcccgtctccagcatcccgctcttcaagatctctgagactgcgggtacccggaaagggagcatgagcaatgggcatggcagcccaggggaaaaggcaggcagtgcccgcagttttagccccaagagcccccttgaacttggagagaagctatcaccactgcctgggggacctggggcaggggacccccggatctggccaggccggagcactccagagtcggacgttggggcaggaggagaagaggaggctggctcgccccccttctccccccctgcagggggaggagtccctgaggggactggggctggggggctggcagcaggtgggactgggggtggtccagaccgactggagccagagatggtacgcatggtggtggaaagtgtggagaggatcttccggagcttcccaaggggggatgctggggaggtcacatccctgctaaagctgaataagaagctggcacggagcgttgggcacatctttgagatggatgataatgacagccagaaggaagaggagatccgcaaatacagcatcatctatggccgtttcgactctaagcggcgggagggcaagcagctcagcctgcacgagctcaccatcaacgaggctgctgcccagttctgcatgagggacaacacgctcttattacggagagtggagctcttctctttgtcccgccaagtagcccgagagagcacctacttgtcctccttgaagggctccaggcttcaccctgaagaactgggaggccctccactgaagaagctgaaacaagaggttggagaacagagtcaccctgaaatccagcagcctcccccaggccctgagtcctatgtacccccataccgccccagcctggaggaggacagcgccagcctgtctggggagagtctggatggacatttgcaggagttcgaggaagggctgctggacagatgtcctgccccaggaccccatcccgcgctggtggagggtcgcaggagcagcgtgaaagtggaggctgaggccagccggcagtgagggttggactggtgtcttcagacccaggacctcagacttctggctcacacagacccccacgctctccatccccggaatctagtcacaaccctggatccttcctctgcccttctcctgcctccccacctgctccatgggcataagactgtggggcttcaagcaataacaagcagaggcctggagagaggacacaaggagggtgcgtggtgccctcacccctgcccagagcgagggggcaaggactctgcctccagggcatctggggttttcccctccctcacacaacacactcccattctctttaggtttgcaccagtggtgtgagcagttggactcagtttggacaagggggaaagggggacttccctgggaaggtccagctaaaagtggcaacatttgcccccagaattgggggcctgggaacactggacctgctccttctcccctctccttccccgtttttgtgcttctggtttgtttctttaattaatttaacaagtgctgcagtttgccctcccattcccatctatcccccaagtcctttgcaatttcttccctgccctacataggggcggtgggtgtgggatcccttcactggccccctcgggaggcctgggttggactcagggtctcctccagctgggggctggaccgcagcacctatctgagcagttagagcgtctttcttttcagattgtgtacagtagattatttattttgttattttggaataaaatttattttatggcttaggannnanna

SEQ ID NO: 370165 - DNA, 564 bp, Homo sapiens
gccaaaccacccccgcagctcctgacagaaccagaaattccagcgcaaccgaggaggcgggagagaaagagagagagacagacagagacagagctacgcacagccagggaggggagggggctcacacacatgggaatggaaccccccatacacatgcagtgggcaggaggcagtaattcaataaacctaaactgagcccatcttcacagctttctttgcccctgcttctgttcccaaccacctctgtctgcagccagtcaccctgcagtctcctaactgcccccttttccctgcagagttcgaggaagggctgctggacagatgtcctgccccaggaccccatcccgcgctggtggagggtcgcaggagcagcgtgaaagtggaggctgaggccagccggcagtgagggttggactggtgtcttcagacccaggacctcagacttctggctcacacagacccccacgctctccatccccggaatctagtcacaaccctggatccttcctctgcccttctcctgcctccccacctgctccatgggcataagactgtggggcttca

SEQ ID NO: 370166 - DNA, 514 bp, Homo sapiens
  misc_feature (349)..(350): n is a, c, g, or t
  misc_feature (356)..(356): n is a, c, g, or t
  misc_feature (361)..(362): n is a, c, g, or t
  misc_feature (369)..(369): n is a, c, g, or t
  misc_feature (373)..(373): n is a, c, g, or t
  misc_feature (375)..(375): n is a, c, g, or t
  misc_feature (388)..(388): n is a, c, g, or t
  misc_feature (393)..(393): n is a, c, g, or t
  misc_feature (404)..(404): n is a, c, g, or t
  misc_feature (424)..(424): n is a, c, g, or t
  misc_feature (431)..(431): n is a, c, g, or t
  misc_feature (444)..(444): n is a, c, g, or t
  misc_feature (465)..(465): n is a, c, g, or t
ccggcagccagcgcagctccgggcctcgctccctgtgcgtcctgcgggggcggaggcgcggagaggcggcaagcgcagccggggagggtgggggggcagaggcacagacagaggcgcggaggctcggagagagaagacgtggagggagggacagagcctggacagcggtggacacggcatcgtgcgcggggaagagggcagcacgcagcaggcgccgagcgccgggcaccgagaagggcagcccgggtgatctccggccgtccatgcacagagcgccttcccccacagccgagcagccgccgggcggaggggacagcgcccgccggaccctgcagcccagactcaagcnnagtgcncgagnnatggcantgcntnggaagattccccncagcnacagtgtatcncgaagttatatataaaatanaatggangttgatcttatangaatgaattattccactcctnctttgtaacatcagcttgcactacccgtatcgcctcgggagcttctgat

SEQ ID NO: 370167 - DNA, 3052 bp, Homo sapiens
  misc_feature (3046)..(3048): n is a, c, g, or t
  misc_feature (3050)..(3051): n is a, c, g, or t
ccggcagccagcgcagctccgggcctcgctccctgtgcgtcctgcgggggcggaggcgcggagaggcggcaagcgcagccggggagggtgggggggcagaggcacagacagaggcgcggaggctcggagagagaagacgtggagggagggacagagcctggacagcggtggacacggcatcgtgcgcggggaagagggcagcacgcagcaggcgccgagcgccgggcaccgagaagggcagcccgggtgatctccggccgtccatgcacagagcgccttcccccacagccgagcagccgccgggcggaggggacagcgcccgccggaccctgcagcccagactcaagcccagtgcccgagccatggcactgcctcggacgctgggggagctgcagctgtaccgggtcctgcagcgcgccaacctcctttcctactatgagaccttcatccagcagggaggggacgacgtgcagcagctgtgtgaggcgggtgaggaggagtttctggagatcatggcacttgtgggcatggccaccaagcccctccatgtccggcgcctgcagaaggcactgagagagtgggccaccaatccagggctcttcagtcaaccagtgcctgctgttcccgtctccagcatcccgctcttcaagatctctgagactgcgggtacccggaaagggagcatgagcaatgggcatggcagcccaggggaaaaggcaggcagtgcccgcagttttagccccaagagcccccttgaacttggagagaagctatcaccactgcctgggggacctggggcaggggacccccggatctggccaggccggagcactccagagtcggacgttggggcaggaggagaagaggaggctggctcgccccccttctccccccctgcagggggaggagtccctgaggggactggggctggggggctggcagcaggtgggactgggggtggtccagaccgactggagccagagatggtacgcatggtggtggaaagtgtggagaggatcttccggagcttcccaaggggggatgctggggaggtcacatccctgctaaagctgaataagaagctggcacggagcgttgggcacatctttgagatggatgataatgacagccagaaggaagaggagatccgcaaatacagcatcatctatggccgtttcgactctaagcggcgggagggcaagcagctcagcctgcacgaggtgagaacccccaggcctcctaggattgcccttgacttccaggtctccagccgcttacctctgcgagtttctacagtctccgactatctttcattatctcttgaccaggaccccaggccctgatcccctccccaacaggcccctaccccagcggccgcagtgcttccatcctcagctgagggggaagcagagatacaggcagcaccgagctgttcagctccttgtcactcaggaccccacaggagaggaggaggccccgggcattcctaggaagctgtgggtgctgacctctgtcttcccacctcagaaagctcccatgtagtgtcaaaaccaaagcaagcgtctgatggatgggcctcatttgtccaatggtgaaggggtgtgaggaggtctggtgaggcagcggggaagttcgaattctgactctcctggctgccctccctccacagctcaccatcaacgaggctgctgcccagttctgcatgagggacaacacgctcttattacggagagtggagctcttctctttgtcccgccaagtagcccgagagagcacctacttgtcctccttgaagggctccaggcttcaccctgaagaactgggaggccctccactgaagaagctgaaacaagaggttggagaacagagtcaccctgaaatccagcagcctcccccaggccctgagtcctatgtacccccataccgccccagcctggaggaggacagcgccagcctgtctggggagagtctggatggacatttgcaggctgtggggtcatgtccaaggctgacgccgccccctgctgacctgcctctggcattgccagcccatgggctatggagccgacacatcctgcagcagacactgatggacgaggggctgcggctcgcccgcctcgtctcccacgaccgcgtgggccgcctcagcccctgtgtgcctgcgaagccacctctcgcagagttcgaggaagggctgctggacagatgtcctgccccaggaccccatcccgcgctggtggagggtcgcaggagcagcgtgaaagtggaggctgaggccagccggcagtgagggttggactggtgtcttcagacccaggacctcagacttctggctcacacagacccccacgctctccatccccggaatctagtcacaaccctggatccttcctctgcccttctcctgcctccccacctgctccatgggcataagactgtggggcttcaagcaataacaagcagaggcctggagagaggacacaaggagggtgcgtggtgccctcacccctgcccagagcgagggggcaaggactctgcctccagggcatctggggttttcccctccctcacacaacacactcccattctctttaggtttgcaccagtggtgtgagcagttggactcagtttggacaagggggaaagggggacttccctgggaaggtccagctaaaagtggcaacatttgcccccagaattgggggcctgggaacactggacctgctccttctcccctctccttccccgtttttgtgcttctggtttgtttctttaattaatttaacaagtgctgcagtttgccctcccattcccatctatcccccaagtcctttgcaatttcttccctgccctacataggggcggtgggtgtgggatcccttcactggccccctcgggaggcctgggttggactcagggtctcctccagctgggggctggaccgcagcacctatctgagcagttagagcgtctttcttttcagattgtgtacagtagattatttattttgttattttggaataaaatttattttatggcttaggannnanna

SEQ ID NO: 370168 - DNA, 447 bp, Homo sapiens
cttggcaaaacgggatcaaagtacatgaaagatgacagcctggtgaactattatgggaaagctggaaacttggcttttggggagatgctggccatcctgctgaaatctttagcggggttcagagatgtctctttgctcatttcctcctaaagcatgagttgtttgcagccttaggttgctgtcttgaatacagtagagctgggaaggcagtagcttggagaactggtaccagccttttaaaatcctagttccgattattggtagttatgacaaaggaagcctttgattaaagtctgtgaacttacatgtgggaaaatgatgagcaattctcaaagcaaaaaggaaaagccgtatattaccagtgaggtttggcgatctatagcagttgtttcttttggctttcacaacatagcttggccctcagctcttgtcctcctaatagtgagc

SEQ ID NO: 370169 - DNA, 763 bp, Homo sapiens
tcattgccctcaccataggagaagtacatcagaggattttaaggaagagaattgtgcatctggtccggggattgcaggcaagatcctcttcatggagaagatttatgcttaagctgttccttgagaggcagtgttgttctgtggctaggagtgtgggatccagggtcaggttccctgtgtttgaaccttgatcagcctcaatgtcctcacttgtacgattgctagaataatcctcttgcctcagagttattgtaaatattaaggaactaatactcataaagcatttgaagcactgcctggcctatagcaagcacttactgaatgttagctataatcacttaaacagacacaggtttggaaaaggacaattctaagtttaggcagtgatactgacggtgtatttaggggtttctaataattggttactcatagtcattcacggagcctctgcctttctagtctcccactatagaggctgaaacatcgcagtcacttttccagcctcccctgtagccatgtgacccatttatggccaatagactagagagggggcgttgaggaggacctctctttgcaggcctctcccgtccccagcgttggaacacaggtgtgaacttggtgcttgccgcagctgctactgtcatctccccaccttgaggggaggaccaagagagttaccaactgtggcccggatccctgaccttgtacaaccagtgaagcaaagcacaaagccatctgcccccagaattcacgttatgtggaa

SEQ ID NO: 370170 - DNA, 743 bp, Homo sapiens
tttcccgggccttggcggagctccgggaccgcgcagggcagcgccaggaacacgatgaacaggatgagcttccgcgagcggcggctctcctgcagccagcggaccagcgccagctcgctcagggccatggctccggggctccgctgcgggcgcggtgcgcggtcccttttataagcaaaggagaaacaaacagatgccctctgacatcgctggagctctgcaggccctccgaggggaccgtgggagcaagagctgttttcttgaaaagctacctagaataaatgttaccctgtcacagtctcttagcagaagagtggccttgttttattaatgttagcttgttgacagcaggaggccactgagaacagcagtgtgatgtgtggctgcccccgctctctccacctccctactcccttgcagagaccccctgtgcttctcattgctaccccatgtgtgagaagagatggttgaataggtaagtaggtcaggaacatgggtctccaggatgtcacaggatgtgcacaacttaaacattaaacagggaggacagaaggaaaaccacttaggaggaggaagcagatggcagagagccgtttaagatggcaggagggtatcactcagggagtgccccagagtgcttgctctggagtttcagaacccaaggatgcagactctaccccagggaccacatggggacagagaggcattatggtaaagggtgcctgccaggatgcccaggtccc

SEQ ID NO: 370171 - DNA, 739 bp, Homo sapiens
cctggagttagtcgaccgttgcgagacgttgagctgcggaagatgagtccaaagccgagagcctcgggacctccggccaaggccacggaggcaggaaagaggaagtcctcctctcagccgagccccagtgacccgaagaagaagactaccaaggtggccaagaagggaaaagcagttcgtagagggagacgcgggaagaaaggggctgcgacaaagatggcggccgtgacggcacctgaggcggagagcgggccagcggcacccggccccagcgaccagcccagccaggagctccctcagcacgagctgccgccggaggagccagtgagcgaggggacccagcacgaccccctgagtcaggaggccgagctggaggaaccactgagtcaggagagcgaggtggaagaaccactgagtcaggagagccaggtggaggaaccactgagtcaggagagcgaggtggaggaaccactgagtcaggagagccaggtggaggaaccactgagtcaggagagcgaggtggaggaaccactgagtcaggagagccaggtggaggaaccactgagtcaggagagcgagatggaagaactaccgagtgtgtagacggccagctactcccctatctccgagagcagcgactaagttcaggcccagccgccagacctcagagatctcaccagcggggtgcttgccattctgaagataataaaatgaatgtgttgcaaattgaaaaaaaaaa

SEQ ID NO: 370172 - DNA, 398 bp, Homo sapiens
cttagagggtccccctagtttagaatgttatagcatgcattgctgcctgggggtctgggtttaggtgctattgaaacttctaaaagtaggcctcgcacctcagactcccagtaggggggattaggaaccactgagtcaggagagccaggtggaggaaccactgagtcaggagagcgaggtggaggaaccactgagtcaggagagccaggtggaggaaccactgagtcaggagagcgagatggaagaactaccgagtgtgtagacggccagctactcccctatctccgagagcagcgactaagttcaggcccagccgccagacctcagagatctcaccagcggggtgcttgccattctgaagataataaaatgaatgtgttgcaaattgaaaaaaaaaa

SEQ ID NO: 370173 - DNA, 558 bp, Homo sapiens
cctggagttagtcgaccgttgcgagacgttgagctgcggaagatgagtccaaagccgagagcctcgggacctccggccaaggccacggaggcaggaaagaggaagtcctcctctcagccgagccccagtgacccgaagaagaagactaccaaggtggccaagaagggaaaagcagttcgtagagggagacgcgggaagaaaggggctgcgacaaagatggcggccgtgacggcacctgaggcggagagcgggccagcggcacccggccccagcgaccagcccagccaggagctccctcagcacgagctgccgccggaggagccagtgagcgaggggacccagcacgaccccctgagtcaggaggccgagctggaggaaccactgagtcaggagagcgaggtggaagaaccactgatgtgtagacggccagctactcccctatctccgagagcagcgactaagttcaggcccagccgccagacctcagagatctcaccagcggggtgcttgccattctgaagataataaaatgaatgtgttgcaaattgaaaaaaaaaa

SEQ ID NO: 370174 - DNA, 1154 bp, Homo sapiens
gtattggtttcacacaatttactctaaggcgcccacctaatagagctcaggcaacccgtgggaacctgacagtcccaaacaggtctgtaccctgtgtggctgcaccacaagcccaatgccctcggctttcctagggaaagcatggtgccaggtgcagatgctggccctctgtgctgtgggacagtggtgtgggagccagccagctaaccataccctgctgccatccccaacatccccaacacatatttatatttagtttctgttctcctccccttactctgtcgcctcctcctcctcctctttgtgtctttcccacgcggattctttctctttcctctgagtggacaatactgtaggcctgacccgcttagacaaactctgacctcctgtggtcacccaggaagctgactgctaggccttggatgagggggcagtgggagggggaccaggtgataccagaatggctccccccacagattcgttacccaaggacatgggtacactggtcgaatgctggctgcagaagcagaatgtgctgcgtggaggtggcagagattggttgctgaggatttgaaatgaaccatgaaccaaagctagaatgaaagcattatattgtctaacctagaatcgacaccctaaattatttttactgattcatgaatgcatatgtgaattattttctttgactacaaatgccttatatacccaaatcacagctccaagcagtacttttgaacagaactacaataaagtatgaatgttagattattaccagaaaaaccacaacaaacaactcaccaaccacaacacacaaacaaaccacaaaaccgcacatagtaaaacatcaaaccacacaactccaaagagaaagagagaggagaggaggcggcagacaaaagtaagaaaggaatgagaagagagagagaaggaagagagagcgcggggagggagacaagaggggaagcgccgaagacaaagaggaagaaagggcagaggaagggctaacacaagggatggacgagccaggagagaaaaccagtcggcagagagcaaagacaacgtaaaggagcaagccagaccacgcccctcagaatcgacagaaacaaaaggaaaagaacagagacaagggagcagagaaaaagcgaggaaaaggt

SEQ ID NO: 370175 - DNA, 371 bp, Homo sapiens
cccaatttcaaaatgttaacagctagttcagaattgaaacaaaacaaaccctacggagagcaaatcaaacactttcataggctggacggtcccttgagtcagtggtcacgggctctgtcctaattttacagaggtcacaatttgaagcttccaggtggggctgaggggacaggaagggctcttggttggcctccgcttgcctgccttgtgtgacagggggctctcgctctgcaagggcaggctgtgtctctgttagctgtttctccctttgagaagagcgtccttgagtggttttctacttggttgaaataatcataaacacaggagaatgatgactcaccaagacgttctttgctattagtatcatgatg

SEQ ID NO: 370176 - DNA, 353 bp, Homo sapiens
  misc_feature (19)..(20): n is a, c, g, or t
  misc_feature (96)..(96): n is a, c, g, or t
aaaaaaggaaaaaaagggnnaacccccctttgggccccttttggggggggaaacccccccctttttcctttggaaaagggggggccttttttttgnaagaagtgcagctgtgatgatgtttcactattacttcagtgtgaatgtagaaccaaggactcatcttcattttatacctaaaagtgccttgtcaagaaatttttgcatgttttaaaagataaatatttttgtacacagagttcaaggggaaatgcactttaaaaatcccaagaatggatgttctttgtgtggtatgagaggttggtttgtatctcaaaagcaaaaatgtaataaaggaagacaaaacaaaaaaaaaa

SEQ ID NO: 370177 - DNA, 5494 bp, Homo sapiens
gacatctccgggaacccagcccaggccctgcctcccggacacaccgacgctcacgtagtcgcgcttgccacaaccctgcgggctctccgatgcggcgagcgagctggggagggggcttctccgcggcccaaaagcctgttcatctagccccatgatggctgtggacatcgagtacagatacaactgcatggctccttccttgcgccaagagaggtttgcctttaagatctcaccaaagcccagcaaaccactgaggccttgtattcagctgagcagcaagaatgaagccagtggaatggtggccccggctgtccaggagaagaaggtgaaaaagcgggtgtccttcgcagacaaccaggggctggccctgacaatggtcaaagtgttctcggaattcgatgacccgctagatatgccattcaacatcaccgagctcctagacaacattgtgagcttgacgacagcagagagcgagagctttgttctggatttttcccagccctctgcagattacttagactttagaaatcgacttcaggccgaccacgtctgccttgagaactgtgtgctcaaggacaaggccattgcaggcactgcgaaggttcagaacctcgcatttgagaagaccgtgaaaataaggatgacgttcgacacctggaagagctacacagactttccttgtcagtacgtgaaggacacttatgccggttcagacagggacacgttctccttcgacatcagtttgcccgagaagattcagtcttatgaaagaatggagtttgctgtgtactacgagtgcaatggacagacgtactgggacagcaacagaggcaagaactataggatcatccgggctgagttaaaatctacccagggaatgaccaagccccacagtggaccggatttgggaatatcctttgaccagttcggaagccctcggtgttcctatggtctgtttccagagtggccaagttacttaggatatgaaaagctagggccctactactagtgactgcaggtgacagggcgtggcggagctgccacagacaagcctagctctgctcactgtgcagtggagatggaaggccagggaggagcaacgtggaacttccatgaggccccgtttgggaaaataaaaggatcctcttcacttctttcttaaacagcaaatccagccaggttcagattacacaaccagtgtctcactcaaaggagcagtggtggctggcgcgctttcgcactgtggcagccacgagagtctgtgcacgtctgtgctggaaagggtatggatgggaatcaagcctatgccagtgctgatgaagctggaggagtctctcctctgctctccactcagatgtgggacatcagtcgccaaaagccactcagccccagccacctcgcgtgagaccctcactgttcattgtgttcatctttgggtgctctctgccagccaggcctttcctgcaagctgctgtgcttccccgtccacgtgtatctctgctgtgacacactgagctgacgcacatttccagtgcagctgcagaagagaaatgggattggctcttgttttctgcaagttcatgttttgcattttatgttcttccacaattgatctgatgttcaggaaaagataataaaggcaaattagttagtggttgagacaggcatttcctcctcccgcttcttgaccccacagatgtattccagcagagagcaacacaccagtcatcaaaacccactggctcctgtgcggtgtcacagattgcagggttctgacaaggcaggacagtcaagagtggggacactttcagcttctacttttgccttctagggggagctttctaagtccccacatttaccccgagtcaccggaaaaatctgatttttcccccgaaagctcaatgactttaacgtgcttggctggtttgtctcattctttatgaaagaattttggggccgggcgcggtggcttatgcctgtaatcccagcactttgggaggccgaggcaggtggatcacgaggtcaggagatcgagaccatcctggctaacacggtgaaaccctgtctctactaaaaatacaaaaaaattagccaggcgtggtggcgggcgcctgtagtcccagctacttgggaggctgaggcaggagaatggcgggaacctgggaggcggagcttacagtgaaccgagatcacaccactgcattcccgcctgggcagcagagcgagactccgtctcaaacagaaaaaaaaagagaattttgaatctcctttcccaaagagtcatcttttctgctgtgtttaggacatttgatttgcatatccaatatctcctcgaaaccttcagaaaatggttttatcgtgactgtgattcacactatctagaacactttaccagcacccagggacatggacttgggtgttcttatttatggtgtgtatgtaaagagataggggagaaaaacctcacccaagttcttatacgttattttaaacgtttgccaactctgaaatttcagagattcattgttcttaaccatattggactaaagtctgttggttagtgctgttgtaaaagagacctctggggccgagtgtggtggcttatgcctgtaatccctgcactttgggaagccaaggcgggcagctcacctgaggtcaggcgttcaagaccagcctggccaacatggtgaaacctcgtctgtactaaaaatacaaaatttagctgagtgtggtggcaggcgcctgtaatccagctactcgggaggctgaggcaggagaatcacttgaacccaggaggtggaggttgcagtgagccgagatcacgtcactgcatttcagcctgagcgacagagtgaaactgtctcaaaaaagagagacttccgggacagtcattatcagataggccccaaacctgtgatttttcttgggcaagattggtgtttacttaggggtgctttaaaaatatatttttacaagtatacttgtaggaagttggttttttattttctatttttgtttgtttttggagtttggttaaacgactcttttattttctgttttgccttatcttactaaagtgaagttttcctaaggcaagcaagaagaggagtggaagcacagttgcctggatttggaggcagagttgtcaggcttttcaagctaagagtcttgtgcttggattttccagattaatttgaaaagacctcccatttgtggctttgtacataaccaacaggcagatactgagtgccttggctcctagagttttgtggttgggttaggttgtttttgttgttgttttgttttggttttgttttcatttctgaagtttaagatgccttgactttttaaatgctcttaaggctattcgatgtaattcttactcctaaaactggctgttcttagcctgaaatctaatgctttgttttttgtacctctcccaggtgggtaacactctaggatgacatgatgttataattttaggggaaatcacatttttaccttatgctgttactgggcagaaccacgttttatgtaaacataccagacatcgggtaacagacagtactttaaatgttataaatttggtgatcagaactattaatagcataaatcgaactcaaatggaagcaaaactgatttcatgcaggtcctgaattttactttgccttaagaagtgccctccccacaatgcaggagaggcacagagtgcactgtcattgacatgttacccgactaaggatcactctgttcataagaaaaaggcctgaagtgactctgtttaataaagtcagtttaattttatctaataatgatcttaagacattcccatgtcaaaatttgaaatatggtaattcagtgataactatctcttctaaagcagccgtaaaccctccccactacccgtctttctcccagctcaccctggctttttttgctgggggtgctggatgcaagcccccagccagcacacctgggatgctcaccctgccgcacagttcagaaggcaagtcctcacctgctcgcaaagacccttcttctccaataaaagactctacttgcctgagtttcctcatcagggctgtcattcagtgatgtatggggctgccgcaaacagtcttcttccttttggcccagttctgtcccgtgaaattctcagaaggcctcgggagctgcgctgatgtattctctccttgtttgatagctcatcatcagtagataagcctacacacttcagagggtgacaggtttcttacttggagacttcactgcaccttgacttgtagatttgccttcagacagctcttggttatggttacaagtggcccccgagtcccagaatctttcccaggttgccccagaaagaccagccacctgtcacaggtgcagttgtccggcaatagggaagcaacttcatttttgttttatatttattccctcaagtgccctgaggagcatttgcaaactgggtacaataaataagctggattatacaaagatatttaataaataagctttcagtatctattggaagacatgaagcatttgagtgggtttctttatttaaaaaattattctactggagctggtgagaaataatgaagctgtacagttctccagaaattaaaacaatgtcagagtcaatgggagaatttaatttacctttaagatttcattttaatggtggcaaaattatacattcttagaagatgtaaatttggaactgttaggagattgctctgtggttttgatcttttcaaaccattttctttttgaaaaaaggcattagttgtagtcatggacattaaatgggccatatatgcttatcaatcaaaaaagtgttccttttttggaactgcccattttctggatcttccctctcaatggataggggatgaaaaccttggttgccttttatttgtttcctcttctaaaatttctcacctgaatgtagtcctgggagagtcccgatcacgtctctcctgacatgttcactgaaatcggagacaagaagttacatggatgatgggatcttatagggtcacacaaagacaatttggcagcttatcttaatttcctgcagtgagacaacacatgtggaactgggaaggacagctgttgttacgagcagtttttcctggtcatggttgtaaagctctgtaacccacattgtaaagccgtgaatgtttttagtcttgttgacgagtttttagagactgctggacctctgagggctttgagagtgcagctgtgatgatgtttcactattacttcagtgtgaatgtagaaccaaggactcatcttcattttatacctaaaagtgccttgtcaagaaatttttgcatgttttaaaagataaatatttttgtacacagagttcaaggggaaatgcactttaaaaatcccaagaatggatgttctttgtgtggtatgagaggttggtttgtatctcaaaagcaaaaatgtaataaaggaagacaaaacaaaaaaaaaa

SEQ ID NO: 370178 - DNA, 5500 bp, Homo sapiens
gacatctccgggaacccagcccaggccctgcctcccggacacaccgacgctcacgtagtcgcgcttgccacaaccctgcgggctctccgatgcggcgagcgagctggggagggggcttctccgcggcccaaaagcctgttcatctagccccatgatggctgtggacatcgagtacagatacaactgcatggctccttccttgcgccaagagaggtttgcctttaagatctcaccaaagcccagcaaaccactgaggccttgtattcagctgagcagcaagaatgaagccagtggaatggtggccccggctgtccaggagaagaaggtgaaaaagcgggtgtccttcgcagacaaccaggggctggccctgacaatggtcaaagtgttctcggaattcgatgacccgctagatatgccattcaacatcaccgagctcctagacaacattgtgagcttgacgacagcagagagcgagagctttgttctggatttttcccagccctctgcagattacttagactttagaaatcgacttcaggccgaccacgtctgccttgagaactgtgtgctcaaggacaaggccattgcaggcactgcgaaggttcagaacctcgcatttgagaagaccgtgaaaataaggatgacgttcgacacctggaagagctacacagactttccttgtcagtacgtgaaggacacttatgccggttcagacagggacacgttctccttcgacatcagtttgcccgagaagattcagtcttatgaaagaatggagtttgctgtgtactacgagtgcaatggacagacgtactgggacagcaacagaggcaagaactataggatcatccgggctgagttaaaatctacccagggaatgaccaagccccacagtggaccggatttgggaatatcctttgaccagttcggaagccctcggtgttcctatggtctgtttccagagtggccaagttacttaggatatgaaaagctagggccctactactagtgactgcaggtgacagggcgtggcggagctgccacagacaagcctagctctgctcactgtgcagtggagatggaaggccagggaggagcaacgtggaacttccatgaggccccgtttgggaaaataaaaggatcctcttcacttctttcttaaacagcaaatccagccaggttcagattacacaaccagtgtctcactcaaaggagcagtggtggctggcgcgctttcgcactgtggcagccacgagagtctgtgcacgtctgtgctggaaagggtatggatgggaatcaagcctatgccagtgctgatgaagctggaggagtctctcctctgctctccactcagatgtgggacatcagtcgccaaaagccactcagccccagccacctcgcgtgagaccctcactgttcattgtgttcatctttgggtgctctctgccagccaggcctttcctgcaagctgctgtgcttccccgtccacgtgtatctctgctgtgacacactgagctgacgcacatttccagtgcagctgcagaagagaaatgggattggctcttgttttctgcaagttcatgttttgcattttatgttcttccacaattgatctgatgttcaggaaaagataataaaggcaaattagttagtggttgagacaggcatttcctcctcccgcttcttgaccccacagatgtattccagcagagagcaacacaccagtcatcaaaacccactggctcctgtgcggtgtcacagattgcagggttctgacaaggcaggacagtcaagagtggggacactttcagcttctacttttgccttctagggggagctttctaagtccccacatttaccccgagtcaccggaaaaatctgatttttcccccgaaagctcaatgactttaacgtgcttggctggtttgtctcattctttatgaaagaattttggggccgggcgcggtggcttatgcctgtaatcccagcactttgggaggccgaggcaggtggatcacgaggtcaggagatcgagaccatcctggctaacacggtgaaaccctgtctctactaaaaatacaaaaaaattagccaggcgtggtggcgggcgcctgtagtcccagctacttgggaggctgaggcaggagaatggcgggaacctgggaggcggagcttacagtgaaccgagatcacaccactgcattcccgcctgggcagcagagcgagactccgtctcaaacagaaaaaaaaagagaattttgaatctcctttcccaaagagtcatcttttctgctgtgtttaggacatttgatttgcatatccaatatctcctcgaaaccttcagaaaatggttttatcgtgactgtgattcacactatctagaacactttaccagcacccagggacatggacttgggtgttcttatttatggtgtgtatgtaaagagataggggagaaaaacctcacccaagttcttatacgttattttaaacgtttgccaactctgaaatttcagagattcattgttcttaaccatattggactaaagtctgttggttagtgctgttgtaaaagagacctctggggccgagtgtggtggcttatgcctgtaatccctgcactttgggaagccaaggcgggcagctcacctgaggtcaggcgttcaagaccagcctggccaacatggtgaaacctcgtctgtactaaaaatacaaaatttagctgagtgtggtggcaggcgcctgtaatccagctactcgggaggctgaggcaggagaatcacttgaacccaggaggtggaggttgcagtgagccgagatcacgtcactgcatttcagcctgagcgacagagtgaaactgtctcaaaaaagagagacttccgggacagtcattatcagataggccccaaacctgtgatttttcttgggcaagattggtgtttacttaggggtgctttaaaaatatatttttacaagtatacttgtaggaagttggttttttattttctatttttgtttgtttttggagtttggttaaacgactcttttattttctgttttgccttatcttactaaagtgaagttttcctaaggcaagcaagaagaggagtggaagcacagttgcctggatttggaggcagagttgtcaggcttttcaagctaagagtcttgtgcttggattttccagattaatttgaaaagacctcccatttgtggctttgtacataaccaacaggcagatactgagtgccttggctcctagagttttgtggttgggttaggttgtttttgttgttgttttgttttggttttgttttcatttctgaagtttaagatgccttgactttttaaatgctcttaaggctattcgatgtaattcttactcctaagtgggtaacactctaggatgacatgatgttataattttaggggaaatcacatttttaccttatgctgttactgggcagaaccacgttttatgtaaacataccagacatcgggtaacagacagtactttaaatgttataaatttggtgatcagaactattaatagcataaatcgaactcaaatggaagcaaaactgatttcatgcaggtcctgaattttactttgccttaagaagtgccctccccacaatgcaggagaggcacagagtgcactgtcattgacatgttacccgactaaggatcactctgttcataagaaaaaggcctgaagtgactctgtttaataaagtcagtttaattttatctaataatgatcttaagacattcccatgtcaaaatttgaaatatggtaattcagtgataactatctcttctaaagcagccgtaaaccctccccactacccgtctttctcccagctcaccctggctttttttgctgggggtgctggatgcaagcccccagccagcacacctgggatgctcaccctgccgcacagttcagaaggcaagtcctcacctgctcgcaaagacccttcttctccaataaaagactctacttgcctgagtttcctcatcagggctgtcattcagtgatgtatgggggtctgaagaatactgccttctatctgtcttctgtttaccacttgctcctctgctaccctcctgccgcaaacagtcttcttccttttggcccagttctgtcccgtgaaattctcagaaggcctcgggagctgcgctgatgtattctctccttgtttgatagctcatcatcagtagataagcctacacacttcagagggtgacaggtttcttacttggagacttcactgcaccttgacttgtagatttgccttcagacagctcttggttatggttacaagtggcccccgagtcccagaatctttcccaggttgccccagaaagaccagccacctgtcacaggtgcagttgtccggcaatagggaagcaacttcatttttgttttatatttattccctcaagtgccctgaggagcatttgcaaactgggtacaataaataagctggattatacaaagatatttaataaataagctttcagtatctattggaagacatgaagcatttgagtgggtttctttatttaaaaaattattctactggagctggtgagaaataatgaagctgtacagttctccagaaattaaaacaatgtcagagtcaatgggagaatttaatttacctttaagatttcattttaatggtggcaaaattatacattcttagaagatgtaaatttggaactgttaggagattgctctgtggttttgatcttttcaaaccattttctttttgaaaaaaggcattagttgtagtcatggacattaaatgggccatatatgcttatcaatcaaaaaagtgttccttttttggaactgcccattttctggatcttccctctcaatggataggggatgaaaaccttggttgccttttatttgtttcctcttctaaaatttctcacctgaatgtagtcctgggagagtcccgatcacgtctctcctgacatgttcactgaaatcggagacaagaagttacatggatgatgggatcttatagggtcacacaaagacaatttggcagcttatcttaatttcctgcagtgagacaacacatgtggaactgggaaggacagctgttgttacgagcagtttttcctggtcatggttgtaaagctctgtaacccacattgtaaagccgtgaatgtttttagtcttgttgacgagtttttagagactgctggacctctgagggctttgagagtgcagctgtgatgatgtttcactattacttcagtgtgaatgtagaaccaaggactcatcttcattttatacctaaaagtgccttgtcaagaaatttttgcatgttttaaaagataaatatttttgtacacagagttcaaggggaaatgcactttaaaaatcccaagaatggatgttctttgtgtggtatgagaggttggtttgtatctcaaaagcaaaaatgtaataaaggaagacaaaacaaaaaaaaaa

SEQ ID NO: 370179 - DNA, 1205 bp, Homo sapiens
tcacctgaggtcaggagttcgagaccagcctggccaacatggcaaaaccctgtctctactaaaaatacaaaaattagccaggcgtggtggtgcatgcctgtaatcccagctacctgggtggctgaggcaggagaattgcttgaacctgggaggcagaggttgcagcgaactgagattgtgccactgcactccagcctgggcaacaagagcgagacctcatcttaaaaaaaaaaaacaaaaaaaactgatgaagcatttgagtgggtttctttatttaaaaaattattctactggagctggtgagaaataatgaagctgtacagttctccagaaattaaaacaatgtcagagtcaatgggagaatttaatttacctttaagatttcattttaatggtggcaaaattatacattcttagaagatgtaaatttggaactgttaggagattgctctgtggttttgatcttttcaaaccattttctttttgaaaaaaggcattagttgtagtcatggacattaaatgggccatatatgcttatcaatcaaaaaagtgttccttttttggaactgcccattttctggatcttccctctcaatggataggggatgaaaaccttggttgccttttatttgtttcctcttctaaaatttctcacctgaatgtagtcctgggagagtcccgatcacgtctctcctgacatgttcactgaaatcggagacaagaagttacatggatgatgggatcttatagggtcacacaaagacaatttggcagcttatcttaatttcctgcagtgagacaacacatgtggaactgggaaggacagctgttgttacgagcagtttttcctggtcatggttgtaaagctctgtaacccacattgtaaagccgtgaatgtttttagtcttgttgacgagtttttagagactgctggacctctgagggctttgagagtgcagctgtgatgatgtttcactattacttcagtgtgaatgtagaaccaaggactcatcttcattttatacctaaaagtgccttgtcaagaaatttttgcatgttttaaaagataaatatttttgtacacagagttcaaggggaaatgcactttaaaaatcccaagaatggatgttctttgtgtggtatgagaggttggtttgtatctcaaaagcaaaaatgtaataaaggaagacaaaacaaaaaaaaaa

SEQ ID NO: 370180 - DNA, 5554 bp, Homo sapiens
gacatctccgggaacccagcccaggccctgcctcccggacacaccgacgctcacgtagtcgcgcttgccacaaccctgcgggctctccgatgcggcgagcgagctggggagggggcttctccgcggcccaaaagcctgttcatctagccccatgatggctgtggacatcgagtacagatacaactgcatggctccttccttgcgccaagagaggtttgcctttaagatctcaccaaagcccagcaaaccactgaggccttgtattcagctgagcagcaagaatgaagccagtggaatggtggccccggctgtccaggagaagaaggtgaaaaagcgggtgtccttcgcagacaaccaggggctggccctgacaatggtcaaagtgttctcggaattcgatgacccgctagatatgccattcaacatcaccgagctcctagacaacattgtgagcttgacgacagcagagagcgagagctttgttctggatttttcccagccctctgcagattacttagactttagaaatcgacttcaggccgaccacgtctgccttgagaactgtgtgctcaaggacaaggccattgcaggcactgcgaaggttcagaacctcgcatttgagaagaccgtgaaaataaggatgacgttcgacacctggaagagctacacagactttccttgtcagtacgtgaaggacacttatgccggttcagacagggacacgttctccttcgacatcagtttgcccgagaagattcagtcttatgaaagaatggagtttgctgtgtactacgagtgcaatggacagacgtactgggacagcaacagaggcaagaactataggatcatccgggctgagttaaaatctacccagggaatgaccaagccccacagtggaccggatttgggaatatcctttgaccagttcggaagccctcggtgttcctatggtctgtttccagagtggccaagttacttaggatatgaaaagctagggccctactactagtgactgcaggtgacagggcgtggcggagctgccacagacaagcctagctctgctcactgtgcagtggagatggaaggccagggaggagcaacgtggaacttccatgaggccccgtttgggaaaataaaaggatcctcttcacttctttcttaaacagcaaatccagccaggttcagattacacaaccagtgtctcactcaaaggagcagtggtggctggcgcgctttcgcactgtggcagccacgagagtctgtgcacgtctgtgctggaaagggtatggatgggaatcaagcctatgccagtgctgatgaagctggaggagtctctcctctgctctccactcagatgtgggacatcagtcgccaaaagccactcagccccagccacctcgcgtgagaccctcactgttcattgtgttcatctttgggtgctctctgccagccaggcctttcctgcaagctgctgtgcttccccgtccacgtgtatctctgctgtgacacactgagctgacgcacatttccagtgcagctgcagaagagaaatgggattggctcttgttttctgcaagttcatgttttgcattttatgttcttccacaattgatctgatgttcaggaaaagataataaaggcaaattagttagtggttgagacaggcatttcctcctcccgcttcttgaccccacagatgtattccagcagagagcaacacaccagtcatcaaaacccactggctcctgtgcggtgtcacagattgcagggttctgacaaggcaggacagtcaagagtggggacactttcagcttctacttttgccttctagggggagctttctaagtccccacatttaccccgagtcaccggaaaaatctgatttttcccccgaaagctcaatgactttaacgtgcttggctggtttgtctcattctttatgaaagaattttggggccgggcgcggtggcttatgcctgtaatcccagcactttgggaggccgaggcaggtggatcacgaggtcaggagatcgagaccatcctggctaacacggtgaaaccctgtctctactaaaaatacaaaaaaattagccaggcgtggtggcgggcgcctgtagtcccagctacttgggaggctgaggcaggagaatggcgggaacctgggaggcggagcttacagtgaaccgagatcacaccactgcattcccgcctgggcagcagagcgagactccgtctcaaacagaaaaaaaaagagaattttgaatctcctttcccaaagagtcatcttttctgctgtgtttaggacatttgatttgcatatccaatatctcctcgaaaccttcagaaaatggttttatcgtgactgtgattcacactatctagaacactttaccagcacccagggacatggacttgggtgttcttatttatggtgtgtatgtaaagagataggggagaaaaacctcacccaagttcttatacgttattttaaacgtttgccaactctgaaatttcagagattcattgttcttaaccatattggactaaagtctgttggttagtgctgttgtaaaagagacctctggggccgagtgtggtggcttatgcctgtaatccctgcactttgggaagccaaggcgggcagctcacctgaggtcaggcgttcaagaccagcctggccaacatggtgaaacctcgtctgtactaaaaatacaaaatttagctgagtgtggtggcaggcgcctgtaatccagctactcgggaggctgaggcaggagaatcacttgaacccaggaggtggaggttgcagtgagccgagatcacgtcactgcatttcagcctgagcgacagagtgaaactgtctcaaaaaagagagacttccgggacagtcattatcagataggccccaaacctgtgatttttcttgggcaagattggtgtttacttaggggtgctttaaaaatatatttttacaagtatacttgtaggaagttggttttttattttctatttttgtttgtttttggagtttggttaaacgactcttttattttctgttttgccttatcttactaaagtgaagttttcctaaggcaagcaagaagaggagtggaagcacagttgcctggatttggaggcagagttgtcaggcttttcaagctaagagtcttgtgcttggattttccagattaatttgaaaagacctcccatttgtggctttgtacataaccaacaggcagatactgagtgccttggctcctagagttttgtggttgggttaggttgtttttgttgttgttttgttttggttttgttttcatttctgaagtttaagatgccttgactttttaaatgctcttaaggctattcgatgtaattcttactcctaaaactggctgttcttagcctgaaatctaatgctttgttttttgtacctctcccaggtgggtaacactctaggatgacatgatgttataattttaggggaaatcacatttttaccttatgctgttactgggcagaaccacgttttatgtaaacataccagacatcgggtaacagacagtactttaaatgttataaatttggtgatcagaactattaatagcataaatcgaactcaaatggaagcaaaactgatttcatgcaggtcctgaattttactttgccttaagaagtgccctccccacaatgcaggagaggcacagagtgcactgtcattgacatgttacccgactaaggatcactctgttcataagaaaaaggcctgaagtgactctgtttaataaagtcagtttaattttatctaataatgatcttaagacattcccatgtcaaaatttgaaatatggtaattcagtgataactatctcttctaaagcagccgtaaaccctccccactacccgtctttctcccagctcaccctggctttttttgctgggggtgctggatgcaagcccccagccagcacacctgggatgctcaccctgccgcacagttcagaaggcaagtcctcacctgctcgcaaagacccttcttctccaataaaagactctacttgcctgagtttcctcatcagggctgtcattcagtgatgtatgggggtctgaagaatactgccttctatctgtcttctgtttaccacttgctcctctgctaccctcctgccgcaaacagtcttcttccttttggcccagttctgtcccgtgaaattctcagaaggcctcgggagctgcgctgatgtattctctccttgtttgatagctcatcatcagtagataagcctacacacttcagagggtgacaggtttcttacttggagacttcactgcaccttgacttgtagatttgccttcagacagctcttggttatggttacaagtggcccccgagtcccagaatctttcccaggttgccccagaaagaccagccacctgtcacaggtgcagttgtccggcaatagggaagcaacttcatttttgttttatatttattccctcaagtgccctgaggagcatttgcaaactgggtacaataaataagctggattatacaaagatatttaataaataagctttcagtatctattggaagacatgaagcatttgagtgggtttctttatttaaaaaattattctactggagctggtgagaaataatgaagctgtacagttctccagaaattaaaacaatgtcagagtcaatgggagaatttaatttacctttaagatttcattttaatggtggcaaaattatacattcttagaagatgtaaatttggaactgttaggagattgctctgtggttttgatcttttcaaaccattttctttttgaaaaaaggcattagttgtagtcatggacattaaatgggccatatatgcttatcaatcaaaaaagtgttccttttttggaactgcccattttctggatcttccctctcaatggataggggatgaaaaccttggttgccttttatttgtttcctcttctaaaatttctcacctgaatgtagtcctgggagagtcccgatcacgtctctcctgacatgttcactgaaatcggagacaagaagttacatggatgatgggatcttatagggtcacacaaagacaatttggcagcttatcttaatttcctgcagtgagacaacacatgtggaactgggaaggacagctgttgttacgagcagtttttcctggtcatggttgtaaagctctgtaacccacattgtaaagccgtgaatgtttttagtcttgttgacgagtttttagagactgctggacctctgagggctttgagagtgcagctgtgatgatgtttcactattacttcagtgtgaatgtagaaccaaggactcatcttcattttatacctaaaagtgccttgtcaagaaatttttgcatgttttaaaagataaatatttttgtacacagagttcaaggggaaatgcactttaaaaatcccaagaatggatgttctttgtgtggtatgagaggttggtttgtatctcaaaagcaaaaatgtaataaaggaagacaaaacaaaaaaaaaa

SEQ ID NO: 370181 - DNA, 5494 bp, Homo sapiens
gacatctccgggaacccagcccaggccctgcctcccggacacaccgacgctcacgtagtcgcgcttgccacaaccctgcgggctctccgatgcggcgagcgagctggggagggggcttctccgcggcccaaaagcctgttcatctagccccatgatggctgtggacatcgagtacagatacaactgcatggctccttccttgcgccaagagaggtttgcctttaagatctcaccaaagcccagcaaaccactgaggccttgtattcagctgagcagcaagaatgaagccagtggaatggtggccccggctgtccaggagaagaaggtgaaaaagcgggtgtccttcgcagacaaccaggggctggccctgacaatggtcaaagtgttctcggaattcgatgacccgctagatatgccattcaacatcaccgagctcctagacaacattgtgagcttgacgacagcagagagcgagagctttgttctggatttttcccagccctctgcagattacttagactttagaaatcgacttcaggccgaccacgtctgccttgagaactgtgtgctcaaggacaaggccattgcaggcactgcgaaggttcagaacctcgcatttgagaagaccgtgaaaataaggatgacgttcgacacctggaagagctacacagactttccttgtcagtacgtgaaggacacttatgccggttcagacagggacacgttctccttcgacatcagtttgcccgagaagattcagtcttatgaaagaatggagtttgctgtgtactacgagtgcaatggacagacgtactgggacagcaacagaggcaagaactataggatcatccgggctgagttaaaatctacccagggaatgaccaagccccacagtggaccggatttgggaatatcctttgaccagttcggaagccctcggtgttcctatggtctgtttccagagtggccaagttacttaggatatgaaaagctagggccctactactagtgactgcaggtgacagggcgtggcggagctgccacagacaagcctagctctgctcactgtgcagtggagatggaaggccagggaggagcaacgtggaacttccatgaggccccgtttgggaaaataaaaggatcctcttcacttctttcttaaacagcaaatccagccaggttcagattacacaaccagtgtctcactcaaaggagcagtggtggctggcgcgctttcgcactgtggcagccacgagagtctgtgcacgtctgtgctggaaagggtatggatgggaatcaagcctatgccagtgctgatgaagctggaggagtctctcctctgctctccactcagatgtgggacatcagtcgccaaaagccactcagccccagccacctcgcgtgagaccctcactgttcattgtgttcatctttgggtgctctctgccagccaggcctttcctgcaagctgctgtgcttccccgtccacgtgtatctctgctgtgacacactgagctgacgcacatttccagtgcagctgcagaagagaaatgggattggctcttgttttctgcaagttcatgttttgcattttatgttcttccacaattgatctgatgttcaggaaaagataataaaggcaaattagttagtggttgagacaggcatttcctcctcccgcttcttgaccccacagatgtattccagcagagagcaacacaccagtcatcaaaacccactggctcctgtgcggtgtcacagattgcagggttctgacaaggcaggacagtcaagagtggggacactttcagcttctacttttgccttctagggggagctttctaagtccccacatttaccccgagtcaccggaaaaatctgatttttcccccgaaagctcaatgactttaacgtgcttggctggtttgtctcattctttatgaaagaattttggggccgggcgcggtggcttatgcctgtaatcccagcactttgggaggccgaggcaggtggatcacgaggtcaggagatcgagaccatcctggctaacacggtgaaaccctgtctctactaaaaatacaaaaaaattagccaggcgtggtggcgggcgcctgtagtcccagctacttgggaggctgaggcaggagaatggcgggaacctgggaggcggagcttacagtgaaccgagatcacaccactgcattcccgcctgggcagcagagcgagactccgtctcaaacagaaaaaaaaagagaattttgaatctcctttcccaaagagtcatcttttctgctgtgtttaggacatttgatttgcatatccaatatctcctcgaaaccttcagaaaatggttttatcgtgactgtgattcacactatctagaacactttaccagcacccagggacatggacttgggtgttcttatttatggtgtgtatgtaaagagataggggagaaaaacctcacccaagttcttatacgttattttaaacgtttgccaactctgaaatttcagagattcattgttcttaaccatattggactaaagtctgttggttagtgctgttgtaaaagagacctctggggccgagtgtggtggcttatgcctgtaatccctgcactttgggaagccaaggcgggcagctcacctgaggtcaggcgttcaagaccagcctggccaacatggtgaaacctcgtctgtactaaaaatacaaaatttagctgagtgtggtggcaggcgcctgtaatccagctactcgggaggctgaggcaggagaatcacttgaacccaggaggtggaggttgcagtgagccgagatcacgtcactgcatttcagcctgagcgacagagtgaaactgtctcaaaaaagagagacttccgggacagtcattatcagataggccccaaacctgtgatttttcttgggcaagattggtgtttacttaggggtgctttaaaaatatatttttacaagtatacttgtaggaagttggttttttattttctatttttgtttgtttttggagtttggttaaacgactcttttattttctgttttgccttatcttactaaagtgaagttttcctaaggcaagcaagaagaggagtggaagcacagttgcctggatttggaggcagagttgtcaggcttttcaagctaagagtcttgtgcttggattttccagattaatttgaaaagacctcccatttgtggctttgtacataaccaacaggcagatactgagtgccttggctcctagagttttgtggttgggttaggttgtttttgttgttgttttgttttggttttgttttcatttctgaagtttaagatgccttgactttttaaatgctcttaaggctattcgatgtaattcttactcctaaaactggctgttcttagcctgaaatctaatgctttgttttttgtacctctcccaggtgggtaacactctaggatgacatgatgttataattttaggggaaatcacatttttaccttatgctgttactgggcagaaccacgttttatgtaaacataccagacatcgggtaacagacagtactttaaatgttataaatttggtgatcagaactattaatagcataaatcgaactcaaatggaagcaaaactgatttcatgcaggtcctgaattttactttgccttaagaagtgccctccccacaatgcaggagaggcacagagtgcactgtcattgacatgttacccgactaaggatcactctgttcataagaaaaaggcctgaagtgactctgtttaataaagtcagtttaattttatctaataatgatcttaagacattcccatgtcaaaatttgaaatatggtaattcagtgataactatctcttctaaagcagccgtaaaccctccccactacccgtctttctcccagctcaccctggctttttttgctgggggtgctggatgcaagcccccagccagcacacctgggatgctcaccctgccgcacagttcagaaggcaagtcctcacctgctcgcaaagacccttcttctccagtctgaagaatactgccttctatctgtcttctgtttaccacttgctcctctgctaccctcctgccgcaaacagtcttcttccttttggcccagttctgtcccgtgaaattctcagaaggcctcgggagctgcgctgatgtattctctccttgtttgatagctcatcatcagtagataagcctacacacttcagagggtgacaggtttcttacttggagacttcactgcaccttgacttgtagatttgccttcagacagctcttggttatggttacaagtggcccccgagtcccagaatctttcccaggttgccccagaaagaccagccacctgtcacaggtgcagttgtccggcaatagggaagcaacttcatttttgttttatatttattccctcaagtgccctgaggagcatttgcaaactgggtacaataaataagctggattatacaaagatatttaataaataagctttcagtatctattggaagacatgaagcatttgagtgggtttctttatttaaaaaattattctactggagctggtgagaaataatgaagctgtacagttctccagaaattaaaacaatgtcagagtcaatgggagaatttaatttacctttaagatttcattttaatggtggcaaaattatacattcttagaagatgtaaatttggaactgttaggagattgctctgtggttttgatcttttcaaaccattttctttttgaaaaaaggcattagttgtagtcatggacattaaatgggccatatatgcttatcaatcaaaaaagtgttccttttttggaactgcccattttctggatcttccctctcaatggataggggatgaaaaccttggttgccttttatttgtttcctcttctaaaatttctcacctgaatgtagtcctgggagagtcccgatcacgtctctcctgacatgttcactgaaatcggagacaagaagttacatggatgatgggatcttatagggtcacacaaagacaatttggcagcttatcttaatttcctgcagtgagacaacacatgtggaactgggaaggacagctgttgttacgagcagtttttcctggtcatggttgtaaagctctgtaacccacattgtaaagccgtgaatgtttttagtcttgttgacgagtttttagagactgctggacctctgagggctttgagagtgcagctgtgatgatgtttcactattacttcagtgtgaatgtagaaccaaggactcatcttcattttatacctaaaagtgccttgtcaagaaatttttgcatgttttaaaagataaatatttttgtacacagagttcaaggggaaatgcactttaaaaatcccaagaatggatgttctttgtgtggtatgagaggttggtttgtatctcaaaagcaaaaatgtaataaaggaagacaaaacaaaaaaaaaa

SEQ ID NO: 370182 - DNA, 5078 bp, Homo sapiens
gacatctccgggaacccagcccaggccctgcctcccggacacaccgacgctcacgtagtcgcgcttgccacaaccctgcgggctctccgatgcggcgagcgagctggggagggggcttctccgcggcccaaaagcctgttcatctagccccatgatggctgtggacatcgagtacagatacaactgcatggctccttccttgcgccaagagaggtttgcctttaagatctcaccaaagcccagcaaaccactgaggccttgtattcagctgagcagcaagaatgaagccagtggaatggtggccccggctgtccaggagaagaaggtgaaaaagcgggtgtccttcgcagacaaccaggggctggccctgacaatggtcaaagtgttctcggaattcgatgacccgctagatatgccattcaacatcaccgagctcctagacaacattgtgagcttgacgacagcagagagcgagagctttgttctggatttttcccagccctctgcagattacttagactttagaaatcgacttcaggccgaccacgtctgccttgagaactgtgtgctcaaggacaaggccattgcaggcactgcgaaggttcagaacctcgcatttgagaagaccgtgaaaataaggatgacgttcgacacctggaagagctacacagactttccttgtcagtacgtgaaggacacttatgccggttcagacagggacacgttctccttcgacatcagtttgcccgagaagattcagtcttatgaaagaatggagtttgctgtgtactacgagtgcaatggacagacgtactgggacagcaacagaggcaagaactataggatcatccgggctgagttaaaatctacccagggaatgaccaagccccacagtggaccggatttgggaatatcctttgaccagttcggaagccctcggtgttcctatggtctgtttccagagtggccaagttacttaggatatgaaaagctagggccctactactagtgactgcaggtgacagggcgtggcggagctgccacagacaagcctagctctgctcactgtgcagtggagatggaaggccagggaggagcaacgtggaacttccatgaggccccgtttgggaaaataaaaggatcctcttcacttctttcttaaacagcaaatccagccaggttcagattacacaaccagtgtctcactcaaaggagcagtggtggctggcgcgctttcgcactgtggcagccacgagagtctgtgcacgtctgtgctggaaagggtatggatgggaatcaagcctatgccagtgctgatgaagctggaggagtctctcctctgctctccactcagatgtgggacatcagtcgccaaaagccactcagccccagccacctcgcgtgagaccctcactgttcattgtgttcatctttgggtgctctctgccagccaggcctttcctgcaagctgctgtgcttccccgtccacgtgtatctctgctgtgacacactgagctgacgcacatttccagtgcagctgcagaagagaaatgggattggctcttgttttctgcaagttcatgttttgcattttatgttcttccacaattgatctgatgttcaggaaaagataataaaggcaaattagttagtggttgagacaggcatttcctcctcccgcttcttgaccccacagatgtattccagcagagagcaacacaccagtcatcaaaacccactggctcctgtgcggtgtcacagattgcagggttctgacaaggcaggacagtcaagagtggggacactttcagcttctacttttgccttctagggggagctttctaagtccccacatttaccccgagtcaccggaaaaatctgatttttcccccgaaagctcaatgactttaacgtgcttggctggtttgtctcattctttatgaaagaattttggggccgggcgcggtggcttatgcctgtaatcccagcactttgggaggccgaggcaggtggatcacgaggtcaggagatcgagaccatcctggctaacacggtgaaaccctgtctctactaaaaatacaaaaaaattagccaggcgtggtggcgggcgcctgtagtcccagctacttgggaggctgaggcaggagaatggcgggaacctgggaggcggagcttacagtgaaccgagatcacaccactgcattcccgcctgggcagcagagcgagactccgtctcaaacagaaaaaaaaagagaattttgaatctcctttcccaaagagtcatcttttctgctgtgtttaggacatttgatttgcatatccaatatctcctcgaaaccttcagaaaatggttttatcgtgactgtgattcacactatctagaacactttaccagcacccagggacatggacttgggtgttcttatttatggtgtgtatgtaaagagataggggagaaaaacctcacccaagttcttatacgttattttaaacgtttgccaactctgaaatttcagagattcattgttcttaaccatattggactaaagtctgttggttagtgctgttgtaaaagagacctctggggccgagtgtggtggcttatgcctgtaatccctgcactttgggaagccaaggcgggcagctcacctgaggtcaggcgttcaagaccagcctggccaacatggtgaaacctcgtctgtactaaaaatacaaaatttagctgagtgtggtggcaggcgcctgtaatccagctactcgggaggctgaggcaggagaatcacttgaacccaggaggtggaggttgcagtgagccgagatcacgtcactgcatttcagcctgagcgacagagtgaaactgtctcaaaaaagagagacttccgggacagtcattatcagataggccccaaacctgtgatttttcttgggcaagattggtgtttacttaggggtgctttaaaaatatatttttacaagtatacttgtaggaagttggttttttattttctatttttgtttgtttttggagtttggttaaacgactcttttattttctgttttgccttatcttactaaagtgaagttttcctaaggcaagcaagaagaggagtggaagcacagttgcctggatttggaggcagagttgtcaggcttttcaagctaagagtcttgtgcttggattttccagattaatttgaaaagacctcccatttgtggctttgtacataaccaacaggcagatactgagtgccttggctcctagagttttgtggttgggttaggttgtttttgttgttgttttgttttggttttgttttcatttctgaagtttaagatgccttgactttttaaatgctcttaaggctattcgatgtaattcttactcctaaaactggctgttcttagcctgaaatctaatgctttgttttttgtacctctcccaggtgggtaacactctaggatgacatgatgttataattttaggggaaatcacatttttaccttatgctgttactgggcagaaccacgttttatgtaaacataccagacatcgggtaacagacagtactttaaatgttataaatttggtgatcagaactattaatagcataaatcgaactcaaatggaagcaaaactgatttcatgcaggtcctgaattttactttgccttaagaagtgccctccccacaatgcaggagaggcacagagtgcactgtcattgacatgttacccgactaaggatcactctgttcataagaaaaaggcctgaagtgactctgtttaataaagtcagtttaattttatctaataatgatcttaagacattcccatgtcaaaatttgaaatatggtaattcagtgataactatctcttctaaagcagccgtaaaccctccccactacccgtctttctcccagctcaccctggctttttttgctgggggtgctggatgcaagcccccagccagcacacctgggatgctcaccctgccgcacagttcagaaggcaagtcctcacctgctcgcaaagacccttcttctccaataaaagactctacttgcctgagtttcctcatcagggctgtcattcagtgatgtatgggggtctgaagaatactgccttctatctgtcttctgtttaccacttgctcctctgctaccctcctgccgcaaacagtcttcttccttttggcccagttctgtcccgtgaaattctcagaaggcctcgggagctgcgctgatgtattctctccttgtttgatagctcatcatcagtagataagcctacacacttcagagggtgacaggtttcttacttggagacttcactgcaccttgacttgtagatttgccttcagacagctcttggttatggttacaagtggcccccgagtcccagaatctttcccaggttgccccagaaagaccagccacctgtcacaggtgcagttgtccggcaatagggaagcaacttcatttttgttttatatttattccctcaagtgccctgaggagcatttgcaaactgggtacaataaataagctggattatacaaagatatttaataaataagctttcagtatctattggaagacatgaagcatttgagtgggtttctttatttaaaaaattattctactggagctggtgagaaataatgaagctgtacagttctccagaaattaaaacaatgtcagagtcaatgggagaatttaatttacctttaagatttcattttaatggtggcaaaattatacattcttagaagatgtaaatttggaactgttaggagattgctctgtggttttgatcttttcaaaccattttctttttgaaaaaaggcattagttgtagtcatggacattaaatgggccatatatgcttatcaatcaaaaaagtgttccttttttggaactgcccattttctggatcttccctctcaatggataggggatgaaaaccttggttgccttttatttgtttcctcttctacatgaatccgaaacatgaagtccatgatgaaggaacttataggtcacccaagccaatgggccgttacttaattccttgagggaaa

SEQ ID NO: 370183 - DNA, 2870 bp, Homo sapiens
caggactctacgctcttgcagcagctcctctgcccaatggggggcggcagcatctcagtaactcactcgaaagacgggtaggcgggaggagacattcgcgttcaaaatctttttgcctctatccgctcgccgtagcgctttagcccgctcgagtttcaatgcgcgttgttgcttaacgaagcagagtcctacacactgtctgctgctctcctgatcatggcttctccgagttctttcacctactattgccctccatcttcctcccccgtctggtcagagccgctgtacagtctgaggcccgagcacgcgcgagagcggttgcaggacgactcggtggaaacagtcacgtccatagaacaggcaaaagtagaagaaaagatccaagaggtcttcagttcttacaagttcaaccaccttgtaccaaggcttgttttgcagagggagaagcacttccattatctgaaaagaggccttcgacaactgacagatgcctatgagtgtctggatgccagccgcccatggctctgctattggatcctgcacagcttggaactgctagatgaacccatcccccagatagtggctacagatgtgtgtcagttcctggagctgtgtcagagcccagaaggtggctttggaggaggacccggtcagtatccacaccttgcacccacatatgcagcagtcaatgcattgtgcatcattggcaccgaggaggcctatgacatcattaacagagagaagcttcttcagtatttgtactccctgaagcaacctgacggctcctttctcatgcatgtcggaggtgaggtggatgtgagaagcgcatactgtgctgcctccgtagcctcgctgaccaacatcatcactccagacctctttgagggcactgctgaatggatagcaaggtgtcagaactgggaaggtggcattggcggggtaccagggatggaagcccatggtggctataccttctgtggcctggccgcgctggtaatcctcaagagggaacgttccttgaacttgaagagcttattacaatgggtgacaagccggcagatgcgatttgaaggaggatttcagggccgctgcaacaagctggtggatggctgctactccttctggcaggcggggctcctgcccctgctccaccgcgcactgcacgcccaaggtgaccctgcccttagcatgagccactggatgttccatcagcaggccctgcaggagtacatcctgatgtgctgccagtgccctgcgggggggcttctggataaacctggcaagtcgcgtgatttctaccacacctgctactgcctgagcggcctgtccatagcccagcacttcggcagcggagccatgttgcatgatgtggtcctgggtgtgcccgaaaacgctctgcagcccactcacccagtgtacaacattggaccagacaaggtgatccaggccactacatactttctacagaagccagtcccaggttttgaggagcttaaggatgagacatcggcagagcctgcaaccgactagaggacctgggtcccggcagctctttgctcacccatctccccagtcagacaaggtttatacgtttcaatacatactgcattctgtgctacacaagccttagcctcagtggagctgtggttctcttggtactttcttgtcaaacaaaaccaatggctctgggtttggagaacacagtggctggttttaaaaattctttccacacctgtcaaaccaaaaatctatcagcccacgtggtgtggttggtgaacagtgcatgccaggaggaagcagtccctcctcaccagctctccagccaggacgatcacacagagatgaatggcatctgagtattacggcatccagagccactgctgactcccacttgcacgccaccattcagtcaccagactgggtgccctccgatgggtggaataagtctgcttcatgccaaggctgggctttgggtcccaccaagatgagttctctgtaagactgtggtggagttgcaccaggaggtgcctctgcctctcgacttgcaccctggtcatttgtaagggaaaagagctggaggtggggagagaaagatctccttcagttgggagtccttccacttcaacactggagaactgagccttgcatctctccagggtccaaggccacgcttggtgcacaggcaagacttgcttcagccccaggtgtggtgacttagacctaggaaaccaattatgagtggaaagtgaccctctagttcaactgtgccagaggaaacagccctccagtgcccacctgcctcactcctccctatcatgtaccgtgaaaaccccctctgatggcctcaaggcagtgcctgcaggccgaggcccttctgggggtttctatctttcttccaccagactccaagcccactctcctccaagactgtgttgtcttttctcaccaagagtattaacactactaagtctttcaccttaacttatgactcaggatttattcacgtcctgcccactctaggctcacaggaataaaatcaagtgctagacacactggctgctactaaggcactagcctctgtagctggtggtggcagcgtggggtgccgcccagcgtgctgggtcctggcagtgcctctgctgtgctgcacattgagccctttctcagtcagtggagtatcaagttgggccatctgtctactgacctggccttcatgtaagcagctgtgggctgcgggcagacaggagctcagagatgcagcatgaggcgcttagaaaaacctggccatttgctgcctctaattcccttttgctttgccatattgggctatgtattacctccttgaaataataaaagaataacattttcta

SEQ ID NO: 370184 - DNA, 1150 bp, Homo sapiens
agttatcaccctataatcgtatctgctttcatcttgttgtgattatgtgtgctggtgtccaaattcaggatatctggaagctccttgtagagcttttgaactttgagcttctatgctttaataatataggaagtcactgaaacagtctatagttttttatataataaacatagcgttttcttttcagactctaattttagccacaggttatcatttaccttataataatagtcttttatttgttataggatatgaaatatatgtacattttgtacagatgtgtaatgcagtttcctaaagtttaataaatatgcttttttaaataatagctttgttgagatataattcccataccacacaacttacctattcagttgcgaaccatcatgacaattttagaacattttcatcactcatccccccaaaaatccccatacacattaaatattttcttaaaaaggaaatcgtgaaggaaaaatcaatagtatgattacaatattaagtataaaacatatatatgttttacattaattaaattttaaaaattttaaaaagttttaaactcacataaccaaaacagaggagcaaaaaggagaaaatagatgcagcatatgatgtagacaaggggcaagtataagaaaaagctagattaataaaattggctattggatctcagaagattaggccaaacagacaccatcataaggaaatgcaaatattaaacacaagttatggaaaaatttcaccctaattagtaatcagaggcatgcaaatcaaaataaactatcaggtactatttctttttaccattttaattgctgataacttttaaaaagtaactaaagctggccgggcgtggtggctcacgcctgtaatcctagcactttgggaagctgaggcaggacaatcgcccgaacccgggaggcggaggttgcagtgagccgagatcgtgccattgccctccaacctgggcaacagagtgagactctgtctcaaaaaagaaaaaaaaaaaggaaatattcaacagtttaatattttgcttcaatctctttatagactgtatcataaacttttcatttttatttttagaaatcttttcccccgtttttcttttttgctattttctccaaaatgggaaaggttattgata

SEQ ID NO: 370185 - DNA, 506 bp, Homo sapiens
caggactctacgctcttgcagcagctcctctgcccaatggggggcggcagcatctcagtaactcactcgaaagacgggtaggcgggaggagacattcgcgttcaaaatctttttgcctctatccgctcgccgtagcgctttagcccgctcgagtttcaatgcgcgttgttgcttaacgaagcagagtcctacacactgtctgctgctctcctgatcatggcttctccgagttctttcacctactattgccctccatcttcctcccccgtctggtcagagccgctgtacagtctgaggcccgagcacgcgcgagagcggttgcaggacgactcggtggaaacagtcacgtccatagaacagaaaatgtgccagaggaacttcaagaaccattttacacagatcagtatgaccaggaacacatcaaaccacctgttgttaatttgcttctatcggctgaactatactgtcgtgctgggagtctcattctcaagagtgatgctgcaaaa

SEQ ID NO: 370186 - DNA, 2863 bp, Homo sapiens
caggactctacgctcttgcagcagctcctctgcccaatggggggcggcagcatctcagtaactcactcgaaagacgggtaggcgggaggagacattcgcgttcaaaatctttttgcctctatccgctcgccgtagcgctttagcccgctcgagtttcaatgcgcgttgttgcttaacgaagcagagtcctacacactgtctgctgctctcctgatcatggcttctccgagttctttcacctactattgccctccatcttcctcccccgtctggtcagagccgctgtacagtctgaggcccgagcacgcgcgagagcggttgcaggacgactcggtggaaacagtcacgtccatagaacaggcaaaagtagaagaaaagatccaagaggtcttcagttcttacaagttcaaccaccttgtaccaaggcttgttttgcagagggagaagcacttccattatctgaaaagaggccttcgacaactgacagatgcctatgagtgtctggatgccagccgcccatggctctgctattggatcctgcacagcttggaactgctagatgaacccatcccccagatagtggctacagatgtgtgtcagttcctggagctgtgtcagagcccagaaggtggctttggaggaggacccggtcagtatccacaccttgcacccacatatgcagcagtcaatgcattgtgcatcattggcaccgaggaggcctatgacatcattaacagagagaagcttcttcagtatttgtactccctgaagcaacctgacggctcctttctcatgcatgtcggaggtgaggtggatgtgagaagcgcatactgtgctgcctccgtagcctcgctgaccaacatcatcactccagacctctttgagggcactgctgaatggatagcaaggtgtcagaactgggaaggtggcattggcggggtaccagggatggaagcccatggtggctataccttctgtggcctggccgcgctggtaatcctcaagagggaacgttccttgaacttgaagagcttattacaatgggtgacaagccggcagatgcgatttgaaggaggatttcagggccgctgcaacaagctggtggatggctgctactccttctggcaggcggggctcctgcccctgctccaccgcgcactgcacgcccaaggtgaccctgcccttagcatgagccactggatgttccatcagcaggccctgcaggagtacatcctgatgtgctgccagtgccctgcgggggggcttctggataaacctggcaagtcgcgtgatttctaccacacctgctactgcctgagcggcctgtccatagcccagcacttcggcagcggagccatgttgcatgatgtggtcctgggtgtgcccgaaaacgctctgcagcccactcacccagtgtacaacattggaccagacaaggtgatccaggccactacatactttctacagaagccagtcccaggttttgaggagcttaaggatgagacatcggcagagcctgcaaccgactagaggacctgggtcccggcagctctttgctcacccatctccccagtcagacaaggtttatacgtttcaatacatactgcattctgtgctacacaagccttagcctcagtggagctgtggttctcttggtactttcttgtcaaacaaaaccaatggctctgggtttggagaacacagtggctggttttaaaaattctttccacacctgtcaaaccaaaaatctatcagcccacgtggtgtggttggtgaacagtgcatgccaggaggaagcagtccctcctcaccagctctccagccaggacgatcacacagagatgaatggcatctgagtattacggcatccagagccactgctgactcccacttgcacgccaccattcagtcaccagactgggtgccctccgatgggtggaataagtctgcttcatgccaaggctgggctttgggtcccaccaagatgagttctctgtaagactgtggtggagttgcaccaggaggtgcctctgcctctcgacttgcaccctggtcatttgtaagggaaaagagctggaggtggggagagaaagatctccttcagttgggagtccttccacttcaacactggagaactgagccttgcatctctccagggtccaaggccacgcttggtgcacaggcaagacttgcttcagccccaggtgtggtgacttagacctaggaaaccaattatgagtggaaagtgaccctctagttcaactgtgccagaggaaacagccctccagtgcccacctgcctcactcctccctatcatgtaccgtgaaaaccccctctgatggcctcaaggcagtgcctgcaggccgaggcccttctgggggtttctatctttcttccaccagactccaagcccactctcctccaagactgtgttgtcttttctcaccaagagtattaacactactaagtctttcaccttaacttatgactcaggatttattcacgtcctgcccactctaggctcacaggaataaaatcaagtgctagacacactggctgctactaaggcactagcctctgtagctggtggtggcagcgtggggtgccgcccagcgtgctgggtcctggcagtgcctctgctgtgctgcacattgagccctttctcagtcagtggagtatcaagttgggccatctgtctactgacctggccttcatgtaagcagctgtgggctgcgggcagacaggagctcagagatgcagcatgaggcgcttagaaaaacctggccatttgctgcctctaattcccttttgctttgccatattgggctatgtattatttcaaggaggtaatacgtccacccgg

SEQ ID NO: 370187 - DNA, 2861 bp, Homo sapiens
cgcggtgcctttcggctctgggaagctccgggcgcccaggcttgggcttcgtcgtggagcgtttgcgcggccagcttggggaagggtcgtttcaaggttgggcttggaggagagggcagtagccgagtcccctctgccctaaagaacgagaagaatcgtgttctatgcctggaggacagaggcagcccgtgcgggtcggacagcccactctgttctgccagtacttcgggaggttctggggtgcatagtgcacttttcccaacctgccctcagcttctggaggcagagagcagggccaggctgctgtcatgccgtttcacgatctgtttaatttttgacctacagtgccaggcaaaagtagaagaaaagatccaagaggtcttcagttcttacaagttcaaccaccttgtaccaaggcttgttttgcagagggagaagcacttccattatctgaaaagaggccttcgacaactgacagatgcctatgagtgtctggatgccagccgcccatggctctgctattggatcctgcacagcttggaactgctagatgaacccatcccccagatagtggctacagatgtgtgtcagttcctggagctgtgtcagagcccagaaggtggctttggaggaggacccggtcagtatccacaccttgcacccacatatgcagcagtcaatgcattgtgcatcattggcaccgaggaggcctatgacatcattaacagagagaagcttcttcagtatttgtactccctgaagcaacctgacggctcctttctcatgcatgtcggaggtgaggtggatgtgagaagcgcatactgtgctgcctccgtagcctcgctgaccaacatcatcactccagacctctttgagggcactgctgaatggatagcaaggtgtcagaactgggaaggtggcattggcggggtaccagggatggaagcccatggtggctataccttctgtggcctggccgcgctggtaatcctcaagagggaacgttccttgaacttgaagagcttattacaatgggtgacaagccggcagatgcgatttgaaggaggatttcagggccgctgcaacaagctggtggatggctgctactccttctggcaggcggggctcctgcccctgctccaccgcgcactgcacgcccaaggtgaccctgcccttagcatgagccactggatgttccatcagcaggccctgcaggagtacatcctgatgtgctgccagtgccctgcgggggggcttctggataaacctggcaagtcgcgtgatttctaccacacctgctactgcctgagcggcctgtccatagcccagcacttcggcagcggagccatgttgcatgatgtggtcctgggtgtgcccgaaaacgctctgcagcccactcacccagtgtacaacattggaccagacaaggtgatccaggccactacatactttctacagaagccagtcccaggttttgaggagcttaaggatgagacatcggcagagcctgcaaccgactagaggacctgggtcccggcagctctttgctcacccatctccccagtcagacaaggtttatacgtttcaatacatactgcattctgtgctacacaagccttagcctcagtggagctgtggttctcttggtactttcttgtcaaacaaaaccaatggctctgggtttggagaacacagtggctggttttaaaaattctttccacacctgtcaaaccaaaaatctatcagcccacgtggtgtggttggtgaacagtgcatgccaggaggaagcagtccctcctcaccagctctccagccaggacgatcacacagagatgaatggcatctgagtattacggcatccagagccactgctgactcccacttgcacgccaccattcagtcaccagactgggtgccctccgatgggtggaataagtctgcttcatgccaaggctgggctttgggtcccaccaagatgagttctctgtaagactgtggtggagttgcaccaggaggtgcctctgcctctcgacttgcaccctggtcatttgtaagggaaaagagctggaggtggggagagaaagatctccttcagttgggagtccttccacttcaacactggagaactgagccttgcatctctccagggtccaaggccacgcttggtgcacaggcaagacttgcttcagccccaggtgtggtgacttagacctaggaaaccaattatgagtggaaagtgaccctctagttcaactgtgccagaggaaacagccctccagtgcccacctgcctcactcctccctatcatgtaccgtgaaaaccccctctgatggcctcaaggcagtgcctgcaggccgaggcccttctgggggtttctatctttcttccaccagactccaagcccactctcctccaagactgtgttgtcttttctcaccaagagtattaacactactaagtctttcaccttaacttatgactcaggatttattcacgtcctgcccactctaggctcacaggaataaaatcaagtgctagacacactggctgctactaaggcactagcctctgtagctggtggtggcagcgtggggtgccgcccagcgtgctgggtcctggcagtgcctctgctgtgctgcacattgagccctttctcagtcagtggagtatcaagttgggccatctgtctactgacctggccttcatgtaagcagctgtgggctgcgggcagacaggagctcagagatgcagcatgaggcgcttagaaaaacctggccatttgctgcctctaattcccttttgctttgccatattgggctatgtattacctccttgaaataataaaagaataacattttcta

SEQ ID NO: 370188 - DNA, 2831 bp, Homo sapiens
caggactctacgctcttgcagcagctcctctgcccaatggggggcggcagcatctcagtaactcactcgaaagacgggtaggcgggaggagacattcgcgttcaaaatctttttgcctctatccgctcgccgtagcgctttagcccgctcgagtttcaatgcgcgttgttgcttaacgaagcagagtcctacacactgtctgctgctctcctgatcatggcttctccgagttctttcacctactattgccctccatcttcctcccccgtctggtcagagccgctgtacagtctgaggcccgagcacgcgcgagagcggttgcaggacgactcggtggaaacagtcacgtccatagaacaggcaaaagtagaagaaaagatccaagaggtcttcagttcttacaagttcaaccaccttgtaccaaggcttgttttgcagagggagaagcacttccattattgtctggatgccagccgcccatggctctgctattggatcctgcacagcttggaactgctagatgaacccatcccccagatagtggctacagatgtgtgtcagttcctggagctgtgtcagagcccagaaggtggctttggaggaggacccggtcagtatccacaccttgcacccacatatgcagcagtcaatgcattgtgcatcattggcaccgaggaggcctatgacatcattaacagagagaagcttcttcagtatttgtactccctgaagcaacctgacggctcctttctcatgcatgtcggaggtgaggtggatgtgagaagcgcatactgtgctgcctccgtagcctcgctgaccaacatcatcactccagacctctttgagggcactgctgaatggatagcaaggtgtcagaactgggaaggtggcattggcggggtaccagggatggaagcccatggtggctataccttctgtggcctggccgcgctggtaatcctcaagagggaacgttccttgaacttgaagagcttattacaatgggtgacaagccggcagatgcgatttgaaggaggatttcagggccgctgcaacaagctggtggatggctgctactccttctggcaggcggggctcctgcccctgctccaccgcgcactgcacgcccaaggtgaccctgcccttagcatgagccactggatgttccatcagcaggccctgcaggagtacatcctgatgtgctgccagtgccctgcgggggggcttctggataaacctggcaagtcgcgtgatttctaccacacctgctactgcctgagcggcctgtccatagcccagcacttcggcagcggagccatgttgcatgatgtggtcctgggtgtgcccgaaaacgctctgcagcccactcacccagtgtacaacattggaccagacaaggtgatccaggccactacatactttctacagaagccagtcccaggttttgaggagcttaaggatgagacatcggcagagcctgcaaccgactagaggacctgggtcccggcagctctttgctcacccatctccccagtcagacaaggtttatacgtttcaatacatactgcattctgtgctacacaagccttagcctcagtggagctgtggttctcttggtactttcttgtcaaacaaaaccaatggctctgggtttggagaacacagtggctggttttaaaaattctttccacacctgtcaaaccaaaaatctatcagcccacgtggtgtggttggtgaacagtgcatgccaggaggaagcagtccctcctcaccagctctccagccaggacgatcacacagagatgaatggcatctgagtattacggcatccagagccactgctgactcccacttgcacgccaccattcagtcaccagactgggtgccctccgatgggtggaataagtctgcttcatgccaaggctgggctttgggtcccaccaagatgagttctctgtaagactgtggtggagttgcaccaggaggtgcctctgcctctcgacttgcaccctggtcatttgtaagggaaaagagctggaggtggggagagaaagatctccttcagttgggagtccttccacttcaacactggagaactgagccttgcatctctccagggtccaaggccacgcttggtgcacaggcaagacttgcttcagccccaggtgtggtgacttagacctaggaaaccaattatgagtggaaagtgaccctctagttcaactgtgccagaggaaacagccctccagtgcccacctgcctcactcctccctatcatgtaccgtgaaaaccccctctgatggcctcaaggcagtgcctgcaggccgaggcccttctgggggtttctatctttcttccaccagactccaagcccactctcctccaagactgtgttgtcttttctcaccaagagtattaacactactaagtctttcaccttaacttatgactcaggatttattcacgtcctgcccactctaggctcacaggaataaaatcaagtgctagacacactggctgctactaaggcactagcctctgtagctggtggtggcagcgtggggtgccgcccagcgtgctgggtcctggcagtgcctctgctgtgctgcacattgagccctttctcagtcagtggagtatcaagttgggccatctgtctactgacctggccttcatgtaagcagctgtgggctgcgggcagacaggagctcagagatgcagcatgaggcgcttagaaaaacctggccatttgctgcctctaattcccttttgctttgccatattgggctatgtattacctccttgaaataataaaagaataacattttcta

SEQ ID NO: 370189 - DNA, 2346 bp, Homo sapiens
tgggaatttggtgttttgacatgaatgctctctgactttgtttttgccctttggctgtgtacctagtgtgtgtcagttcctggagctgtgtcagagcccagaaggtggctttggaggaggacccggtcagtatccacaccttgcacccacatatgcagcagtcaatgcattgtgcatcattggcaccgaggaggcctatgacatcattaacagagagaagcttcttcagtatttgtactccctgaagcaacctgacggctcctttctcatgcatgtcggaggtgaggtggatgtgagaagcgcatactgtgctgcctccgtagcctcgctgaccaacatcatcactccagacctctttgagggcactgctgaatggatagcaaggtgtcagaactgggaaggtggcattggcggggtaccagggatggaagcccatggtggctataccttctgtggcctggccgcgctggtaatcctcaagagggaacgttccttgaacttgaagagcttattacaatgggtgacaagccggcagatgcgatttgaaggaggatttcagggccgctgcaacaagctggtggatggctgctactccttctggcaggcggggctcctgcccctgctccaccgcgcactgcacgcccaaggtgaccctgcccttagcatgagccactggatgttccatcagcaggccctgcaggagtacatcctgatgtgctgccagtgccctgcgggggggcttctggataaacctggcaagtcgcgtgatttctaccacacctgctactgcctgagcggcctgtccatagcccagcacttcggcagcggagccatgttgcatgatgtggtcctgggtgtgcccgaaaacgctctgcagcccactcacccagtgtacaacattggaccagacaaggtgatccaggccactacatactttctacagaagccagtcccaggttttgaggagcttaaggatgagacatcggcagagcctgcaaccgactagaggacctgggtcccggcagctctttgctcacccatctccccagtcagacaaggtttatacgtttcaatacatactgcattctgtgctacacaagccttagcctcagtggagctgtggttctcttggtactttcttgtcaaacaaaaccaatggctctgggtttggagaacacagtggctggttttaaaaattctttccacacctgtcaaaccaaaaatctatcagcccacgtggtgtggttggtgaacagtgcatgccaggaggaagcagtccctcctcaccagctctccagccaggacgatcacacagagatgaatggcatctgagtattacggcatccagagccactgctgactcccacttgcacgccaccattcagtcaccagactgggtgccctccgatgggtggaataagtctgcttcatgccaaggctgggctttgggtcccaccaagatgagttctctgtaagactgtggtggagttgcaccaggaggtgcctctgcctctcgacttgcaccctggtcatttgtaagggaaaagagctggaggtggggagagaaagatctccttcagttgggagtccttccacttcaacactggagaactgagccttgcatctctccagggtccaaggccacgcttggtgcacaggcaagacttgcttcagccccaggtgtggtgacttagacctaggaaaccaattatgagtggaaagtgaccctctagttcaactgtgccagaggaaacagccctccagtgcccacctgcctcactcctccctatcatgtaccgtgaaaaccccctctgatggcctcaaggcagtgcctgcaggccgaggcccttctgggggtttctatctttcttccaccagactccaagcccactctcctccaagactgtgttgtcttttctcaccaagagtattaacactactaagtctttcaccttaacttatgactcaggatttattcacgtcctgcccactctaggctcacaggaataaaatcaagtgctagacacactggctgctactaaggcactagcctctgtagctggtggtggcagcgtggggtgccgcccagcgtgctgggtcctggcagtgcctctgctgtgctgcacattgagccctttctcagtcagtggagtatcaagttgggccatctgtctactgacctggccttcatgtaagcagctgtgggctgcgggcagacaggagctcagagatgcagcatgaggcgcttagaaaaacctggccatttgctgcctctaattcccttttgctttgccatattgggctatgtattacctccttgaaataataaaagaataacattttcta

SEQ ID NO: 370190 - DNA, 2449 bp, Homo sapiens
tgggatgagagacttctgagccagtgtgtgtcagttcctggagctgtgtcagagcccagaaggtggctttggaggaggacccggtcagtatccacaccttgcacccacatatgcagcagtcaatgcattgtgcatcattggcaccgaggaggcctatgacatcattaacagagagaagcttcttcagtatttgtactccctgaagcaacctgacggctcctttctcatgcatgtcggaggtgaggtggatgtgagattggaccatgtggaggtagggagaatagaatgtcatgttctttcactgaagccatgccgtgagcaactctatccaaatagaatgtcacacctctcagttggagacccaggaggactgaccgtgtgccaagagtgaggacaggagaagcgcatactgtgctgcctccgtagcctcgctgaccaacatcatcactccagacctctttgagggcactgctgaatggatagcaaggtgtcagaactgggaaggtggcattggcggggtaccagggatggaagcccatggtggctataccttctgtggcctggccgcgctggtaatcctcaagagggaacgttccttgaacttgaagagcttattacaatgggtgacaagccggcagatgcgatttgaaggaggatttcagggccgctgcaacaagctggtggatggctgctactccttctggcaggcggggctcctgcccctgctccaccgcgcactgcacgcccaaggtgaccctgcccttagcatgagccactggatgttccatcagcaggccctgcaggagtacatcctgatgtgctgccagtgccctgcgggggggcttctggataaacctggcaagtcgcgtgatttctaccacacctgctactgcctgagcggcctgtccatagcccagcacttcggcagcggagccatgttgcatgatgtggtcctgggtgtgcccgaaaacgctctgcagcccactcacccagtgtacaacattggaccagacaaggtgatccaggccactacatactttctacagaagccagtcccaggttttgaggagcttaaggatgagacatcggcagagcctgcaaccgactagaggacctgggtcccggcagctctttgctcacccatctccccagtcagacaaggtttatacgtttcaatacatactgcattctgtgctacacaagccttagcctcagtggagctgtggttctcttggtactttcttgtcaaacaaaaccaatggctctgggtttggagaacacagtggctggttttaaaaattctttccacacctgtcaaaccaaaaatctatcagcccacgtggtgtggttggtgaacagtgcatgccaggaggaagcagtccctcctcaccagctctccagccaggacgatcacacagagatgaatggcatctgagtattacggcatccagagccactgctgactcccacttgcacgccaccattcagtcaccagactgggtgccctccgatgggtggaataagtctgcttcatgccaaggctgggctttgggtcccaccaagatgagttctctgtaagactgtggtggagttgcaccaggaggtgcctctgcctctcgacttgcaccctggtcatttgtaagggaaaagagctggaggtggggagagaaagatctccttcagttgggagtccttccacttcaacactggagaactgagccttgcatctctccagggtccaaggccacgcttggtgcacaggcaagacttgcttcagccccaggtgtggtgacttagacctaggaaaccaattatgagtggaaagtgaccctctagttcaactgtgccagaggaaacagccctccagtgcccacctgcctcactcctccctatcatgtaccgtgaaaaccccctctgatggcctcaaggcagtgcctgcaggccgaggcccttctgggggtttctatctttcttccaccagactccaagcccactctcctccaagactgtgttgtcttttctcaccaagagtattaacactactaagtctttcaccttaacttatgactcaggatttattcacgtcctgcccactctaggctcacaggaataaaatcaagtgctagacacactggctgctactaaggcactagcctctgtagctggtggtggcagcgtggggtgccgcccagcgtgctgggtcctggcagtgcctctgctgtgctgcacattgagccctttctcagtcagtggagtatcaagttgggccatctgtctactgacctggccttcatgtaagcagctgtgggctgcgggcagacaggagctcagagatgcagcatgaggcgcttagaaaaacctggccatttgctgcctctaattcccttttgctttgccatattgggctatgtattacctccttgaaataataaaagaataacattttcta

SEQ ID NO: 370191 - DNA, 5115 bp, Homo sapiens
  misc_feature (1846)..(1846): n is a, c, g, or t
  misc_feature (2181)..(2181): n is a, c, g, or t
  misc_feature (2351)..(2351): n is a, c, g, or t
  misc_feature (2359)..(2359): n is a, c, g, or t
agttatcaccctataatcgtatctgctttcatcttgttgtgattatgtgtgctggtgtccaaattcaggatatctggaagctccttgtagagcttttgaactttgagcttctatgctttaataatataggaagtcactgaaacagtctatagttttttatataataaacatagcgttttcttttcagactctaattttagccacaggttatcatttaccttataataatagtcttttatttgttataggatatgaaatatatgtacattttgtacagatgtgtaatgcagtttcctaaagtttaataaatatgcttttttaaataatagctttgttgagatataattcccataccacacaacttacctattcagttgcgaaccatcatgacaattttagaacattttcatcactcatccccccaaaaatccccatacacattaaatattttcttaaaaaggaaatcgtgaaggaaaaatcaatagtatgattacaatattaagtataaaacatatatatgttttacattaattaaattttaaaaattttaaaaagttttaaactcacataaccaaaacagaggagcaaaaaggagaaaatagatgcagcatatgatgtagacaaggggcaagtataagaaaaagctagattaataaaattggctattggatctcagaagattaggccaaacagacaccatcataaggaaatgcaaatattaaacacaagttatggaaaaatttcaccctaattagtaatcagaggcatgcaaatcaaaataaactatcaggtactatttctttttaccattttaattgctgataacttttaaaaagtaactaaagctggccgggcgtggtggctcacgcctgtaatcctagcactttgggaagccgagttgggcagatcattttaggagttcgagactggcttgatcaacatagtgaaaccctgtctctactaaaaatgcaaaaatttagccaggcgtgggggcttgtacctgtaatccaaggtactcaggaggctgagacaggagaatgacttgaacctgggaggcagaggttgcagtgagctgagatcacaccactgcactccagcctgggcgacagagcaagatagcatctcaacaacaacaacaaaaaggtgctaatgctggaggtggtatagcaaaattttaaattttgctggtagctatataaagtctttgtttttatttttagtttatttatatatttatttttgacagctcctgcagagcagggctactccacagggattgtgctgagagtagtctataaattcttaaagcagtttatcagtatctattaaaagccttaacaatgtttattccctttaaccgaataattccaccgtggtcagtctatttgaagaaaataatcttaagcatacataatattgacaaagatttagtccagcattcctcataatggcaaggaactggaaacaaccttggaaataagtaaaagaagatagagtgaagtcccatcatatatgtatgtatcttctacaacaaagttcactgtgcttacaggtgaggaaaagaaaggaagggaattaaaatagtgcaagtgtatcaaagcatgtggcctgcagccagcctgagatgggagattggatgcttctccttaggtcggacttagtttcctgtgtctcttaatgggtgtttcagggctgagtgcgactcagggttgaagacgagaagcttttgtccctggcctctaaatgtcacctggccactgtccctcacctagtgctcaaccttggaaacccttttcctctgtgtctctttttaaagaaatttaataaattcttattgtctgtttgnaatattcaacaatttaggctgggtgcggtggcccatgcctgtaatcccagtactttgggaggccaaaagagggtgggtcacctgaggtcaggagttagagagcagcctgaccaacatagtgaaaccatgtctctactaaaaatacaagaattagccaggcatggtggtgcatgcctgtaatcccagctactcgggaggctgaggcaggacaatcgctcctgggttcacgccattctcctgcctcagcctcctgagtagctgggactacaggcgcccaccaccatgtccggctaatttttttgtatttttagtagagacagggtttcaccgtgttngccgggatggtctcgatctcctgacctcgtgatcaacccccctcagcctcccaaagtgctgggattacaggcataagccatcgtgcctggcccaccataggaatttatatactgacatatatataagatttttagctcagttctttttatgatacagttaccttatatgnccacttantgaaatactatatggctattcacagtgatggctatgcagattatgtaatagaatagaaaatttatgcctatagtggtataagtgaaaaacataagctacacagttataataactaggtagaaaaacgcatagaaccaaaaagactggaagaaagaacaattagctttcaggtgccatttaccaattgttgggcatcttttttttaaaaatgatttattgtcaggcatcttttagcccaggtatcaaaatataaaattgaccaaggacttagtgtacatcctatatgtatatatatttttaatcgatttctatgcagatgtttctgcacacctgtccgtgatttgtccctccttcccacttgataactgtgtggcccacagaattctttgaccatagtgattggacttcagagtgaagaagtccagttgcttgtcagtaccttagtagtattaccagaatacccagtttttgctagggtatcatatgatgcaggagggcagttactagtaatgtttcttaggtaaattctttgagctgagagacaagttagagaattccctttggagatcaattaaatttaggcttagaaaagtagaagaaacagactttattacccattaagagttctctgagctaatcagtctggttaacaagttatagagatatgctagagggaatgtctcttgaagtccagggtagagttatggaccaagttgggagcagctaccgaggtcagtctgggaaggtaagctaaacagctaggctggttcactgcctgccagagatgtggttgaggatcaccatccacgttaacagggtgcatttcaagaaagtgaaagtgccactttgaattgctgctctttgacacatgtcaaagttcaggagaagggacatgctgtgcgtaggacatggggaagatagcagttgtaccaagaatgaatggaagaggaaggggagcaggaaaccttgactattcccccaggtgagaaagtggaattaggtcattgatacttggctggatctgccgggcccttactgaccctttgcccttcaacaggtgaccctgcccttagcatgagccactggatgttccatcagcaggccctgcaggagtacatcctgatgtgctgccagtgccctgcgggggggcttctggataaacctggcaagtcgcgtgatttctaccacacctgctactgcctgagcggcctgtccatagcccagcacttcggcagcggagccatgttgcatgatgtggtcctgggtgtgcccgaaaacgctctgcagcccactcacccagtgtacaacattggaccagacaaggtgatccaggccactacatactttctacagaagccagtcccaggttttgaggagcttaaggatgagacatcggcagagcctgcaaccgactagaggacctgggtcccggcagctctttgctcacccatctccccagtcagacaaggtttatacgtttcaatacatactgcattctgtgctacacaagccttagcctcagtggagctgtggttctcttggtactttcttgtcaaacaaaaccaatggctctgggtttggagaacacagtggctggttttaaaaattctttccacacctgtcaaaccaaaaatctatcagcccacgtggtgtggttggtgaacagtgcatgccaggaggaagcagtccctcctcaccagctctccagccaggacgatcacacagagatgaatggcatctgagtattacggcatccagagccactgctgactcccacttgcacgccaccattcagtcaccagactgggtgccctccgatgggtggaataagtctgcttcatgccaaggctgggctttgggtcccaccaagatgagttctctgtaagactgtggtggagttgcaccaggaggtgcctctgcctctcgacttgcaccctggtcatttgtaagggaaaagagctggaggtggggagagaaagatctccttcagttgggagtccttccacttcaacactggagaactgagccttgcatctctccagggtccaaggccacgcttggtgcacaggcaagacttgcttcagccccaggtgtggtgacttagacctaggaaaccaattatgagtggaaagtgaccctctagttcaactgtgccagaggaaacagccctccagtgcccacctgcctcactcctccctatcatgtaccgtgaaaaccccctctgatggcctcaaggcagtgcctgcaggccgaggcccttctgggggtttctatctttcttccaccagactccaagcccactctcctccaagactgtgttgtcttttctcaccaagagtattaacactactaagtctttcaccttaacttatgactcaggatttattcacgtcctgcccactctaggctcacaggaataaaatcaagtgctagacacactggctgctactaaggcactagcctctgtagctggtggtggcagcgtggggtgccgcccagcgtgctgggtcctggcagtgcctctgctgtgctgcacattgagccctttctcagtcagtggagtatcaagttgggccatctgtctactgacctggccttcatgtaagcagctgtgggctgcgggcagacaggagctcagagatgcagcatgaggcgcttagaaaaacctggccatttgctgcctctaattcccttttgctttgccatattgggctatgtattacctccttgaaataataaaagaataacattttcta

SEQ ID NO: 370192 - DNA, 1550 bp, Homo sapiens
  misc_feature (7)..(7): n is a, c, g, or t
  misc_feature (15)..(15): n is a, c, g, or t
  misc_feature (17)..(17): n is a, c, g, or t
  misc_feature (21)..(21): n is a, c, g, or t
  misc_feature (24)..(24): n is a, c, g, or t
  misc_feature (37)..(37): n is a, c, g, or t
  misc_feature (42)..(42): n is a, c, g, or t
  misc_feature (46)..(46): n is a, c, g, or t
  misc_feature (75)..(75): n is a, c, g, or t
  misc_feature (77)..(77): n is a, c, g, or t
cgtaccngcggtggngnctgntanggacattgtggtnccccngggntgcagggaattgggacgtgcagaaaacgntntcagcccactcacccagtgtacaacattggaccagacaaggtgatccaggccactacatactttctacagaagccagtcccaggttttgaggagcttaaggatgagacatcggcagagcctgcaaccgactagaggacctgggtcccggcagctctttgctcacccatctccccagtcagacaaggtttatacgtttcaatacatactgcattctgtgctacacaagccttagcctcagtggagctgtggttctcttggtactttcttgtcaaacaaaaccaatggctctgggtttggagaacacagtggctggttttaaaaattctttccacacctgtcaaaccaaaaatctatcagcccacgtggtgtggttggtgaacagtgcatgccaggaggaagcagtccctcctcaccagctctccagccaggacgatcacacagagatgaatggcatctgagtattacggcatccagagccactgctgactcccacttgcacgccaccattcagtcaccagactgggtgccctccgatgggtggaataagtctgcttcatgccaaggctgggctttgggtcccaccaagatgagttctctgtaagactgtggtggagttgcaccaggaggtgcctctgcctctcgacttgcaccctggtcatttgtaagggaaaagagctggaggtggggagagaaagatctccttcagttgggagtccttccacttcaacactggagaactgagccttgcatctctccagggtccaaggccacgcttggtgcacaggcaagacttgcttcagccccaggtgtggtgacttagacctaggaaaccaattatgagtggaaagtgaccctctagttcaactgtgccagaggaaacagccctccagtgcccacctgcctcactcctccctatcatgtaccgtgaaaaccccctctgatggcctcaaggcagtgcctgcaggccgaggcccttctgggggtttctatctttcttccaccagactccaagcccactctcctccaagactgtgttgtcttttctcaccaagagtattaacactactaagtctttcaccttaacttatgactcaggatttattcacgtcctgcccactctaggctcacaggaataaaatcaagtgctagacacactggctgctactaaggcactagcctctgtagctggtggtggcagcgtggggtgccgcccagcgtgctgggtcctggcagtgcctctgctgtgctgcacattgagccctttctcagtcagtggagtatcaagttgggccatctgtctactgacctggccttcatgtaagcagctgtgggctgcgggcagacaggagctcagagatgcagcatgaggcgcttagaaaaacctggccatttgctgcctctaattcccttttgctttgccatattgggctatgtattacctccttgaaataataaaagaataacattttcta

SEQ ID NO: 370193 - DNA, 618 bp, Homo sapiens
  misc_feature (17)..(17): n is a, c, g, or t
  misc_feature (22)..(22): n is a, c, g, or t
  misc_feature (25)..(25): n is a, c, g, or t
tgcggtgactctagagnatccngtntagccctccagtgcccacctgcctcactcctccctatcatgtaccgtgaaaaccccctctgatggcctcaaggcagtgcctgcaggccgaggcccttctgggggtttctatctttcttccaccagactccaagcccactctcctccaagactgtgttgtcttttctcaccaagagtattaacactactaagtctttcaccttaacttatgactcaggatttattcacgtcctgcccactctaggctcacaggaataaaatcaagtgctagacacactggctgctactaaggcactagcctctgtagctggtggtggcagcgtggggtgccgcccagcgtgctgggtcctggcagtgcctctgctgtgctgcacattgagccctttctcagtcagtggagtatcaagttgggccatctgtctactgacctggccttcatgtaagcagctgtgggctgcgggcagacaggagctcagagatgcagcatgaggcgcttagaaaaacctggccatttgctgcctctaattcccttttgctttgccatattgggctatgtattacctccttgaaataataaaagaataacattttcta

SEQ ID NO: 370194 - DNA, 3805 bp, Homo sapiens
  misc_feature (1846)..(1846): n is a, c, g, or t
  misc_feature (2181)..(2181): n is a, c, g, or t
  misc_feature (2351)..(2351): n is a, c, g, or t
  misc_feature (2359)..(2359): n is a, c, g, or t
agttatcaccctataatcgtatctgctttcatcttgttgtgattatgtgtgctggtgtccaaattcaggatatctggaagctccttgtagagcttttgaactttgagcttctatgctttaataatataggaagtcactgaaacagtctatagttttttatataataaacatagcgttttcttttcagactctaattttagccacaggttatcatttaccttataataatagtcttttatttgttataggatatgaaatatatgtacattttgtacagatgtgtaatgcagtttcctaaagtttaataaatatgcttttttaaataatagctttgttgagatataattcccataccacacaacttacctattcagttgcgaaccatcatgacaattttagaacattttcatcactcatccccccaaaaatccccatacacattaaatattttcttaaaaaggaaatcgtgaaggaaaaatcaatagtatgattacaatattaagtataaaacatatatatgttttacattaattaaattttaaaaattttaaaaagttttaaactcacataaccaaaacagaggagcaaaaaggagaaaatagatgcagcatatgatgtagacaaggggcaagtataagaaaaagctagattaataaaattggctattggatctcagaagattaggccaaacagacaccatcataaggaaatgcaaatattaaacacaagttatggaaaaatttcaccctaattagtaatcagaggcatgcaaatcaaaataaactatcaggtactatttctttttaccattttaattgctgataacttttaaaaagtaactaaagctggccgggcgtggtggctcacgcctgtaatcctagcactttgggaagccgagttgggcagatcattttaggagttcgagactggcttgatcaacatagtgaaaccctgtctctactaaaaatgcaaaaatttagccaggcgtgggggcttgtacctgtaatccaaggtactcaggaggctgagacaggagaatgacttgaacctgggaggcagaggttgcagtgagctgagatcacaccactgcactccagcctgggcgacagagcaagatagcatctcaacaacaacaacaaaaaggtgctaatgctggaggtggtatagcaaaattttaaattttgctggtagctatataaagtctttgtttttatttttagtttatttatatatttatttttgacagctcctgcagagcagggctactccacagggattgtgctgagagtagtctataaattcttaaagcagtttatcagtatctattaaaagccttaacaatgtttattccctttaaccgaataattccaccgtggtcagtctatttgaagaaaataatcttaagcatacataatattgacaaagatttagtccagcattcctcataatggcaaggaactggaaacaaccttggaaataagtaaaagaagatagagtgaagtcccatcatatatgtatgtatcttctacaacaaagttcactgtgcttacaggtgaggaaaagaaaggaagggaattaaaatagtgcaagtgtatcaaagcatgtggcctgcagccagcctgagatgggagattggatgcttctccttaggtcggacttagtttcctgtgtctcttaatgggtgtttcagggctgagtgcgactcagggttgaagacgagaagcttttgtccctggcctctaaatgtcacctggccactgtccctcacctagtgctcaaccttggaaacccttttcctctgtgtctctttttaaagaaatttaataaattcttattgtctgtttgnaatattcaacaatttaggctgggtgcggtggcccatgcctgtaatcccagtactttgggaggccaaaagagggtgggtcacctgaggtcaggagttagagagcagcctgaccaacatagtgaaaccatgtctctactaaaaatacaagaattagccaggcatggtggtgcatgcctgtaatcccagctactcgggaggctgaggcaggacaatcgctcctgggttcacgccattctcctgcctcagcctcctgagtagctgggactacaggcgcccaccaccatgtccggctaatttttttgtatttttagtagagacagggtttcaccgtgttngccgggatggtctcgatctcctgacctcgtgatcaacccccctcagcctcccaaagtgctgggattacaggcataagccatcgtgcctggcccaccataggaatttatatactgacatatatataagatttttagctcagttctttttatgatacagttaccttatatgnccacttantgaaatactatatggctattcacagtgatggctatgcagattatgtaatagaatagaaaatttatgcctatagtggtataagtgaaaaacataagctacacagttataataactaggtagaaaaacgcatagaaccaaaaagactggaagaaagaacaattagctttcaggtgccatttaccaattgttgggcatcttttttttaaaaatgatttattgtcaggcatcttttagcccaggtatcaaaatataaaattgaccaaggacttagtgtacatcctatatgtatatatatttttaatcgatttctatgcagatgtttctgcacacctgtccgtgatttgtccctccttcccacttgataactgtgtggcccacagaattctttgaccatagtgattggacttcagagtgaagaagtccagttgcttgtcagtaccttagtagtattaccagaatacccagtttttgctagggtatcatatgatgcaggagggcagttactagtaatgtttcttaggtaaattctttgagctgagagacaagttagagaattccctttggagatcaattaaatttaggcttagaaaagtagaagaaacagactttattacccattaagagttctctgagctaatcagtctggttaacaagttatagagatatgctagagggaatgtctcttgaagtccagggtagagttatggaccaagttgggagcagctaccgaggtcagtctgggaaggtaagctaaacagctaggctggttcactgcctgccagagatgtggttgaggatcaccatccacgttaacagggtgcatttcaagaaagtgaaagtgccactttgaattgctgctctttgacacatgtcaaagttcaggagaagggacatgctgtgcgtaggacatggggaagatagcagttgtaccaagaatgaatggaagaggaaggggagcaggaaaccttgactattcccccaggtgagaaagtggaattaggtcattgatacttggctggatctgccgggcccttactgaccctttgcccttcaacaggtgaccctgcccttagcatgagccactggatgttccatcagcaggccctgcaggagtacatcctgatgtgctgccagtgccctgcgggggggcttctggataaacctggcaagtgagtgttttctctctggggagggaggggagaggggaggagagagcagaggggcgtgcacctcaggcctactcagagccagatctcaagagcagaggtgtcaccttcagcacctgcatagcgctaggttgtatgggaaaaagcacccagttgggagcaccccttgaggccattgatcctggcacctccagctgcccgtcttgtcccccagcctgcatgcaaccccctcccccagacagggaaacagattgctgggtagataactcttctttttttt

SEQ ID NO: 370195 - DNA, 1281 bp, Homo sapiens
agttatcaccctataatcgtatctgctttcatcttgttgtgattatgtgtgctggtgtccaaattcaggatatctggaagctccttgtagagcttttgaactttgagcttctatgctttaataatataggaagtcactgaaacagtctatagttttttatataataaacatagcgttttcttttcagactctaattttagccacaggttatcatttaccttataataatagtcttttatttgttataggatatgaaatatatgtacattttgtacagatgtgtaatgcagtttcctaaagtttaataaatatgcttttttaaataatagctttgttgagatataattcccataccacacaacttacctattcagttgcgaaccatcatgacaattttagaacattttcatcactcatccccccaaaaatccccatacacattaaatattttcttaaaaaggaaatcgtgaaggaaaaatcaatagtatgattacaatattaagtataaaacatatatatgttttacattaattaaattttaaaaattttaaaaagttttaaactcacataaccaaaacagaggagcaaaaaggagaaaatagatgcagcatatgatgtagacaaggggcaagtataagaaaaagctagattaataaaattggctattggatctcagaagattaggccaaacagacaccatcataaggaaatgcaaatattaaacacaagttatggaaaaatttcaccctaattagtaatcagaggcatgcaaatcaaaataaactatcaggtactatttctttttaccattttaattgctgataacttttaaaaagtaactaaagctggccgggcgtggtggctcacgcctgtaatcctagcactttgggaagccgagttgggcagatcattttaggagttcgagactggcttgatcaacatagtgaaaccctgtctctactaaaaatgcaaaaatttagccaggcgtgggggcttgtacctgtaatccaaggtactcaggaggctgagacaggagaatgacttgaacctgggaggcagaggttgcagtgagccgagatcgtgccattgccctccaacctgggcaacagagtgagactctgtctcaaaaaagaaaaaaaaaaaggaaatattcaacagtttaatattttgcttcaatctctttatagactgtatcataaacttttcatttttatttttagaaatcttttcccccgtttttcttttttgctattttctccaaaatgggaaaggttattgata

SEQ ID NO: 370196 - DNA, 397 bp, Homo sapiens
gcaaaagtagaagaaaagatccaagaggtcttcagttcttacaagttcaaccaccttgtaccaaggtaagctgtggttaggagtttgaggggatctgggagaacaccaccatgcagcagcctttcttctttcctccttgagcgaatctaaccacggggagcatctgctgcaagaatggtgtttcttgtccttgtggttacctggatatgctaagacccccactcctccctctggtagaatactgtttagagcgattctccactcgagctgagctgccaggtgttacatggggattcccctcaatgcctcaattctgaggtctgaagatggagagaggaattccaggtttttgtttagtggtggcctgctgctctggtcttcagatgagaactctcag

SEQ ID NO: 370197 - DNA, 750 bp, Homo sapiens
cgcggtgcctttcggctctgggaagctccgggcgcccaggcttgggcttcgtcgtggagcgtttgcgcggccagcttggggaagggtcgtttcaaggttgggcttggaggagagggcagtagccgagtcccctctgccctaaagaacgagaagaatcgtgttctatgcctggaggacagaggcagcccgtgcgggtcggacagcccactctgttctgccagtacttcgggaggttctggggtgcatagtgcacttttcccaacctgccctcagcttctggaggcagagagcagggccaggctgctgtcatgccgtttcacgatctgtttaatttttgacctacagtgccaggtttgggggcccgcctcgtgggtgggcatttcggtagtcattcagccatttgagcaccagctacgtgtcggacacaatattaaacgatggaagtacaaggaaataaaacagctcctgaccaggagcctggttgggggacaggcaggaaaacagtttggaaagtgatctaatagaaagaatggattttggactactaatcattccctaaggcctagaagtaggatcgaacctatcattttgaaaagtgtttggcgaatgagtatatattcatatgcccaaaaccatagttttgtttttcttcttattccctaattggaattgttcccaaggttgctatgtggaactgtttatccatctgtccctaggagaagtggttaggataattcttaacactaataa

SEQ ID NO: 370198 - DNA, 3137 bp, Homo sapiens
caggactctacgctcttgcagcagctcctctgcccaatggggggcggcagcatctcagtaactcactcgaaagacgggtaggcgggaggagacattcgcgttcaaaatctttttgcctctatccgctcgccgtagcgctttagcccgctcgagtttcaatgcgcgttgttgcttaacgaagcagagtcctacacactgtctgctgctctcctgatcatggcttctccgagttctttcacctactattgccctccatcttcctcccccgtctggtcagagccgctgtacagtctgaggcccgagcacgcgcgagagcggttgcaggacgactcggtggaaacagtcacgtccatagaacaggcaaaagtagaagaaaagatccaagaggtcttcagttcttacaagttcaaccaccttgtaccaaggcttgttttgcagagggagaagcacttccattatctgaaaagaggccttcgacaactgacagatgcctatgagtgtctggatgccagccgcccatggctctgctattggatcctgcacagcttggaactgctagatgaacccatcccccagatagtggctacagatgtgtgtcagttcctggagctgtgtcagagcccagaaggtggctttggaggaggacccggtcagtatccacaccttgcacccacatatgcagcagtcaatgcattgtgcatcattggcaccgaggaggcctatgacatcattaacagagagaagcttcttcagtatttgtactccctgaagcaacctgacggctcctttctcatgcatgtcggaggtgaggtggatgtgagaagcgcatactgtgctgcctccgtagcctcgctgaccaacatcatcactccagacctctttgagggcactgctgaatggatagcaaggtgtcagaactgggaaggtggcattggcggggtaccagggatggaagcccatggtggctataccttctgtggcctggccgcgctggtaatcctcaagagggaacgttccttgaacttgaagagcttattacaatgggtgacaagccggcagatgcgatttgaaggaggatttcagggccgctgcaacaagctggtggatggctgctactccttctggcaggcggggctcctgcccctgctccaccgcgcactgcacgcccaaggtgaccctgcccttagcatgagccactggatgttccatcagcaggccctgcaggagtacatcctgatgtgctgccagtgccctgcgggggggcttctggataaacctggcaagtcgcgtgatttctaccacacctgctactgcctgagcggcctgtccatagcccagcacttcggcagcggagccatgttgcatgatgtggtcctgggtgtgcccgaaaacgctctgcagcccactcacccagtgtacaacattggaccagacaaggtgatccaggccactacatactttctacagaagccagtcccaggttttgaggagcttaaggatgagacatcggcagagcctgcaaccgactagaggacctgggtcccggcagctctttgctcacccatctccccagtcagacaaggtttatacgtttcaatacatactgcattctgtgctacacaagccttagcctcagtggagctgtggttctcttggtactttcttgtcaaacaaaaccaatggctctgggtttggagaacacagtggctggttttaaaaattctttccacacctgtcaaaccaaaaatctatcagcccacgtggtgtggttggtgaacagtgcatgccaggaggaagcagtccctcctcaccagctctccagccaggacgatcacacagagatgaatggcatctgagtattacggcatccagagccactgctgactcccacttgcacgccaccattcagtcaccagactgggtgccctccgatgggtggaataagtctgcttcatgccaaggctgggctttgggtcccaccaagatgagttctctgtaagactgtggtggagttgcaccaggaggtgcctctgcctctcgacttgcaccctggtcatttgtaagggaaaagagctggaggtggggagagaaagatctccttcagttgggagtccttccacttcaacactggagaactgagccttgcatctctccagggtccaaggccacgcttggtgcacaggcaagacttgcttcagccccaggtgtggtgacttagacctaggaaaccaattatgagtggaaagtgaccctctagttcaactgtgccagaggaaacagccctccagtgcccacctgcctcactcctccctatcatgtaccgtgaaaaccccctctgatggcctcaaggcagtgcctgcaggccgaggcccttctgggggtttctatctttcttccaccagactccaagcccactctcctccaagactgtgttgtcttttctcaccaagagtattaacactactaagtctttcaccttaacttatgactcaggatttattcacgtcctgcccactctaggctcacaggaataaaatcaagtgctagacacactggctgctactaaggcactagcctctgtagctggtggtggcagcgtggggtgccgcccagcgtgctgggtcctggcagtgcctctgctgtgctgcacattgagccctttctcagtcagtggagtatcaagttgggccatctgtctactgacctggccttcatgtaagcagctgtgggctgcgggcagacaggagctcagagatgcagcatgaggcgcttagaaaaacctggccatttgctgcctctaattcccttttgctttgccatattgggctatgtattacctccttgaaataataaaagaataacattttctaaaaaacaacaaacacgtgtcacggcagagaatagaacttggttcgggcgccttcgggcctagaaaaagcttttctaaaccctgtcgtgtgggggcgcgggccgcgcggtatgttggaacgtgggccaatgccggttccaagaaaaccgggcaagagcatagggctgggttcccccccattaaaaaagccggcggccccgccgcgtggaaacaacccgagggcgtcggacgcctgcgcgctctccccggcgcagcgagccgataatcg

SEQ ID NO: 370199 - DNA, 2420 bp, Homo sapiens
gtgattgtgaataagggatgttttctctcctgtctctctcccagtgtctgtctggatgccagccgcccatggctctgctattggatcctgcacagcttggaactgctagatgaacccatcccccagatagtggctacagatgtgtgtcagttcctggagctgtgtcagagcccagaaggtggctttggaggaggacccggtcagtatccacaccttgcacccacatatgcagcagtcaatgcattgtgcatcattggcaccgaggaggcctatgacatcattaacagagagaagcttcttcagtatttgtactccctgaagcaacctgacggctcctttctcatgcatgtcggaggtgaggtggatgtgagaagcgcatactgtgctgcctccgtagcctcgctgaccaacatcatcactccagacctctttgagggcactgctgaatggatagcaaggtgtcagaactgggaaggtggcattggcggggtaccagggatggaagcccatggtggctataccttctgtggcctggccgcgctggtaatcctcaagagggaacgttccttgaacttgaagagcttattacaatgggtgacaagccggcagatgcgatttgaaggaggatttcagggccgctgcaacaagctggtggatggctgctactccttctggcaggcggggctcctgcccctgctccaccgcgcactgcacgcccaaggtgaccctgcccttagcatgagccactggatgttccatcagcaggccctgcaggagtacatcctgatgtgctgccagtgccctgcgggggggcttctggataaacctggcaagtcgcgtgatttctaccacacctgctactgcctgagcggcctgtccatagcccagcacttcggcagcggagccatgttgcatgatgtggtcctgggtgtgcccgaaaacgctctgcagcccactcacccagtgtacaacattggaccagacaaggtgatccaggccactacatactttctacagaagccagtcccaggttttgaggagcttaaggatgagacatcggcagagcctgcaaccgactagaggacctgggtcccggcagctctttgctcacccatctccccagtcagacaaggtttatacgtttcaatacatactgcattctgtgctacacaagccttagcctcagtggagctgtggttctcttggtactttcttgtcaaacaaaaccaatggctctgggtttggagaacacagtggctggttttaaaaattctttccacacctgtcaaaccaaaaatctatcagcccacgtggtgtggttggtgaacagtgcatgccaggaggaagcagtccctcctcaccagctctccagccaggacgatcacacagagatgaatggcatctgagtattacggcatccagagccactgctgactcccacttgcacgccaccattcagtcaccagactgggtgccctccgatgggtggaataagtctgcttcatgccaaggctgggctttgggtcccaccaagatgagttctctgtaagactgtggtggagttgcaccaggaggtgcctctgcctctcgacttgcaccctggtcatttgtaagggaaaagagctggaggtggggagagaaagatctccttcagttgggagtccttccacttcaacactggagaactgagccttgcatctctccagggtccaaggccacgcttggtgcacaggcaagacttgcttcagccccaggtgtggtgacttagacctaggaaaccaattatgagtggaaagtgaccctctagttcaactgtgccagaggaaacagccctccagtgcccacctgcctcactcctccctatcatgtaccgtgaaaaccccctctgatggcctcaaggcagtgcctgcaggccgaggcccttctgggggtttctatctttcttccaccagactccaagcccactctcctccaagactgtgttgtcttttctcaccaagagtattaacactactaagtctttcaccttaacttatgactcaggatttattcacgtcctgcccactctaggctcacaggaataaaatcaagtgctagacacactggctgctactaaggcactagcctctgtagctggtggtggcagcgtggggtgccgcccagcgtgctgggtcctggcagtgcctctgctgtgctgcacattgagccctttctcagtcagtggagtatcaagttgggccatctgtctactgacctggccttcatgtaagcagctgtgggctgcgggcagacaggagctcagagatgcagcatgaggcgcttagaaaaacctggccatttgctgcctctaattcccttttgctttgccatattgggctatgtattacctccttgaaataataaaagaataacattttcta

SEQ ID NO: 370200 - DNA, 2567 bp, Homo sapiens
caagaggtcttcagctgcttacaagttcatgcacgcgttggtagcgtggcttgtgtgagcgatgcagggagaagcacgtatccactatatctgacaaagaggccgttctgacaaatcgtgtaccagtatgccgtaataggaggatgtcgtgcgatgccaagggctgcccgagtggcatcgtagtcgtgattgcgatccatgccacgagcagtgtggaacgctgctatacgatgaaacccaatctcccgccatggataagtgtgctatccagagtagatcgtcgctcgagctctcctaggaagctggtggtcaagagtcccagaaggtggctttggaggaggacccggtcagtatccacaccttgcacccacatatgcagcagtcaatgcattgtgcatcattggcaccgaggaggcctatgacatcattaacagagagaagcttcttcagtatttgtactccctgaagcaacctgacggctcctttctcatgcatgtcggaggtgaggtggatgtgagaagcgcatactgtgctgcctccgtagcctcgctgaccaacatcatcactccagacctctttgagggcactgctgaatggatagcaaggtgtcagaactgggaaggtggcattggcggggtaccagggatggaagcccatggtggctataccttctgtggcctggccgcgctggtaatcctcaagagggaacgttccttgaacttgaagagcttattacaatgggtgacaagccggcagatgcgatttgaaggaggatttcagggccgctgcaacaagctggtggatggctgctactccttctggcaggcggggctcctgcccctgctccaccgcgcactgcacgcccaaggtgaccctgcccttagcatgagccactggatgttccatcagcaggccctgcaggagtacatcctgatgtgctgccagtgccctgcgggggggcttctggataaacctggcaagtcgcgtgatttctaccacacctgctactgcctgagcggcctgtccatagcccagcacttcggcagcggagccatgttgcatgatgtggtcctgggtgtgcccgaaaacgctctgcagcccactcacccagtgtacaacattggaccagacaaggtgatccaggccactacatactttctacagaagccagtcccaggttttgaggagcttaaggatgagacatcggcagagcctgcaaccgactagaggacctgggtcccggcagctctttgctcacccatctccccagtcagacaaggtttatacgtttcaatacatactgcattctgtgctacacaagccttagcctcagtggagctgtggttctcttggtactttcttgtcaaacaaaaccaatggctctgggtttggagaacacagtggctggttttaaaaattctttccacacctgtcaaaccaaaaatctatcagcccacgtggtgtggttggtgaacagtgcatgccaggaggaagcagtccctcctcaccagctctccagccaggacgatcacacagagatgaatggcatctgagtattacggcatccagagccactgctgactcccacttgcacgccaccattcagtcaccagactgggtgccctccgatgggtggaataagtctgcttcatgccaaggctgggctttgggtcccaccaagatgagttctctgtaagactgtggtggagttgcaccaggaggtgcctctgcctctcgacttgcaccctggtcatttgtaagggaaaagagctggaggtggggagagaaagatctccttcagttgggagtccttccacttcaacactggagaactgagccttgcatctctccagggtccaaggccacgcttggtgcacaggcaagacttgcttcagccccaggtgtggtgacttagacctaggaaaccaattatgagtggaaagtgaccctctagttcaactgtgccagaggaaacagccctccagtgcccacctgcctcactcctccctatcatgtaccgtgaaaaccccctctgatggcctcaaggcagtgcctgcaggccgaggcccttctgggggtttctatctttcttccaccagactccaagcccactctcctccaagactgtgttgtcttttctcaccaagagtattaacactactaagtctttcaccttaacttatgactcaggatttattcacgtcctgcccactctaggctcacaggaataaaatcaagtgctagacacactggctgctactaaggcactagcctctgtagctggtggtggcagcgtggggtgccgcccagcgtgctgggtcctggcagtgcctctgctgtgctgcacattgagccctttctcagtcagtggagtatcaagttgggccatctgtctactgacctggccttcatgtaagcagctgtgggctgcgggcagacaggagctcagagatgcagcatgaggcgcttagaaaaacctggccatttgctgcctctaattcccttttgctttgccatattgggctatgtattacctccttgaaataataaaagaataacattttcta

SEQ ID NO: 370201 - DNA, 2535 bp, Homo sapiens
cgtggatcccgagaaagaggcgcaggacgaggaggcagaacccgactggcgcgtagagcagcagcacgagcagtaggaagcagtcacccggaagcctgggggcgagaggcgaagtggtcaggcgccgaaggccgagagcacgcggggatcggtctcttcccgccgggtctcttaccggtgcgagtcaaagagccgctccggccccggccctgagggaagctccataactgctgcttcaggagcgcccggccgtcgccgccgccgccattttcgcgcccggccgcaggggctcttgggaaggcggagtctttgggcatccgcccggggtgaggggacccgaagtcctgaggcgcgccggaagggctagcggtcccagcataccccgcggccccttgggccgtctcacaactcgcgtccggcggagaccacaattcccggcattcgtggggcagggaggagtcggcctcccggaatcctggtcccggcgtgcacttctgaaggacttcaggtaccggcgtgccccgcgtcctactgtccgcctgctcgcgtcctgggtgccgcctctgagtagggcgggcgaggaggcagccaaggcggagctgatggctgcgccgagggcggggcggggtgcaggctggagccttcgggcatggcgggctttggggggcattcgctgggggaggagaccccgtttgacccctgacctccgggccctgctgacgtcaggaacttctgacccccgggcccgagtgacttatgggacccccagtctctgggcccggttgtctgttggggtcactgaaccccgagcatgcctgacgtctgggaccccgggtccccgggcacaactgactgcggtgaccccagataccaggacccgggaggcctcagagaactctggaacccgttcgcgcgcgtggctggcggtggcgctgggcgctgggggggcagtgctgttgttgttgtggggcgggggtcggggtcctccggccgtcctcgccgccgtccctagcccgccgcccgcttctccccggagtcagtacaacttcatcgcagatgtggtggagaagacagcacctgccgtggtctatatcgagatcctggaccggcaccctttcttgggccgcgaggtccctatctcgaacggctcaggattcgtggtggctgccgatgggctcattgtcaccaacgcccatgtggtggctgatcggcgcagagtccgtgtgagactgctaagcggcgacacgtatgaggccgtggtcacagctgtggatcccgtggcagacatcgcaacgctgaggattcagactaaggagcctctccccacgctgcctctgggacgctcagctgatgtccggcaaggggagtttgttgttgccatgggaagtccctttgcactgcagaacacgatcacatccggcattgttagctctgctcagcgtccagccagagacctgggactcccccaaaccaatgtggaatacattcaaactgatgcagctattgattttggaaactctggaggtcccctggttaacctggtgagtgagacatccttccttccaagaatccctgccccaggtcagtgtgggaagggtaggtttcccctaattcaaggatgtttggtcaagtttctgagcagttctttgttggctatctctcaatatccaaccagatctccccaacacttgctggtacttttgttcgggtgcccccatcccctactatttgtttaggctagggaactgggggctgtatccctgcaggatggggaggtgattggagtgaacaccatgaaggtcacagctggaatctcctttgccatcccttctgatcgtcttcgagagtttctgcatcgtggggaaaagaagaattcctcctccggaatcagtgggtcccagcggcgctacattggggtgatgatgctgaccctgagtcccagcatccttgctgaactacagcttcgagaaccaagctttcccgatgttcagcatggtgtactcatccataaagtcatcctgggctcccctgcacaccgggctggtctgcggcctggtgatgtgattttggccattggggagcagatggtacaaaatgctgaagatgtttatgaagctgttcgaacccaatcccagttggcagtgcagatccggcggggacgagaaacactgaccttatatgtgacccctgaggtcacagaatgaatagatcaccaagagtatgaggctcctgctctgatttcctccttgcctttctggctgaggttctgagggcaccgagacagagggttaaatgaaccagtgggggcaggtccctccaaccaccagcactgactcctgggctctgaagaatcacagaaacactttttatataaaataaaattatacctagcaacatattatagtaaaaaatgaggtgggagggctggatcttttcccccaccaaaaggctagaggtaaagctgtatccccctaaacttaggggagatactggagctgaccatcctgacctcctattaaagaaaatgagctgctg

SEQ ID NO: 370202 - DNA, 2076 bp, Homo sapiens
cgtggatcccgagaaagaggcgcaggacgaggaggcagaacccgactggcgcgtagagcagcagcacgagcagtaggaagcagtcacccggaagcctgggggcgagaggcgaagtggtcaggcgccgaaggccgagagcacgcggggatcggtctcttcccgccgggtctcttaccggtgcgagtcaaagagccgctccggccccggccctgagggaagctccataactgctgcttcaggagcgcccggccgtcgccgccgccgccattttcgcgcccggccgcaggggctcttgggaaggcggagtctttgggcatccgcccggggtgaggggacccgaagtcctgaggcgcgccggaagggctagcggtcccagcataccccgcggccccttgggccgtctcacaactcgcgtccggcggagaccacaattcccggcattcgtggggcagggaggagtcggcctcccggaatcctggtcccggcgtgcacttctgaaggacttcaggtaccggcgtgccccgcgtcctactgtccgcctgctcgcgtcctgggtgccgcctctgagtagggcgggcgaggaggcagccaaggcggagctgatggctgcgccgagggcggggcggggtgcaggctggagccttcgggcatggcgggctttggggggcattcgctgggggaggagaccccgtttgacccctgacctccgggccctgctgacgtcaggaacttctgacccccgggcccgagtgacttatgggacccccagtctctgggcccggttgtctgttggggtcactgaaccccgagcatgcctgacgtctgggaccccgggtccccgggcacaactgactgcggtgaccccagataccaggacccgggaggcctcagagaactctggaacccgttcgcgcgcgtggctggcggtggcgctgggcgctgggggggcagtgctgttgttgttgtggggcgggggtcggggtcctccggccgtcctcgccgccgtccctagcccgccgcccgcttctccccggagtcagtacaacttcatcgcagatgtggtggagaagacagcacctgccgtggtctatatcgagatcctggaccggcaccctttcttgggccgcgaggtccctatctcgaacggctcaggattcgtggtggctgccgatgggctcattgtcaccaacgcccatgtggtggctgatcggcgcagagtccgtgtgagactgctaagcggcgacacgtatgaggccgtggtcacagctgtggatcccgtggcagacatcgcaacgctgaggattcagactaaggagcctctccccacgctgcctctgggacgctcagctgatgtccggcaaggggagtttgttgttgccatgggaagtccctttgcactgcagaacacgatcacatccggcattgttagctctgctcagcgtccagccagagacctgggactcccccaaaccaatgtggaatacattcaaactgatgcagctattgattttggaaactctggaggtcccctggttaacctggatggggaggtgattggagtgaacaccatgaaggtcacagctggaatctcctttgccatcccttctgatcgtcttcgagagtttctgcatcgtggggaaaagaagaattcctcctccggaatcagtgggtcccagcggcgctacattggggtgatgatgctgaccctgagtcccagggctggtctgcggcctggtgatgtgattttggccattggggagcagatggtacaaaatgctgaagatgtttatgaagctgttcgaacccaatcccagttggcagtgcagatccggcggggacgagaaacactgaccttatatgtgacccctgaggtcacagaatgaatagatcaccaagagtatgaggctcctgctctgatttcctccttgcctttctggctgaggttctgagggcaccgagacagagggttaaatgaaccagtgggggcaggtccctccaaccaccagcactgactcctgggctctgaagaatcacagaaacactttttatataaaataaaattatacctagcaacat

SEQ ID NO: 370203 - DNA, 2405 bp, Homo sapiens
cgtggatcccgagaaagaggcgcaggacgaggaggcagaacccgactggcgcgtagagcagcagcacgagcagtaggaagcagtcacccggaagcctgggggcgagaggcgaagtggtcaggcgccgaaggccgagagcacgcggggatcggtctcttcccgccgggtctcttaccggtgcgagtcaaagagccgctccggccccggccctgagggaagctccataactgctgcttcaggagcgcccggccgtcgccgccgccgccattttcgcgcccggccgcaggggctcttgggaaggcggagtctttgggcatccgcccggggtgaggggacccgaagtcctgaggcgcgccggaagggctagcggtcccagcataccccgcggccccttgggccgtctcacaactcgcgtccggcggagaccacaattcccggcattcgtggggcagggaggagtcggcctcccggaatcctggtcccggcgtgcacttctgaaggacttcaggtaccggcgtgccccgcgtcctactgtccgcctgctcgcgtcctgggtgccgcctctgagtagggcgggcgaggaggcagccaaggcggagctgatggctgcgccgagggcggggcggggtgcaggctggagccttcgggcatggcgggctttggggggcattcgctgggggaggagaccccgtttgacccctgacctccgggccctgctgacgtcaggaacttctgacccccgggcccgagtgacttatgggacccccagtctctgggcccggttgtctgttggggtcactgaaccccgagcatgcctgacgtctgggaccccgggtccccgggcacaactgactgcggtgaccccagataccaggacccgggaggcctcagagaactctggaacccgttcgcgcgcgtggctggcggtggcgctgggcgctgggggggcagtgctgttgttgttgtggggcgggggtcggggtcctccggccgtcctcgccgccgtccctagcccgccgcccgcttctccccggagtcagtacaacttcatcgcagatgtggtggagaagacagcacctgccgtggtctatatcgagatcctggaccggcaccctttcttgggccgcgaggtccctatctcgaacggctcaggattcgtggtggctgccgatgggctcattgtcaccaacgcccatgtggtggctgatcggcgcagagtccgtgtgagactgctaagcggcgacacgtatgaggccgtggtcacagctgtggatcccgtggcagacatcgcaacgctgaggattcagactaaggagcctctccccacgctgcctctgggacgctcagctgatgtccggcaaggggagtttgttgttgccatgggaagtccctttgcactgcagaacacgatcacatccggcattgttagctctgctcagcgtccagccagagacctgggactcccccaaaccaatgtggaatacattcaaactgatgcagctattgatgtgcgtcctgataggagagaaatgacaaatgatgggggaggggggagaggctgtgtggtacaagcaccaactgatatatggtggatgagcctatatagagcttaggctgcaaaaatgtggccacttattcatgggctgagaaagaagagaatttggagaaagtacctacatcctggtatgcccccagacttagaatccccagatctctttcatgttttctccttgtcctacagtttggaaactctggaggtcccctggttaacctggatggggaggtgattggagtgaacaccatgaaggtcacagctggaatctcctttgccatcccttctgatcgtcttcgagagtttctgcatcgtggggaaaagaagaattcctcctccggaatcagtgggtcccagcggcgctacattggggtgatgatgctgaccctgagtcccagcatccttgctgaactacagcttcgagaaccaagctttcccgatgttcagcatggtgtactcatccataaagtcatcctgggctcccctgcacaccgggctggtctgcggcctggtgatgtgattttggccattggggagcagatggtacaaaatgctgaagatgtttatgaagctgttcgaacccaatcccagttggcagtgcagatccggcggggacgagaaacactgaccttatatgtgacccctgaggtcacagaatgaatagatcaccaagagtatgaggctcctgctctgatttcctccttgcctttctggctgaggttctgagggcaccgagacagagggttaaatgaaccagtgggggcaggtccctccaaccaccagcactgactcctgggctctgaagaatcacagaaacactttttatataaaataaaattatacctagcaacat

SEQ ID NO: 370204 - DNA, 2630 bp, Homo sapiens
cgtggatcccgagaaagaggcgcaggacgaggaggcagaacccgactggcgcgtagagcagcagcacgagcagtaggaagcagtcacccggaagcctgggggcgagaggcgaagtggtcaggcgccgaaggccgagagcacgcggggatcggtctcttcccgccgggtctcttaccggtgcgagtcaaagagccgctccggccccggccctgagggaagctccataactgctgcttcaggagcgcccggccgtcgccgccgccgccattttcgcgcccggccgcaggggctcttgggaaggcggagtctttgggcatccgcccggggtgaggggacccgaagtcctgaggcgcgccggaagggctagcggtcccagcataccccgcggccccttgggccgtctcacaactcgcgtccggcggagaccacaattcccggcattcgtggggcagggaggagtcggcctcccggaatcctggtcccggcgtgcacttctgaaggacttcaggtaccggcgtgccccgcgtcctactgtccgcctgctcgcgtcctgggtgccgcctctgagtagggcgggcgaggaggcagccaaggcggagctgatggctgcgccgagggcggggcggggtgcaggctggagccttcgggcatggcgggctttggggggcattcgctgggggaggagaccccgtttgacccctgacctccgggccctgctgacgtcaggaacttctgacccccgggcccgagtgacttatgggacccccagtctctgggcccggttgtctgttggggtcactgaaccccgagcatgcctgacgtctgggaccccgggtccccgggcacaactgactgcggtgaccccagataccaggacccgggaggcctcagagaactctggaacccgttcgcgcgcgtggctggcggtggcgctgggcgctgggggggcagtgctgttgttgttgtggggcgggggtcggggtcctccggccgtcctcgccgccgtccctagcccgccgcccgcttctccccggagtcagtacaacttcatcgcagatgtggtggagaagacagcacctgccgtggtctatatcgagatcctggaccggcaccctttcttgggccgcgaggtccctatctcgaacggctcaggattcgtggtggctgccgatgggctcattgtcaccaacgcccatgtggtggctgatcggcgcagagtccgtgtgagactgctaagcggcgacacgtatgaggccgtggtcacagctgtggatcccgtggcagacatcgcaacgctgaggattcagactaaggagcctctccccacgctgcctctgggacgctcagctgatgtccggcaaggggagtttgttgttgccatgggaagtccctttgcactgcagaacacgatcacatccggcattgttagctctgctcagcgtccagccagagacctgggactcccccaaaccaatgtggaatacattcaaactgatgcagctattgatgtgcgtcctgataggagagaaatgacaaatgatgggggaggggggagaggctgtgtggtacaagcaccaactgatatatggtggatgagcctatatagagcttaggctgcaaaaatgtggccacttattcatgggctgagaaagaagagaatttggagaaagtacctacatcctggtatgcccccagacttagaatccccagatctctttcatgttttctccttgtcctacagtttggaaactctggaggtcccctggttaacctggtgagtgagacatccttccttccaagaatccctgccccaggtcagtgtgggaagggtaggtttcccctaattcaaggatgtttggtcaagtttctgagcagttctttgttggctatctctcaatatccaaccagatctccccaacacttgctggtacttttgttcgggtgcccccatcccctactatttgtttaggctagggaactgggggctgtatccctgcaggatggggaggtgattggagtgaacaccatgaaggtcacagctggaatctcctttgccatcccttctgatcgtcttcgagagtttctgcatcgtggggaaaagaagaattcctcctccggaatcagtgggtcccagcggcgctacattggggtgatgatgctgaccctgagtcccagcatccttgctgaactacagcttcgagaaccaagctttcccgatgttcagcatggtgtactcatccataaagtcatcctgggctcccctgcacaccgggctggtctgcggcctggtgatgtgattttggccattggggagcagatggtacaaaatgctgaagatgtttatgaagctgttcgaacccaatcccagttggcagtgcagatccggcggggacgagaaacactgaccttatatgtgacccctgaggtcacagaatgaatagatcaccaagagtatgaggctcctgctctgatttcctccttgcctttctggctgaggttctgagggcaccgagacagagggttaaatgaaccagtgggggcaggtccctccaaccaccagcactgactcctgggctctgaagaatcacagaaacactttttatataaaataaaattatacctagcaacat

SEQ ID NO: 370205 - DNA, 1781 bp, Homo sapiens
cgtggatcccgagaaagaggcgcaggacgaggaggcagaacccgactggcgcgtagagcagcagcacgagcagtaggaagcagtcacccggaagcctgggggcgagaggcgaagtggtcaggcgccgaaggccgagagcacgcggggatcggtctcttcccgccgggtctcttaccggtgcgagtcaaagagccgctccggccccggccctgagggaagctccataactgctgcttcaggagcgcccggccgtcgccgccgccgccattttcgcgcccggccgcaggggctcttgggaaggcggagtctttgggcatccgcccggggtgaggggacccgaagtcctgaggcgcgccggaagggctagcggtcccagcataccccgcggccccttgggccgtctcacaactcgcgtccggcggagaccacaattcccggcattcgtggggcagggaggagtcggcctcccggaatcctggtcccggcgtgcacttctgaaggacttcaggtaccggcgtgccccgcgtcctactgtccgcctgctcgcgtcctgggtgccgcctctgagtagggcgggcgaggaggcagccaaggcggagctgatggctgcgccgtccctagcccgccgcccgcttctccccggagtcagtacaacttcatcgcagatgtggtggagaagacagcacctgccgtggtctatatcgagatcctggaccggcaccctttcttgggccgcgaggtccctatctcgaacggctcaggattcgtggtggctgccgatgggctcattgtcaccaacgcccatgtggtggctgatcggcgcagagtccgtgtgagactgctaagcggcgacacgtatgaggccgtggtcacagctgtggatcccgtggcagacatcgcaacgctgaggattcagactaaggagcctctccccacgctgcctctgggacgctcagctgatgtccggcaaggggagtttgttgttgccatgggaagtccctttgcactgcagaacacgatcacatccggcattgttagctctgctcagcgtccagccagagacctgggactcccccaaaccaatgtggaatacattcaaactgatgcagctattgattttggaaactctggaggtcccctggttaacctggatggggaggtgattggagtgaacaccatgaaggtcacagctggaatctcctttgccatcccttctgatcgtcttcgagagtttctgcatcgtggggaaaagaagaattcctcctccggaatcagtgggtcccagcggcgctacattggggtgatgatgctgaccctgagtcccagcatccttgctgaactacagcttcgagaaccaagctttcccgatgttcagcatggtgtactcatccataaagtcatcctgggctcccctgcacaccgggctggtctgcggcctggtgatgtgattttggccattggggagcagatggtacaaaatgctgaagatgtttatgaagctgttcgaacccaatcccagttggcagtgcagatccggcggggacgagaaacactgaccttatatgtgacccctgaggtcacagaatgaatagatcaccaagagtatgaggctcctgctctgatttcctccttgcctttctggctgaggttctgagggcaccgagacagagggttaaatgaaccagtgggggcaggtccctccaaccaccagcactgactcctgggctctgaagaatcacagaaacactttttatataaaataaaattatacctagcaacat

SEQ ID NO: 370206 - DNA, 1612 bp, Homo sapiens
cgtggatcccgagaaagaggcgcaggacgaggaggcagaacccgactggcgcgtagagcagcagcacgagcagtaggaagcagtcacccggaagcctgggggcgagaggcgaagtggtcaggcgccgaaggccgagagcacgcggggatcggtctcttcccgccgggtctcttaccggtgcgagtcaaagagccgctccggccccggccctgagggaagctccataactgctgcttcaggagcgcccggccgtcgccgccgccgccattttcgcgcccggccgcaggggctcttgggaaggcggagtctttgggcatccgcccggggtgaggggacccgaagtcctgaggcgcgccggaagggctagcggtcccagcataccccgcggccccttgggccgtctcacaactcgcgtccggcggagaccacaattcccggcattcgtggggcagggaggagtcggcctcccggaatcctggtcccggcgtgcacttctgaaggacttcaggcaccctttcttgggccgcgaggtccctatctcgaacggctcaggattcgtggtggctgccgatgggctcattgtcaccaacgcccatgtggtggctgatcggcgcagagtccgtgtgagactgctaagcggcgacacgtatgaggccgtggtcacagctgtggatcccgtggcagacatcgcaacgctgaggattcagactaaggagcctctccccacgctgcctctgggacgctcagctgatgtccggcaaggggagtttgttgttgccatgggaagtccctttgcactgcagaacacgatcacatccggcattgttagctctgctcagcgtccagccagagacctgggactcccccaaaccaatgtggaatacattcaaactgatgcagctattgattttggaaactctggaggtcccctggttaacctggtgagtgagacatccttccttccaagaatccctgccccaggatggggaggtgattggagtgaacaccatgaaggtcacagctggaatctcctttgccatcccttctgatcgtcttcgagagtttctgcatcgtggggaaaagaagaattcctcctccggaatcagtgggtcccagcggcgctacattggggtgatgatgctgaccctgagtcccagcatccttgctgaactacagcttcgagaaccaagctttcccgatgttcagcatggtgtactcatccataaagtcatcctgggctcccctgcacaccgggctggtctgcggcctggtgatgtgattttggccattggggagcagatggtacaaaatgctgaagatgtttatgaagctgttcgaacccaatcccagttggcagtgcagatccggcggggacgagaaacactgaccttatatgtgacccctgaggtcacagaatgaatagatcaccaagagtatgaggctcctgctctgatttcctccttgcctttctggctgaggttctgagggcaccgagacagagggttaaatgaaccagtgggggcaggtccctccaaccaccagcactgactcctgggctctgaagaatcacagaaacactttttatataaaataaaattatacctagcaacat

SEQ ID NO: 370207 - DNA, 300 bp, Homo sapiens
acaccatgaaggtcacagctggaatctcctttgccatcccttctgatcgtcttcgagagtttctgcatcgtggggaaaagaagagtgagcctgccttatggggaaacgggttcctttaatgtggtggaaataggggaagggcattcagtgggacttcctggagggtggtctactgggagaagagggcagggaaggaaggatgtagctgggtggggctcatttgtccctctgtcacagattcctcctccggaatcagtgggtcccagcggcgctacattggggtgatgatgctgaccctga

SEQ ID NO: 370208 - DNA, 234 bp, Homo sapiens
ggccaggtctggttggagctgcttatttgctcgcatcttcagatgacaggtctcttttacccattctcccttaggagcctctccccacgctgcctctgggacgctcagctgatgtccggcaaggggagtttgttgttgccatgggaagtccctttgcactgcagaacacgatcacatccggcattgttagctctgctcagcgtccagccagagacctgggactcccccaaacca

SEQ ID NO: 370209 - DNA, 2172 bp, Homo sapiens
cgtggatcccgagaaagaggcgcaggacgaggaggcagaacccgactggcgcgtagagcagcagcacgagcagtaggaagcagtcacccggaagcctgggggcgagaggcgaagtggtcaggcgccgaaggccgagagcacgcggggatcggtctcttcccgccgggtctcttaccggtgcgagtcaaagagccgctccggccccggccctgagggaagctccataactgctgcttcaggagcgcccggccgtcgccgccgccgccattttcgcgcccggccgcaggggctcttgggaaggcggagtctttgggcatccgcccggggtgaggggacccgaagtcctgaggcgcgccggaagggctagcggtcccagcataccccgcggccccttgggccgtctcacaactcgcgtccggcggagaccacaattcccggcattcgtggggcagggaggagtcggcctcccggaatcctggtcccggcgtgcacttctgaaggacttcaggtaccggcgtgccccgcgtcctactgtccgcctgctcgcgtcctgggtgccgcctctgagtagggcgggcgaggaggcagccaaggcggagctgatggctgcgccgagggcggggcggggtgcaggctggagccttcgggcatggcgggctttggggggcattcgctgggggaggagaccccgtttgacccctgacctccgggccctgctgacgtcaggaacttctgacccccgggcccgagtgacttatgggacccccagtctctgggcccggttgtctgttggggtcactgaaccccgagcatgcctgacgtctgggaccccgggtccccgggcacaactgactgcggtgaccccagataccaggacccgggaggcctcagagaactctggaacccgttcgcgcgcgtggctggcggtggcgctgggcgctgggggggcagtgctgttgttgttgtggggcgggggtcggggtcctccggccgtcctcgccgccgtccctagcccgccgcccgcttctccccggagtcagtacaacttcatcgcagatgtggtggagaagacagcacctgccgtggtctatatcgagatcctggaccggcaccctttcttgggccgcgaggtccctatctcgaacggctcaggattcgtggtggctgccgatgggctcattgtcaccaacgcccatgtggtggctgatcggcgcagagtccgtgtgagactgctaagcggcgacacgtatgaggccgtggtcacagctgtggatcccgtggcagacatcgcaacgctgaggattcagactaaggagcctctccccacgctgcctctgggacgctcagctgatgtccggcaaggggagtttgttgttgccatgggaagtccctttgcactgcagaacacgatcacatccggcattgttagctctgctcagcgtccagccagagacctgggactcccccaaaccaatgtggaatacattcaaactgatgcagctattgattttggaaactctggaggtcccctggttaacctggatggggaggtgattggagtgaacaccatgaaggtcacagctggaatctcctttgccatcccttctgatcgtcttcgagagtttctgcatcgtggggaaaagaagaattcctcctccggaatcagtgggtcccagcggcgctacattggggtgatgatgctgaccctgagtcccagcatccttgctgaactacagcttcgagaaccaagctttcccgatgttcagcatggtgtactcatccataaagtcatcctgggctcccctgcacaccgggctggtctgcggcctggtgatgtgattttggccattggggagcagatggtacaaaatgctgaagatgtttatgaagctgttcgaacccaatcccagttggcagtgcagatccggcggggacgagaaacactgaccttatatgtgacccctgaggtcacagaatgaatagatcaccaagagtatgaggctcctgctctgatttcctccttgcctttctggctgaggttctgagggcaccgagacagagggttaaatgaaccagtgggggcaggtccctccaaccaccagcactgactcctgggctctgaagaatcacagaaacactttttatataaaataaaattatacctagcaacat

SEQ ID NO: 370210 - DNA, 2342 bp, Homo sapiens
cgtggatcccgagaaagaggcgcaggacgaggaggcagaacccgactggcgcgtagagcagcagcacgagcagtaggaagcagtcacccggaagcctgggggcgagaggcgaagtggtcaggcgccgaaggccgagagcacgcggggatcggtctcttcccgccgggtctcttaccggtgcgagtcaaagagccgctccggccccggccctgagggaagctccataactgctgcttcaggagcgcccggccgtcgccgccgccgccattttcgcgcccggccgcaggggctcttgggaaggcggagtctttgggcatccgcccggggtgaggggacccgaagtcctgaggcgcgccggaagggctagcggtcccagcataccccgcggccccttgggccgtctcacaactcgcgtccggcggagaccacaattcccggcattcgtggggcagggaggagtcggcctcccggaatcctggtcccggcgtgcacttctgaaggacttcaggtaccggcgtgccccgcgtcctactgtccgcctgctcgcgtcctgggtgccgcctctgagtagggcgggcgaggaggcagccaaggcggagctgatggctgcgccgagggcggggcggggtgcaggctggagccttcgggcatggcgggctttggggggcattcgctgggggaggagaccccgtttgacccctgacctccgggccctgctgacgtcaggaacttctgacccccgggcccgagtgacttatgggacccccagtctctgggcccggttgtctgttggggtcactgaaccccgagcatgcctgacgtctgggaccccgggtccccgggcacaactgactgcggtgaccccagataccaggacccgggaggcctcagagaactctggaacccgttcgcgcgcgtggctggcggtggcgctgggcgctgggggggcagtgctgttgttgttgtggggcgggggtcggggtcctccggccgtcctcgccgccgtccctagcccgccgcccgcttctccccggagtcagtacaacttcatcgcagatgtggtggagaagacagcacctgccgtggtctatatcgagatcctggaccggcaccctttcttgggccgcgaggtccctatctcgaacggctcaggattcgtggtggctgccgatgggctcattgtcaccaacgcccatgtggtggctgatcggcgcagagtccgtgtgagactgctaagcggcgacacgtatgaggccgtggtcacagctgtggatcccgtggcagacatcgcaacgctgaggattcagactaaggagcctctccccacgctgcctctgggacgctcagctgatgtccggcaaggggagtttgttgttgccatgggaagtccctttgcactgcagaacacgatcacatccggcattgttagctctgctcagcgtccagccagagacctgggactcccccaaaccaatgtggaatacattcaaactgatgcagctattgattttggaaactctggaggtcccctggttaacctggatggggaggtgattggagtgaacaccatgaaggtcacagctggaatctcctttgccatcccttctgatcgtcttcgagagtttctgcatcgtggggaaaagaagaattcctcctccggaatcagtgggtcccagcggcgctacattggggtgatgatgctgaccctgagtcccagcatccttgctgaactacagcttcgagaaccaagctttcccgatgttcagcatggtgtactcatccataaagtcatcctgggctcccctgcacaccgggctggtctgcggcctggtgatgtgattttggccattggggagcagatggtacaaaatgctgaagatgtttatgaagctgttcgaacccaatcccagttggcagtgcagatccggcggggacgagaaacactgaccttatatgtgacccctgaggtcacagaatgaatagatcaccaagagtatgaggctcctgctctgatttcctccttgcctttctggctgaggttctgagggcaccgagacagagggttaaatgaaccagtgggggcaggtccctccaaccaccagcactgactcctgggctctgaagaatcacagaaacactttttatataaaataaaattatacctagcaacatattatagtaaaaaatgaggtgggagggctggatcttttcccccaccaaaaggctagaggtaaagctgtatccccctaaacttaggggagatactggagctgaccatcctgacctcctattaaagaaaatgagctgctgccatcttttgtgggcagttagtcaggtgctgc

SEQ ID NO: 370211 - DNA, 2106 bp, Homo sapiens
cgtggatcccgagaaagaggcgcaggacgaggaggcagaacccgactggcgcgtagagcagcagcacgagcagtaggaagcagtcacccggaagcctgggggcgagaggcgaagtggtcaggcgccgaaggccgagagcacgcggggatcggtctcttcccgccgggtctcttaccggtgcgagtcaaagagccgctccggccccggccctgagggaagctccataactgctgcttcaggagcgcccggccgtcgccgccgccgccattttcgcgcccggccgcaggggctcttgggaaggcggagtctttgggcatccgcccggggtgaggggacccgaagtcctgaggcgcgccggaagggctagcggtcccagcataccccgcggccccttgggccgtctcacaactcgcgtccggcggagaccacaattcccggcattcgtggggcagggaggagtcggcctcccggaatcctggtcccggcgtgcacttctgaaggacttcaggtaccggcgtgccccgcgtcctactgtccgcctgctcgcgtcctgggtgccgcctctgagtagggcgggcgaggaggcagccaaggcggagctgatggctgcgccgagggcggggcggggtgcaggctggagccttcgggcatggcgggctttggggggcattcgctgggggaggagaccccgtttgacccctgacctccgggccctgctgacgtcaggaacttctgacccccgggcccgagtgacttatgggacccccagtctctgggcccggttgtctgttggggtcactgaaccccgagcatgcctgacgtctgggaccccgggtccccgggcacaactgactgcggtgaccccagataccaggacccgggaggcctcagagaactctggaacccgttcgcgcgcgtggctggcggtggcgctgggcgctgggggggcagtgctgttgttgttgtggggcgggggtcggggtcctccggccgtcctcgccgccgtccctagcccgccgcccgcttctccccggagtcagtacaacttcatcgcagatgtggtggagaagacagcacctgccgtggtctatatcgagatcctggaccggcaccctttcttgggccgcgaggtccctatctcgaacggctcaggattcgtggtggctgccgatgggctcattgtcaccaacgcccatgtggtggctgatcggcgcagagtccgtgtgagactgctaagcggcgacacgtatgaggccgtggtcacagctgtggatcccgtggcagacatcgcaacgctgaggattcagactaaggagcctctccccacgctgcctctgggacgctcagctgatgtccggcaaggggagtttgttgttgccatgggaagtccctttgcactgcagaacacgatcacatccggcattgttagctctgctcagcgtccagccagagacctgggactcccccaaaccaatgtggaatacattcaaactgatgcagctattgattttggaaactctggaggtcccctggttaacctggctagggaactgggggctgtatccctgcaggatggggaggtgattggagtgaacaccatgaaggtcacagctggaatctcctttgccatcccttctgatcgtcttcgagagtttctgcatcgtggggaaaagaagaattcctcctccggaatcagtgggtcccagcggcgctacattggggtgatgatgctgaccctgagtcccagggctggtctgcggcctggtgatgtgattttggccattggggagcagatggtacaaaatgctgaagatgtttatgaagctgttcgaacccaatcccagttggcagtgcagatccggcggggacgagaaacactgaccttatatgtgacccctgaggtcacagaatgaatagatcaccaagagtatgaggctcctgctctgatttcctccttgcctttctggctgaggttctgagggcaccgagacagagggttaaatgaaccagtgggggcaggtccctccaaccaccagcactgactcctgggctctgaagaatcacagaaacactttttatataaaataaaattatacctagcaacat

SEQ ID NO: 370212 - DNA, 2288 bp, Homo sapiens
cgtggatcccgagaaagaggcgcaggacgaggaggcagaacccgactggcgcgtagagcagcagcacgagcagtaggaagcagtcacccggaagcctgggggcgagaggcgaagtggtcaggcgccgaaggccgagagcacgcggggatcggtctcttcccgccgggtctcttaccggtgcgagtcaaagagccgctccggccccggccctgagggaagctccataactgctgcttcaggagcgcccggccgtcgccgccgccgccattttcgcgcccggccgcaggggctcttgggaaggcggagtctttgggcatccgcccggggtgaggggacccgaagtcctgaggcgcgccggaagggctagcggtcccagcataccccgcggccccttgggccgtctcacaactcgcgtccggcggagaccacaattcccggcattcgtggggcagggaggagtcggcctcccggaatcctggtcccggcgtgcacttctgaaggacttcaggtaccggcgtgccccgcgtcctactgtccgcctgctcgcgtcctgggtgccgcctctgagtagggcgggcgaggaggcagccaaggcggagctgatggctgcgccgagggcggggcggggtgcaggctggagccttcgggcatggcgggctttggggggcattcgctgggggaggagaccccgtttgacccctgacctccgggccctgctgacgtcaggaacttctgacccccgggcccgagtgacttatgggacccccagtctctgggcccggttgtctgttggggtcactgaaccccgagcatgcctgacgtctgggaccccgggtccccgggcacaactgactgcggtgaccccagataccaggacccgggaggcctcagagaactctggaacccgttcgcgcgcgtggctggcggtggcgctgggcgctgggggggcagtgctgttgttgttgtggggcgggggtcggggtcctccggccgtcctcgccgccgtccctagcccgccgcccgcttctccccggagtcagtacaacttcatcgcagatgtggtggagaagacagcacctgccgtggtctatatcgagatcctggaccggcaccctttcttgggccgcgaggtccctatctcgaacggctcaggattcgtggtggctgccgatgggctcattgtcaccaacgcccatgtggtggctgatcggcgcagagtccgtgtgagactgctaagcggcgacacgtatgaggccgtggtcacagctgtggatcccgtggcagacatcgcaacgctgaggattcagactaaggagcctctccccacgctgcctctgggacgctcagctgatgtccggcaaggggagtttgttgttgccatgggaagtccctttgcactgcagaacacgatcacatccggcattgttagctctgctcagcgtccagccagagacctgggactcccccaaaccaatgtggaatacattcaaactgatgcagctattgattttggaaactctggaggtcccctggttaacctggatggggaggtgattggagtgaacaccatgaaggtcacagctggaatctcctttgccatcccttctgatcgtcttcgagagtttctgcatcgtggggaaaagaagaattcctcctccggaatcagtgggtcccagcggcgctacattggggtgatgatgctgaccctgagtcccagcatccttgctgaactacagcttcgagaaccaagctttcccgatgttcagcatggtgtactcatccataaagtcatcctgggctcccctgcacaccgggctggtctgcggcctggtgatgtgattttggccattggggagcagatggtacagatccggcggggacgagaaacactgaccttatatgtgacccctgaggtcacagaatgaatagatcaccaagagtatgaggctcctgctctgatttcctccttgcctttctggctgaggttctgagggcaccgagacagagggttaaatgaaccagtgggggcaggtccctccaaccaccagcactgactcctgggctctgaagaatcacagaaacactttttatataaaataaaattatacctagcaacatattatagtaaaaaatgaggtgggagggctggatcttttcccccaccaaaaggctagaggtaaagctgtatccccctaaacttaggggagatactggagctgaccatcctgacctcctattaaagaaaatgagctgctgccatcttttgtgggcagttagtcaggtgctgc

SEQ ID NO: 370213 - DNA, 1632 bp, Homo sapiens
cgtggatcccgagaaagaggcgcaggacgaggaggcagaacccgactggcgcgtagagcagcagcacgagcagtaggaagcagtcacccggaagcctgggggcgagaggcgaagtggtcaggcgccgaaggccgagagcacgcggggatcggtctcttcccgccgggtctcttaccggtgcgagtcaaagagccgctccggccccggccctgagggaagctccataactgctgcttcaggagcgcccggccgtcgccgccgccgccattttcgcgcccggccgcaggggctcttgggaaggcggagtctttgggcatccgcccggggtgaggggacccgaagtcctgaggcgcgccggaagggctagcggtcccagcataccccgcggccccttgggccgtctcacaactcgcgtccggcggagaccacaattcccggcattcgtggggcagggaggagtcggcctcccggaatcctggtcccggcgtgcacttctgaaggacttcagcatcgcagatgtggtggagaagacagcacctgccgtggtctatatcgagatcctggaccggcaccctttcttgggccgcgaggtccctatctcgaacggctcaggattcgtggtggctgccgatgggctcattgtcaccaacgcccatgtggtggctgatcggcgcagagtccgtgtgagactgctaagcggcgacacgtatgaggccgtggtcacagctgtggatcccgtggcagacatcgcaacgctgaggattcagactaaggagcctctccccacgctgcctctgggacgctcagctgatgtccggcaaggggagtttgttgttgccatgggaagtccctttgcactgcagaacacgatcacatccggcattgttagctctgctcagcgtccagccagagacctgggactcccccaaaccaatgtggaatacattcaaactgatgcagctattgattttggaaactctggaggtcccctggttaacctggatggggaggtgattggagtgaacaccatgaaggtcacagctggaatctcctttgccatcccttctgatcgtcttcgagagtttctgcatcgtggggaaaagaagaattcctcctccggaatcagtgggtcccagcggcgctacattggggtgatgatgctgaccctgagtcccagcatccttgctgaactacagcttcgagaaccaagctttcccgatgttcagcatggtgtactcatccataaagtcatcctgggctcccctgcacaccgggctggtctgcggcctggtgatgtgattttggccattggggagcagatggtacaaaatgctgaagatgtttatgaagctgttcgaacccaatcccagttggcagtgcagatccggcggggacgagaaacactgaccttatatgtgacccctgaggtcacagaatgaatagatcaccaagagtatgaggctcctgctctgatttcctccttgcctttctggctgaggttctgagggcaccgagacagagggttaaatgaaccagtgggggcaggtccctccaaccaccagcactgactcctgggctctgaagaatcacagaaacactttttatataaaataaaattatacctagcaacat

SEQ ID NO: 370214 - DNA, 1881 bp, Homo sapiens
cgtggatcccgagaaagaggcgcaggacgaggaggcagaacccgactggcgcgtagagcagcagcacgagcagtaggaagcagtcacccggaagcctgggggcgagaggcgaagtggtcaggcgccgaaggccgagagcacgcggggatcggtctcttcccgccgggtctcttaccggtgcgagtcaaagagccgctccggccccggccctgagggaagctccataactgctgcttcaggagcgcccggccgtcgccgccgccgccattttcgcgcccggccgcaggggctcttgggaaggcggagtctttgggcatccgcccggggtgaggggacccgaagtcctgaggcgcgccggaagggctagcggtcccagcataccccgcggccccttgggccgtctcacaactcgcgtccggcggagaccacaattcccggcattcgtggggcagggaggagtcggcctcccggaatcctggtcccggcgtgcacttctgaaggacttcaggtaccggcgtgccccgcgtcctactgtccgcctgctcgcgtcctgggtgccgcctctgagtagggcgggcgaggaggcagccaaggcggagctgatggctgcgccgagggcggggcggggtgcaggctggagccttcgggcatggcgggctttggggggcattcgctgggggaggagaccccgtttgacccctgacctccgggccctgctgacgtcaggaacttctgacccccgggcccgagtgacttatgggacccccagtctctgggcccggttgtctgttggggtcactgaaccccgagcatgcctgacgtctgggaccccgggtccccgggcacaactgactgcggtgaccccagataccaggacccgggaggcctcagagaactctggaacccgttcgcgcgcgtggctggcggtggcgctgggcgctgggggggcagtgctgttgttgttgtggggcgggggtcggggtcctccggccgtcctcgccgccgtccctagcccgccgcccgcttctccccggagtcagtacaacttcatcgcagatgtggtggagaagacagcacctgccgtggtctatatcgagatcctggaccggcaccctttcttgggccgcgaggtccctatctcgaacggctcaggattcgtggtggctgccgatgggctcattgtcaccaacgcccatgtggtggctgatcggcgcagagtccgtgtgagactgctaagcggcgacacgtatgaggccgtggtcacagctgtggatcccgtggcagacatcgcaacgctgaggattcagactaagtttggaaactctggaggtcccctggttaacctggatggggaggtgattggagtgaacaccatgaaggtcacagctggaatctcctttgccatcccttctgatcgtcttcgagagtttctgcatcgtggggaaaagaagaattcctcctccggaatcagtgggtcccagcggcgctacattggggtgatgatgctgaccctgagtcccagggctggtctgcggcctggtgatgtgattttggccattggggagcagatggtacaaaatgctgaagatgtttatgaagctgttcgaacccaatcccagttggcagtgcagatccggcggggacgagaaacactgaccttatatgtgacccctgaggtcacagaatgaatagatcaccaagagtatgaggctcctgctctgatttcctccttgcctttctggctgaggttctgagggcaccgagacagagggttaaatgaaccagtgggggcaggtccctccaaccaccagcactgactcctgggctctgaagaatcacagaaacactttttatataaaataaaattatacctagcaacat

SEQ ID NO: 370215 - DNA, 397 bp, Homo sapiens
tacaccttatgtaaacaagtgaaatgtatctgctataatttttcttttcagatgtgtgttaaaagagctagaaacattgggaaaggacttatatggggcaaaactgattgcacaaaaatgccaagttcgaaattgtcctcatttcaagaatgcagtgagtggatcagaatgtctgctttccatggttgaagagggaaatcctcatcattattttgtggcaacacagggaacaatggcaaaagcctttgatgaagcattttcctctgagacaacagcggcaatacctgaagaccatgaagcatctgctgagtccttttgttccatcttctttcttcctgatcttgatcgccccctgatgcatcttcatcctgaataaaaatgacccccaaaaagctga

SEQ ID NO: 370216 - DNA, 308 bp, Homo sapiens
cttgaaggtgaccctctgaattctagttgtcttgaccttgttggactcccagcttcatcccctcaactcaggaatactgtccagctctattttggtttctcctttcttcactgcaacctggaagttgtctctaggtgggaacaatggcaaaagcctttgatgaagcattttcctctgagacaacagcggcaatacctgaagaccatgaagcatctgctgagtccttttgttccatcttctttcttcctgatcttgatcgccccctgatgcatcttcatcctgaataaaaatgacccccaaaaagctga

SEQ ID NO: 370217 - DNA, 3795 bp, Homo sapiens
  misc_feature (3665)..(3665): n is a, c, g, or t
  misc_feature (3668)..(3668): n is a, c, g, or t
  misc_feature (3672)..(3673): n is a, c, g, or t
gcgcttcatttccgggtgaaactggcattgagggtactggggcgtgcgtgaggcgtttactgatgcttcctggtccggtggcctcggtcccggtaagccaggcatgaagatcacaaggcagaaacatgccaagaagcatcttggcttcttccgcaacaacttcggagtccgcgagccgtaccagatcctgctggacggcaccttctgtcaggcggcgctgcggggccgcatccagctgcgggagcagctgccccgctacctcatgggggagacgcagctgtgcaccacaagatgtgtgttaaaagagctagaaacattgggaaaggacttatatggggcaaaactgattgcacaaaaatgccaagttcgaaattgtcctcatttcaagaatgcagtgagtggatcagaatgtctgctttccatggttgaagagggaaatcctcatcattattttgtggcaacacaggatcagaatttgtctgtgaaagtaaaaaagaagcctggagttcctctcatgtttattattcagaacactatggttttggacaaaccttctcccaaaacaattgcctttgtaaaagcagtggagtcaggtcagcttgtctcagtgcatgagaaagaaagtatcaaacatctcaaagaggaacagggtttagtgaaaaacactgaacagagtagaagaaaaaagcgcaagaaaataagtggtcccaatcctcttagttgtttgaagaaaaagaaaaaggcaccggacacacaatcatctgcttctgaaaagaaaagaaaaagaaaaagaattcggaacagatctaacccaaaagtactttctgagaagcagaatgcagaaggagaatgaatcctttggatactttcaaggacattcaaatgtgaaaatgaattttttacaactagaagtatttataataaaagaccaaacttatttttgtaaatgaacccatatgctttagctaaaattaattataaaataaaaacagtgaccagtctagccagcatggcaaaaccccatctctactaaaatacaaaaattagctgggcatgatggtgcacagttgtaattccagctactcaggaggctgaggcatgagaatcgcttgaacctgggaggcagagattgcagtgagcccagttcgtgtcacttcactccagcctgggcaacagagtgagaacatgtctcaaaaaaaaaataaaaacagtgaatgggtgtaggtgtgatggaattcactttacttactaaatggtttcgggaggttgtttctccaggtaaaattgtcgcctctctggtcccattcccaccttcaaacattatatgcaaacagttttaaaaaatcttacagttctaaaaggcttgtgacaaaaaaagaggcagtccctctttcacattgacagaagaaacttcctctttcaattctagtagttgaagaatttatatttccaaattgtatgattataccgctactttttgatacatcaattatttattgacttcctactagaaagagtgaaattttgcccatttatactgcaccatttttccagtatatgaatattttactctttgtacatcagaaactcagtattttcattattatgactagagtttttttgtttgtttgtttgagttctacttgtccaataaggatgatgattttcttttagatgtaaatgttaacttcaatagcaagaattcaaaaataatattctctttgagattgactgtgaatgttattgaaaagtgtctaaattagtctgaggatcaatgagggtcaattcagttaggaattgaataatgaaacgtgtctctctgaattcccccggcaattgttttagtcatttatcaggccaaaattaaaatgtttttgtactacaagatggaagtataaaattattggacaagtgaaatcgtatcagtagttcctgactgacagcttctggagccacactagagcagtgattctcagtctaacattaggttatcatgatgacgtatgagtaaattcttaatggttaaatgtgagacagttcacatttattcccatagaaatgtcattctcatttgaattcagagatacttctttgctggaagttggaattatagctttacaccaaggagtgacacgtagactaatctggcaagccaaggtagtgtttggattgcaatgtcatgattctattttaaattcttgatggtagaaacatttttaataaggaaggtaaaaatactggaaaaaagtgaatagtgtaggttttgtgaggaaagttaacatttgtcaatgacaagcattaaggccacctaataaagtgtagacaaagtgataaatgaaatatacactgatgatactcatttcaatatgctaaaatacattaaatttaggtattactcttaatctatttctacttagtcagtgctatctgattacctgttaatagcatctgaactggagagctggaaaaatccacttttttatgaagcagtaattatagaagtactaaaaattacaatgtattagtaagtttaatattttgacagggcatggtggctcacacctgtaatcccagcactttgggaggccgaggctggcagatcacaaaattaagagatcaagaccatcctggccaacatggtgaaaccctgtctgtactaaaaatacaaaaattagctgggtgtggtggtgtgcgcctgtagtcccagctactcgggaggctgaggcaggagaatcgcttgaacccaggaggcggaggttgcagtgagccaagatcatgccactgcactccagcctggtgagagagtgaaaccccgtctcaaaaataaataaataaataagtttactattttaaaactggttaatcatttatgtattttgccagtaaaattactttaaaagatattttaacaaaagtctcatatccttgtacttcagtttttttgtgtgtgaatactatccctataccactacccctaaaacctcagaattatttgctttattttttcatacaacttggggaagggaaccatgggagtatgcacatgggatcataatccattctgtggtttggaaaaagaaaatgttaacctctgctttagagggtagctactagctttgttggggataaaagtgtaatacatgcacttttgaactctgaaagtttgccaatctgaaaaggggtgtttctgaagaccactatcttttacgaacacttaaaaataagtgtttgcagttgtgtatgggcacgatactgtattctttacatttttatggccctacagctacttcttatccctgcaagtatataaattaaaaccaagtcactttagaacagctttgaaactagagtttcaaaggtaaaaggatctcatgtttctgaatctgcgtaaagcaagatggctgtgatttgacaggtttaattgctagttttttataggtggatagaaatgaatagtttggagtctttaaaatgttttaaaaaatgtttgcttactatctatatatatgacattattcccaattagttttatatctccaagatatatatatgtatataggtatatacacatatgtatatatacatagtctatatattctatataagaatatattccaataagaatatattccatacgggaatatattagtcatgagttttgcggncantaannattttccaaaaaaaaagggggggctaaaacccaggccatacgtcccgttggaaagggccaagagataaagaagggtaaggaggaagaggctcgaacctgggagcccaacggaaaagacgcga

SEQ ID NO: 370218 - DNA, 1571 bp, Homo sapiens
aggaaagcacaccactccagtcaaaaccttggtaaaataaccagtttctccaattgtgccctgttacaaatgaaaacagatttttattgcacttatgcaaataactattgccgtaagttaagatactcactaataattttcaagttctggagaaatcaggtagagagaaacaattatgctccaaattttgtttataggagtatactttgcttaattgttaaaagctgtcaatagctccaaaaaaaaaaagtttccttgactctggaaagcggaggttgcagtgagccaagatcatgccactgcactccagcctggtgagagagtgaaaccccgtctcaaaaataaataaataaataagtttactattttaaaactggttaatcatttatgtattttgccagtaaaattactttaaaagatattttaacaaaagtctcatatccttgtacttcagtttttttgtgtgtgaatactatccctataccactacccctaaaacctcagaattatttgctttattttttcatacaacttggggaagggaaccatgggagtatgcacatgggatcataatccattctgtggtttggaaaaagaaaatgttaacctctgctttagagggtagctactagctttgttggggataaaagtgtaatacatgcacttttgaactctgaaagtttgccaatctgaaaaggggtgtttctgaagaccactatcttttacgaacacttaaaaataagtgtttgcagttgtgtatgggcacgatactgtattctttacatttttatggccctacagctacttcttatccctgcaagtatataaattaaaaccaagtcactttagaacagctttgaaactagagtttcaaaggtaaaaggatctcatgtttctgaatctgcgtaaagcaagatggctgtgatttgacaggtttaattgctagttttttataggtggatagaaatgaatagtttggagtctttaaaatgttttaaaaaatgtttgcttactatctatatatatgacattattcccaattagttttatatctccaagatatatatatgtatataggtatatacacatatgtatatatacatagtctatatattctatataagaatatattccaataagaatatattccatacgggaatatattagtcattgatgtattttgccggtaaaattaaaagatattttaacaaaaaaaaaaaaaaaaaaaaaaaaaaaaattgtgtgtggggcgcactgcgggcccgcgagaaaaagagtatttattacaaaacacttggcggtgtgggcgcgcgcgggggcgaccgccaagtgagtggttagtgtggaaccgttggccaacaaccgttgtctcccaaagagaaaaccggggccgaggaacaggctgcgcgggatttcctcccacaaattaagaaagcgccgcggggggacacccggaggcgttctggaacaaacttcccaaaggagaggtcggaagggcacacaccgggggcctataccaagaggatcccacgggagcagaatataaattagcgcgccgtggaggaccacga

SEQ ID NO: 370219 - DNA, 462 bp, Homo sapiens
gcgcttcatttccgggtgaaactggcattgagggtactggggcgtgcgtgaggcgtttactgatgcttcctggtccggtggcctcggtcccggtaagccaggcatgaagatcacaaggcagaaacatgccaagaagcatcttggcttcttccgcaacaacttcggagtccgcgagccgtaccagatcctgctggacggcaccttctgtcaggcggcgctgcggggccgcatccagctgcgggagcagctgccccgctacctcatgggggagacgcagctgtgcaccacaagggaacaatggcaaaagcctttgatgaagcattttcctctgagacaacagcggcaatacctgaagaccatgaagcatctgctgagtccttttgttccatcttctttcttcctgatcttgatcgccccctgatgcatcttcatcctgaataaaaatgacccccaaaaagctga

SEQ ID NO: 370220 - DNA, 967 bp, Homo sapiens
gcgcttcatttccgggtgaaactggcattgagggtactggggcgtgcgtgaggcgtttactgatgcttcctggtccggtggcctcggtcccggtaagccaggcatgaagatcacaaggcagaaacatgccaagaagcatcttggcttcttccgcaacaacttcggagtccgcgagccgtaccagatcctgctggacggcaccttctgtcaggcggcgctgcggggccgcatccagctgcgggagcagctgccccgctacctcatgggggagacgcagctgtgcaccacaagatgtgtgttaaaagagctagaaacattgggaaaggacttatatggggcaaaactgattgcacaaaaatgccaagttcgaaattgtcctcatttcaagaatgcagtgagtggatcagaatgtctgctttccatggttgaagagggaaatcctcatcattattttgtggcaacacaggatcagaatttgtctgtgaaagtaaaaaagaagcctggagttcctctcatgtttattattcagaacactatggttttggacaaaccttctcccaaaacaattgcctttgtaaaagcagtggagtcaggtcagcttgtctcagtgcatgagaaagaaagtatcaaacatctcaaagaggaacagggtttagtgaaaaacactgaacagagtagaagaaaaaagcgcaagaaaataagtggtcccaatcctcttagttgtttgaagaaaaagaaaaaggcaccggacacacaatcatctgcttctgaaaagaaaagaaaaagaaaaagaattcggaacagatctaacccaaaagtactttctgagaagcagaatgcagaaggagaatgaatcctttggatactttcaaggacattcaaatgtgaaaatgaattttttacaactagaagtatttataataaaagaccaaacttatttttgtaaatgaacccatatgctttagct

SEQ ID NO: 370221 - DNA, 4053 bp, Homo sapiens
gcgcttcatttccgggtgaaactggcattgagggtactggggcgtgcgtgaggcgtttactgatgcttcctggtccggtggcctcggtcccggtaagccaggcatgaagatcacaaggcagaaacatgccaagaagcatcttggcttcttccgcaacaacttcggagtccgcgagccgtaccagatcctgctggacggcaccttctgtcaggcggcgctgcggggccgcatccagctgcgggagcagctgccccgctacctcatgggggagacgcagctgtgcaccacaagatgtgtgttaaaagagctagaaacattgggaaaggacttatatggggcaaaactgattgcacaaaaatgccaagttcgaaattgtcctcatttcaagaatgcagtgagtggatcagaatgtctgctttccatggttgaagagggaaatcctcatcattattttgtggcaacacaggatcagaatttgtctgtgaaagtaaaaaagaagcctggagttcctctcatgtttattattcagaacactatggttttggacaaaccttctcccaaaacaattgcctttgtaaaagcagtggagtcaggtcagcttgtctcagtgcatgagaaagaaagtatcaaacatctcaaagaggaacagggtttagtgaaaaacactgaacagagtagaagaaaaaagcgcaagaaaataagtggtcccaatcctcttagttgtttgaagaaaaagaaaaaggcaccggacacacaatcatctgcttctgaaaagaaaagaaaaagaaaaagaattcggaacagatctaacccaaaagtactttctgagaagcagaatgcagaaggagaatgaatcctttggatactttcaaggacattcaaatgtgaaaatgaattttttacaactagaagtatttataataaaagaccaaacttatttttgtaaatgaacccatatgctttagctaaaattaattataaaataaaaacagtgaccagtctagccagcatggcaaaaccccatctctactaaaatacaaaaattagctgggcatgatggtgcacagttgtaattccagctactcaggaggctgaggcatgagaatcgcttgaacctgggaggcagagattgcagtgagcccagttcgtgtcacttcactccagcctgggcaacagagtgagaacatgtctcaaaaaaaaaataaaaacagtgaatgggtgtaggtgtgatggaattcactttacttactaaatggtttcgggaggttgtttctccaggtaaaattgtcgcctctctggtcccattcccaccttcaaacattatatgcaaacagttttaaaaaatcttacagttctaaaaggcttgtgacaaaaaaagaggcagtccctctttcacattgacagaagaaacttcctctttcaattctagtagttgaagaatttatatttccaaattgtatgattataccgctactttttgatacatcaattatttattgacttcctactagaaagagtgaaattttgcccatttatactgcaccatttttccagtatatgaatattttactctttgtacatcagaaactcagtattttcattattatgactagagtttttttgtttgtttgtttgagttctacttgtccaataaggatgatgattttcttttagatgtaaatgttaacttcaatagcaagaattcaaaaataatattctctttgagattgactgtgaatgttattgaaaagtgtctaaattagtctgaggatcaatgagggtcaattcagttaggaattgaataatgaaacgtgtctctctgaattcccccggcaattgttttagtcatttatcaggccaaaattaaaatgtttttgtactacaagatggaagtataaaattattggacaagtgaaatcgtatcagtagttcctgactgacagcttctggagccacactagagcagtgattctcagtctaacattaggttatcatgatgacgtatgagtaaattcttaatggttaaatgtgagacagttcacatttattcccatagaaatgtcattctcatttgaattcagagatacttctttgctggaagttggaattatagctttacaccaaggagtgacacgtagactaatctggcaagccaaggtagtgtttggattgcaatgtcatgattctattttaaattcttgatggtagaaacatttttaataaggaaggtaaaaatactggaaaaaagtgaatagtgtaggttttgtgaggaaagttaacatttgtcaatgacaagcattaaggccacctaataaagtgtagacaaagtgataaatgaaatatacactgatgatactcatttcaatatgctaaaatacattaaatttaggtattactcttaatctatttctacttagtcagtgctatctgattacctgttaatagcatctgaactggagagctggaaaaatccacttttttatgaagcagtaattatagaagtactaaaaattacaatgtattagtaagtttaatattttgacagggcatggtggctcacacctgtaatcccagcactttgggaggccgaggctggcagatcacaaaattaagagatcaagaccatcctggccaacatggtgaaaccctgtctgtactaaaaatacaaaaattagctgggtgtggtggtgtgcgcctgtagtcccagctactcgggaggctgaggcaggagaatcgcttgaacccaggaggcggaggttgcagtgagccaagatcatgccactgcactccagcctggtgagagagtgaaaccccgtctcaaaaataaataaataaataagtttactattttaaaactggttaatcatttatgtattttgccagtaaaattactttaaaagatattttaacaaaagtctcatatccttgtacttcagtttttttgtgtgtgaatactatccctataccactacccctaaaacctcagaattatttgctttattttttcatacaacttggggaagggaaccatgggagtatgcacatgggatcataatccattctgtggtttggaaaaagaaaatgttaacctctgctttagagggtagctactagctttgttggggataaaagtgtaatacatgcacttttgaactctgaaagtttgccaatctgaaaaggggtgtttctgaagaccactatcttttacgaacacttaaaaataagtgtttgcagttgtgtatgggcacgatactgtattctttacatttttatggccctacagctacttcttatccctgcaagtatataaattaaaaccaagtcactttagaacagctttgaaactagagtttcaaaggtaaaaggatctcatgtttctgaatctgcgtaaagcaagatggctgtgatttgacaggtttaattgctagttttttataggtggatagaaatgaatagtttggagtctttaaaatgttttaaaaaatgtttgcttactatctatatatatgacattattcccaattagttttatatctccaagatatatatatgtatataggtatatacacatatgtatatatacatagtctatatattctatataagaatatattccaataagaatatattccatacgggaatatattagtcattgatgtattttgccggtaaaattaaaagatattttaacaaaaaaaaaaaaaaaaaaaaaaaaaaaaattgtgtgtggggcgcactgcgggcccgcgagaaaaagagtatttattacaaaacacttggcggtgtgggcgcgcgcgggggcgaccgccaagtgagtggttagtgtggaaccgttggccaacaaccgttgtctcccaaagagaaaaccggggccgaggaacaggctgcgcgggatttcctcccacaaattaagaaagcgccgcggggggacacccggaggcgttctggaacaaacttcccaaaggagaggtcggaagggcacacaccgggggcctataccaagaggatcccacgggagcagaatataaattagcgcgccgtggaggaccacga

SEQ ID NO: 370222 - DNA, 564 bp, Homo sapiens
cagtccagaaaggcattcagaagatttgagccttaaattattccaagatacagaaggcagacttgctttgctgaattgacattttaatcagtatttccttatttattttttaacaaggcaactatattatttataatatcctgccaaacatgaatgcatgcctttcacctgtgtaaggggctcaaggatggattcttggctgaagaattcctctggaaatatttcccaggccaaaggtgggaaaataggctgccagtaattggaagttttatgaagtatgcattaagattttatttattaatagtctcaagatttagccttatctttccaattttctttgataggtaaaatcagtagcctttctgctaccctttagggtgttaaagcagtgagttgtgttgggggttatttttcaacccagggtccatgttttttcacccacatgatttttaattacttcacttccagttaaagaatggtatgaaagtactgtttatatgtcttgttaaaataaaaacttagacaaattaaatttaacagagtttaattgagccaggaaaaaaa

SEQ ID NO: 370223 - DNA, 801 bp, Homo sapiens
cctttaaacttgagaaaagtaaggtttagctggtaaatccagtcttagtgacctctcatggagtgcatgattcactactattacaagctaagactatgaggcttagtgaccattacatctaattacttaccgtcatcaagttcacccttccatttttttaaaggtctggtgaataatcaaggttttaatacaagatgacccttttgaaaacccagaagtcttacatgcatgctttatgaatataaggtaaaaagttttactccttagcaggcggcctacaggaaatcaaatcaccattcatttagaagcaagatgatctctcatttaaacatgtacttctgtcctttttccaccatctttccatgccaccataatggtgctcatgattggtcctggctgatgctctcaagagcaataacaatgctaaaaagagaggcaaacatcaggttcttatggggccgtgctccagagccatcatctggtttctcactgtgatgatgaagcgtggttacactggcaaatttgaaatcattgatgattacacagctgggaaaagagctgcgaatccctcaggcaggttaaacatgtgtggcatgattagcctcaacttcgatgtacaactcaaagacctagaaaaatggcaaaacagtctgctcttctccagtcagtttagttgtattgacaacctcagctggcatcatggaccacaaaggagcaagatgaaagtgcacagtagggaaaatcctggggattatttttctagggatgtaatgcttacaaataaaatgctcaatagacaat

SEQ ID NO: 370224 - DNA, 1668 bp, Homo sapiens
agtgatccgggagctcagagtgtagttttgctaaaatagccttctcattggctgcggctttggaggtggcagaaatcatacgtttaatcacggcgccctcctgcttgccaagctttgcgtcctccagaattgtcctgtgagtgactcccgcaggatggagacttttgtgtctggcttccttcacttcgcagcaggcttcgcgggacccgtgtggtggcaccagcgtccagcccttggtactgctgagttgtaggttgtgggacaggtggaggtaccacagttgctcacgggttcacctgtggatgggcatgtgggctgttgtgagtgaagccacttcagacgtttgcgtgcaggtttggtggggacgtgcagtttcatttcttttgagagtgggattgctggagcctatgttaagggtacgttcaactcatcagctcaactgtcttccaaatggcagccccgttttccacccccgccagcaacgcccgcgactccaggcgcgctgcattttcatcagcacctggcagtggtgattcataatgctttaaatgttaatttccctcatgactagtgatgttaaacatcttattaaacatcttaggtattaattcatgtgttatttcaaatcttttacctactttttagtggattatatttgtcttcttagtattgagttctaagagttaaatattgtgggtacaagtcctctatcagaaatgtgttttgtaaatactttcttctagtctgtggtttgtctcttcgttttcttaagtatgtctttaaagagcagaggcttttgatttggataaagttcagcttgtcagttttttcttttagggttatgtttttgtatcctatctaagaatctttgactatcaaattctcacaaagcagttttttgttttcttctagatgttttacggttttaaattttacctttaggtctacaaccattgtgatttagattttgtatttaatgtaaggtataagttgagattcatttctctctgtttttggagacttatgtccagctattccagaaccatttgttggaaagagtatctttatcccaacaagttatgtgggcactttgttgaaaaagatctattgaccatatatacatgcgtttatttccaagactctattttgttctgttgaccgacttgtttgtccttatgacaatatcacactgttttgattacagtggcattattgtacctcttgcaaaaatcaagtgtgaatcttccaaagaagatttggaagattttctctttcaaagttgtgtgagttatttaagtgccttttcattttcatataagtttagaattagcttgcagtttctaaaagaaaaaaaaaaaaaggctgatgagactttgattgtgattccattggatctatagctcagtttgcagggatttacatcttaacaatactgagtcctcaaatccatgaacatggtacatctctccatttatttaggtcttcttgtattttttctcatcaacatcttatagttttaagtaaacaaattttgcacatattttgtaagatttatcattaagtatttcatgtttgtgatgttatggtgaatattgtttttaaattcaatttcctattgtccactgctagtatacggaaatacaattggttttcatacattaaccttat

SEQ ID NO: 370225 - DNA, 2033 bp, Homo sapiens
ttctgcccgcctcaaagtgccggagactccggacctctgcgttcctccttcccggtaggaacagaaagctgggaaagggctggggtggcaaggaagagccccaggaagacgggagtggctctccccactccctagaggacctccctcccccaagcccatgggccgccttctccagggactcttccctgtcccacccaccgggcaaggtgggcccagcagggtctccttttcaccgtgcgccccctcctgtggccgggtcctgggctaatgacctcacatgctgcttttacaagtcaggtttattgcggtatcacgtacacacataaggctcacccgttttcgatgtacagccgacgacttggtaagggtctagagtggggcacttctgccccgacagaggcagcccacattttgcccctctgcagtcaggccccttcccggcccccaaccaccacctgtctctcctcgctcctacagctttgcgtcctccagaattgtcctgtgagtgactcccgcaggatggagacttttgtgtctggcttccttcacttcgcagcaggcttcgcgggacccgtgtggtggcaccagcgtccagcccttggtactgctgagttgtaggttgtgggacaggtggaggtaccacagttgctcacgggttcacctgtggatgggcatgtgggctgttgtgagtgaagccacttcagacgtttgcgtgcaggtttggtggggacgtgcagtttcatttcttttgagagtgggattgctggagcctatgttaagggtacgttcaactcatcagctcaactgtcttccaaatggcagccccgttttccacccccgccagcaacgcccgcgactccaggcgcgctgcattttcatcagcacctggcagtggtgattcataatgctttaaatgttaatttccctcatgactagtgatgttaaacatcttattaaacatcttaggtattaattcatgtgttatttcaaatcttttacctactttttagtggattatatttgtcttcttagtattgagttctaagagttaaatattgtgggtacaagtcctctatcagaaatgtgttttgtaaatactttcttctagtctgtggtttgtctcttcgttttcttaagtatgtctttaaagagcagaggcttttgatttggataaagttcagcttgtcagttttttcttttagggttatgtttttgtatcctatctaagaatctttgactatcaaattctcacaaagcagttttttgttttcttctagatgttttacggttttaaattttacctttaggtctacaaccattgtgatttagattttgtatttaatgtaaggtataagttgagattcatttctctctgtttttggagacttatgtccagctattccagaaccatttgttggaaagagtatctttatcccaacaagttatgtgggcactttgttgaaaaagatctattgaccatatatacatgcgtttatttccaagactctattttgttctgttgaccgacttgtttgtccttatgacaatatcacactgttttgattacagtggcattattgtacctcttgcaaaaatcaagtgtgaatcttccaaagaagatttggaagattttctctttcaaagttgtgtgagttatttaagtgccttttcattttcatataagtttagaattagcttgcagtttctaaaagaaaaaaaaaaaaaggctgatgagactttgattgtgattccattggatctatagctcagtttgcagggatttacatcttaacaatactgagtcctcaaatccatgaacatggtacatctctccatttatttaggtcttcttgtattttttctcatcaacatcttatagttttaagtaaacaaattttgcacatattttgtaagatttatcattaagtatttcatgtttgtgatgttatggtgaatattgtttttaaattcaatttcctattgtccactgctagtatacggaaatacaattggttttcatacattaaccttat

SEQ ID NO: 370226 - DNA, 262 bp, Homo sapiens
aaatagttttaggcctgaatcttgaggctgggaccttgaatctgctgattatatgctcctcttaatgcatctctatttctaagtaacttggttttatagcaaagtaatatatgaatgcagtttctaaaacttaagtggtgctaaagatgttttaaaaagaaaaagaagcaggagccaggcatactggttcacgcctgtaattccagcagcttgggagactgagccagaaggatcatttgaggacaggagtttgagaccagcc

SEQ ID NO: 370227 - DNA, 146 bp, Homo sapiens
caaatcttaggaggctccagaatatagaagactacatgaacgtgtatctatatttactgtctaatgtttccacaaaagcagggaaaaaatcatgaaaatggtagtgggttaaataagacctctaaattgcacacttatttccataa

SEQ ID NO: 370228 - DNA, 662 bp, Homo sapiens
aagtttttaagcatggtatctagacaaggcaactcacatgacaataagacacaaaactttctcactcaagatagcaggtttggtttggtttgatttttaactcaagtttgatagtgtgaccaacatcatgttaggccttgtgagagacagaagttgggaagaaacaccccccacccccctccacacacacacggacacacacggtccctgccctcaaggacttccagtctagtaagtaagtggcaacagctacagtacaatccaggtcagcgaaaaatggagcctaaaacagagcaaagaaagacgcagggtacgattttatgaaggctctgagttggtggctgactctggcgtcaccatagacaccacaatgcgtggaggccgacttggcgttttctgcttctctcaagaaaacatcatctggtccaacctcaagtatcgctgcaatgacaccatccctgaggacttccaagagtttcaaacccagaatttcgaccgcttcgataattaaaccaaggaagcaatctgtaactgcttttcggaacactaaaaccatatatattttaacttcaattttctttagcttttaccaacccaaatatatcaaaacgttttatgtgaatgtggcaataaaggagaagagatcatttttaaaaaaaaaa

SEQ ID NO: 370229 - DNA, 3227 bp, Homo sapiens
agcagccagctccccagcaccgcgcggcggggacgcgagcgcgcccccgacggcagcccggacgccgagcacgggtcacctgcggcgccggcccgggcgccgaccgaggttcaacgcacggcccggggacccccaggcggggccaacgccgccgtcgcccccggcctcgcggggagcaggaagagccaacatgctggccccgcgcggagccgccgtcctcctgctgcacctggtcctgcagcggtggctagcggcaggcgcccaggccaccccccaggtctttgaccttctcccatcttccagtcagaggctaaacccaggcgctctgctgccagtcctgacagaccccgccctgaatgatctctatgtgatttccaccttcaagctgcagactaaaagttcagccaccatcttcggtctttactcttcaactgacaacagtaaatattttgaatttactgtgatgggacgcttaaacaaagccatcctccgttacctgaagaacgatgggaaggtgcatttggtggttttcaacaacctgcagctggcagacggaaggcggcacaggatcctcctgaggctgagcaatttgcagcgaggggccggctccctagagctctacctggactgcatccaggtggattccgttcacaatctccccagggcctttgctggcccctcccagaaacctgagaccattgaattgaggactttccagaggaagccacaggacttcttggaagagctgaagctggtggtgagaggctcactgttccaggtggccagcctgcaagactgcttcctgcagcagagtgagccactggctgccacaggcacaggggactttaaccggcagttcttgggtcaaatgacacaattaaaccaactcctgggagaggtgaaggaccttctgagacagcaggttaaggaaacatcatttttgcgaaacaccatagctgaatgccaggcttgcggtcctctcaagtttcagtctccgaccccaagcacggtggtcgccccggctccccctgcaccgccaacacgcccacctcgtcggtgtgactccaacccatgtttccgaggtgtccaatgtaccgacagtagagatggcttccagtgtgggccctgccccgagggctacacaggaaacgggatcacctgtattgatgttgatgagtgcaaataccatccctgctacccgggcgtgcactgcataaatttgtctcctggcttcagatgtgacgcctgcccagtgggcttcacagggcccatggtgcagggtgttgggatcagttttgccaagtcaaacaagcaggtctgcactgacattgatgagtgtcgaaatggagcgtgcgttcccaactcgatctgcgttaatactttgggatcttaccgctgtgggccttgtaagccggggtatactggtgatcagataaggggatgcaaagcggaaagaaactgcagaaacccagagctgaacccttgcagtgtgaatgcccagtgcattgaagagaggcagggggatgtgacatgtgtgtgtggagtcggttgggctggagatggctatatctgtggaaaggatgtggacatcgacagttaccccgacgaagaactgccatgctctgccaggaactgtaaaaaggacaactgcaaatatgtgccaaattctggccaagaagatgcagacagagatggcattggcgacgcttgtgacgaggatgctgacggagatgggatcctgaatgagcaggataactgtgtcctgattcataatgtggaccaaaggaacagcgataaagatatctttggggatgcctgtgataactgcctgagtgtcttaaataacgaccagaaagacaccgatggggatggaagaggagatgcctgtgatgatgacatggatggagatggaataaaaaacattctggacaactgcccaaaatttcccaatcgtgaccaacgggacaaggatggtgatggtgtgggggatgcctgtgacagttgtcctgatgtcagcaaccctaaccagtctgatgtggataatgatctggttggggactcctgtgacaccaatcaggacagtgatggagatgggcaccaggacagcacagacaactgccccaccgtcattaacagtgcccagctggacaccgataaggatggaattggtgacgagtgtgatgatgatgatgacaatgatggtatcccagacctggtgccccctggaccagacaactgccggctggtccccaacccagcccaggaggatagcaacagcgacggagtgggagacatctgtgagtctgactttgaccaggaccaggtcatcgatcggatcgacgtctgcccagagaacgcagaggtcaccctgaccgacttcagggcttaccagaccgtggtcctggatcctgaaggggatgcccagatcgatcccaactgggtggtcctgaaccagggcatggagattgtacagaccatgaacagtgatcctggcctggcagtggggtacacagcttttaatggagttgacttcgaagggaccttccatgtgaatacccagacagatgatgactatgcaggctttatctttggctaccaagatagctccagcttctacgtggtcatgtggaagcagacggagcagacatattggcaagccaccccattccgagcagttgcagaacctggcattcagctcaaggctgtgaagtctaagacaggtccaggggagcatctccggaactccctgtggcacacgggggacaccagtgaccaggtcaggctgctgtggaaggactccaggaatgtgggctggaaggacaaggtgtcctaccgctggttcctacagcacaggccccaggtgggctacatcagggtacgattttatgaaggctctgagttggtggctgactctggcgtcaccatagacaccacaatgcgtggaggccgacttggcgttttctgcttctctcaagaaaacatcatctggtccaacctcaagtatcgctgcaatgacaccatccctgaggacttccaagagtttcaaacccagaatttcgaccgcttcgataattaaaccaaggaagcaatctgtaactgcttttcggaacactaaaaccatatatattttaacttcaattttctttagcttttaccaacccaaatatatcaaaacgttttatgtgaatgtggcaataaaggagaagagatcatttttaaaaaaaaaa

SEQ ID NO: 370230 - DNA, 270 bp, Homo sapiens
  misc_feature (25)..(25): n is a, c, g, or t
  misc_feature (31)..(31): n is a, c, g, or t
aacgtggccgagcctgcgaaagganatcatntgctcaaccttagtatcgctgcaatgacaccatccctgaggacttccaagagtttcaaacccagaatttcgaccgcttcgataattaaaccaaggaagcaatctgtaactgcttttcggaacactaaaaccatatatattttaacttcaattttctttagcttttaccaacccaaatatatcaaaacgttttatgtgaatgtggcaataaaggagaagagatcatttttaaaaaaaaaa

SEQ ID NO: 370231 - DNA, 740 bp, Homo sapiens
ctgtgtgggacgtgcctgctttgccttcgccttccaccatgatctctttgaccttctcccatcttccagtcagaggctaaacccaggcgctctgctgccagtcctgacagaccccgccctgaatgatctctatgtgatttccaccttcaagctgcagactaaaagttcagccaccatcttcggtctttactcttcaactgacaacagtaaatattttgaatttactgtgatgggacgcttaaacaaagccatcctccgttacctgaagaacgatgggaaggtgcatttggtggttttcaacaacctgcagctggcagacggaaggcggcacaggatcctcctgaggctgagcaatttgcagcgaggggccggctccctagagctctacctggactgcatccaggtggattccgttcacaatctccccagggcctttgctggcccctcccagaaacctgagaccattgaattgaggactttccagaggaagccacaggacttcttggaagagctgaagctggtggtgagaggctcactgttccaggtggccagcctgcaagactgcttcctgcagcagagtgagccactggctgccacaggcacaggggactttaaccggcagttcttgggtcaaatgacacaattaaaccaactcctgggagaggtgaaggaccttctgagacagcaggttaggacacatcattttgcgaaaaaccatagtgaatgcagggttgcggctc

SEQ ID NO: 370232 - DNA, 1948 bp, Homo sapiens
agcagccagctccccagcaccgcgcggcggggacgcgagcgcgcccccgacggcagcccggacgccgagcacgggtcacctgcggcgccggcccgggcgccgaccgaggttcaacgcacggcccggggacccccaggcggggccaacgccgccgtcgcccccggcctcgcggggagcaggaagagccaacatgctggccccgcgcggagccgccgtcctcctgctgcacctggtcctgcagcggtggctagcggcaggcgcccaggccaccccccaggtctttgaccttctcccatcttccagtcagaggctaaacccaggcgctctgctgccagtcctgacagaccccgccctgaatgatctctatgtgatttccaccttcaagctgcagactaaaagttcagccaccatcttcggtctttactcttcaactgacaacagtaaatattttgaatttactgtgatgggacgcttaaacaaagccatcctccgttacctgaagaacgatgggaaggtgcatttggtggttttcaacaacctgcagctggcagacggaaggcggcacaggatcctcctgaggctgagcaatttgcagcgaggggccggctccctagagctctacctggactgcatccaggtggattccgttcacaatctccccagggcctttgctggcccctcccagaaacctgagaccattgaattgaggactttccagaggaagccacaggacttcttggaagagctgaagctggtggtgagaggctcactgttccaggtggccagcctgcaagactgcttcctgcagcagagtgagccactggctgccacaggcacaggggactttaaccggcagttcttgggtcaaatgacacaattaaaccaactcctgggagaggtgaaggaccttctgagacagcaggttaaggaaacatcatttttgcgaaacaccatagctgaatgccaggcttgcggtcctctcaagtttcagtctccgaccccaagcacggtggtcgccccggctccccctgcaccgccaacacgcccacctcgtcggtgtgactccaacccatgtttccgaggtgtccaatgtaccgacagtagagatggcttccagtgtgggccctgccccgagggctacacaggaaacgggatcacctgtattgatgttgatgagtgcaaataccatccctgctacccgggcgtgcactgcataaatttgtctcctggcttcagatgtgacgcctgcccagtgggcttcacagggcccatggtgcagggtgttgggatcagttttgccaagtcaaacaagcaggtctgcactgacattgatgagtgtcgaaatggagcgtgcgttcccaactcgatctgcgttaatactttgggatcttaccgctgtgggccttgtaagccggggtatactggtgatcagataaggggatgcaaagcggaaagaaactgcagaaacccagagctgaacccttgcagtgtgaatgcccagtgcattgaagagaggcagggggatgtgacatgtgtgtgtggagtcggttgggctggagatggctatatctgtggaaaggatgtggacatcgacagttaccccgacgaagaactgccatgctctgccaggaactgtaaaaaggacaactgcaaatatgtgccaaattctggccaagaagatgcagacagagatggcattggcgacgcttgtgacgaggatgctgacggagatgggatcctgaatgagcaggataactgtgtcctgattcataatgtggaccaaaggaacagcgataaagatatctttggggatgcctgtgataactgcctgagtgtcttaaataacgaccagaaagacaccgatggggatggaagaggagatgcctgtgatgatgacatggatggagatgggttgtacctcacgccacgggatcctctagattcatcc

SEQ ID NO: 370233 - DNA, 516 bp, Homo sapiens
aattggggttaacaccttatttattattatctaaattccataaacaaattacagacaattcttaagaggctcctgccacaaaataactcctttaccatgtaggaaaagagcctttcgttttctcagctgtcttggtgacaatgccagcattttcctaggctactggctacttacatattcactttagtcaaaaagatagggctggcaggctttaggaaaaaatgtgatcctacaaaattatgtaagatgtcagagggtccaagtatacaggactacttgattatgaaaattgcgtgagtaggcaagcacattggcttttgaacagtgtcagcaatctgtggtatgaatgtgatttcttccaggacttcttggaagagctgaagctggtggtgagaggctcactgttccaggtggccagcctgcaagactgcttcctgcagcagagtgagccactggctgccacaggcacaggtgtgggctcttgggcagtttgcatgccttcatcaacacaaactc

SEQ ID NO: 370234 - DNA, 535 bp, Homo sapiens
caacgggacaaggatggtgatggtgtgggggatgcctgtgacagttgtcctgatgtcagcaaccctaaccaggttagtaggatactggggaattcaaactccaggctgaattcctctatgcaaagactcatttaagacgggtgtctagaaaaacagcagagcctcttagctgttgccacttacctaacaaagcagaggtggaaaaatgacacactgtgggcctgaagatggtgggatgaacaccacacaagatctgaagccctagggactatctcccaggctgtcgattgcctgtgaggttagtaacacgaacttcatgatgctcaatacaagtatttttcctgcagaaaggaaaacggagcatggaaattaaccattgggagccttgtgtccctttagtccctaaacccctacacagcctatgtatggacatttcagattaagttcagccagggatgtgttgcatctcccttctcactcctcctccctgtctggataattgggtatgatgtgtcatttatttttaaagccctga

SEQ ID NO: 370235 - DNA, 2528 bp, Homo sapiens
agcagccagctccccagcaccgcgcggcggggacgcgagcgcgcccccgacggcagcccggacgccgagcacgggtcacctgcggcgccggcccgggcgccgaccgaggttcaacgcacggcccggggacccccaggcggggccaacgccgccgtcgcccccggcctcgcggggagcaggaagagccaacatgctggccccgcgcggagccgccgtcctcctgctgcacctggtcctgcagcggtggctagcggcaggcgcccaggccaccccccaggtctttgaccttctcccatcttccagtcagaggctaaacccaggcgctctgctgccagtcctgacagaccccgccctgaatgatctctatgtgatttccaccttcaagctgcagactaaaagttcagccaccatcttcggtctttactcttcaactgacaacagtaaatattttgaatttactgtgatgggacgcttaaacaaagccatcctccgttacctgaagaacgatgggaaggtgcatttggtggttttcaacaacctgcagctggcagacggaaggcggcacaggatcctcctgaggctgagcaatttgcagcgaggggccggctccctagagctctacctggactgcatccaggtggattccgttcacaatctccccagggcctttgctggcccctcccagaaacctgagaccattgaattgaggactttccagaggaagccacaggacttcttggaagagctgaagctggtggtgagaggctcactgttccaggtggccagcctgcaagactgcttcctgcagcagagtgagccactggctgccacaggcacaggggactttaaccggcagttcttgggtcaaatgacacaattaaaccaactcctgggagaggtgaaggaccttctgagacagcaggttaaggaaacatcatttttgcgaaacaccatagctgaatgccaggcttgcggtcctctcaagtttcagtctccgaccccaagcacggtggtcgccccggctccccctgcaccgccaacacgcccacctcgtcggtgtgactccaacccatgtttccgaggtgtccaatgtaccgacagtagagatggcttccagtgtgggccctgccccgagggctacacaggaaacgggatcacctgtattgatgttgatgagtgcaaataccatccctgctacccgggcgtgcactgcataaatttgtctcctggcttcagatgtgacgcctgcccagtgggcttcacagggcccatggtgcagggtgttgggatcagttttgccaagtcaaacaagcaggtctgcactgacattgatgagtgtcgaaatggagcgtgcgttcccaactcgatctgcgttaatactttgggatcttaccgctgtgggccttgtaagccggggtatactggtgatcagataaggggatgcaaagcggaaagaaactgcagaaacccagagctgaacccttgcagtgtgaatgcccagtgcattgaagagaggcagggggatgtgacatgtgtgtgtggagtcggttgggctggagatggctatatctgtggaaaggatgtggacatcgacagttaccccgacgaagaactgccatgctctgccaggaactgtaaaaaggacaactgcaaatatgtgccaaattctggccaagaagatgcagacagagatggcattggcgacgcttgtgacgaggatgctgacggagatgggatcctgaatgagcaggataactgtgtcctgattcataatgtggaccaaaggaacagcgataaagatatctttggggatgcctgtgataactgcctgagtgtcttaaataacgaccagaaagacaccgatggggatggaagaggagatgcctgtgatgatgacatggatggagatggaataaaaaacattctggacaactgcccaaaatttcccaatcgtgaccaacgggacaaggatggtgatggtgtgggggatgcctgtgacagttgtcctgatgtcagcaaccctaaccagtctgatgtggataatgatctggttggggactcctgtgacaccaatcaggacaggctgctgtggaaggactccaggaatgtgggctggaaggacaaggtgtcctaccgctggttcctacagcacaggccccaggtgggctacatcagggtacgattttatgaaggctctgagttggtggctgactctggcgtcaccatagacaccacaatgcgtggaggccgacttggcgttttctgcttctctcaagaaaacatcatctggtccaacctcaagtatcgctgcaatgacaccatccctgaggacttccaagagtttcaaacccagaatttcgaccgcttcgataattaaaccaaggaagcaatctgtaactgcttttcggaacactaaaaccatatatattttaacttcaattttctttagcttttaccaacccaaatatatcaaaacgttttatgtgaatgtggcaataaaggagaagagatcatttttaaaaaaaaaa

SEQ ID NO: 370236 - DNA, 862 bp, Homo sapiens
gaatacagccatgggaaggtcttcagtccccctggaaccctgatggcaaaccacagagggaaggcacacagtgaagtcactgtgctatctgataccattgggacatgcagccccatgtttcccctggtgttgtgaaatgtgcccattaaagcttttgcaaagcatattaccctcgtggtcacatgcagaccaaataacaaagcggaagaaaagtgaagctgttgcggcagttctgcatccatgtgtgcttctgaacagaggaatcgtctgcacctttggccttgggctcacagtgcgttctttaggctgctgccattggcacttcctgttgttttgattcattcattaccagcaaataccatttttaggcacccttgacagcgacagacacagccatcctctctggaagcctctcaacccagaatggaaatggaggaggttccattaactttgcgctcagacgagtaacttcggcaaagggatggggagaggtaagaatgtctattggctgagttgtgttgtctgtgcaaagccttatttctgaacatttacactctcaaagctcaccctcaaactcaccctgggggccccgttgttgtgtaagaacggtaccaagtgtcaagcttccataagttgactggtcctaaaagaaaaataggtctcatgagcctggccaacatggtgaaaccccgtctctactaaaaatacaaaacttagctgggcatggtggcacctgcctgtaatcccagctacttgggaggctgaggcaggagaatcacgagaatcacatgaacccaggaggcagaggttgcagcgagtcaagatcgcgccgttgcactccagtctgggggacaagagcaaa

SEQ ID NO: 370237 - DNA, 3610 bp, Homo sapiens
tgctggtacggcccggagttatgggatgacggctccgggccgccaggggccgctgtggcgcagccgggctggcccgcgctgtccctgacgcggatcactggcccctcttgagcacggccttgccggtttggcggggtgaaaggttgcgaagatggcgacggccttgagcgaggaggagctggacaatgaagactattactcgttgctgaacgtgcgcagggaggcctcttctgaagagctgaaagctgcctaccggaggctctgtatgctctaccatccagacaagcacagagacccagagctcaagtcacaggcggaacgactgtttaaccttgttcaccaggcttatgaagtgcttagtgacccccaaaccagggccatctatgatatatatgggaagagaggactggaaatggaaggatgggaggttgtggaaaggaggagaacccctgctgaaattcgagaggagtttgagcggctgcagagagagagagaagagaggagattgcagcagcgaaccaatcccaagggaacgatcagcgttggagtagatgccaccgacctttttgatcgctatgatgaggagtatgaagatgtgtccggcagtagctttccgcagattgaaattaataaaatgcacatatcccagtccattgaggcacccttgacagcgacagacacagccatcctctctggaagcctctcaacccagaatggaaatggaggaggttccattaactttgcgctcagacgagtaacttcggcaaagggatggggagagttggaatttggagctggagacctacaggggcctttgttcggtctcaagctgttccgtaatctcacaccaagatgctttgtgacaacaaactgtgctctgcagttttcatcccgtggaatccgacccggcctgaccactgtcctagctcggaacctagacaagaacaccgtgggctacctgcagtggcgatggggtatccagtcagccatgaacactagcatcgtccgagacactaaaaccagccacttcactgtggccctgcagctgggaatccctcactcctttgcactgatcagctatcagcacaaattccaagatgacgatcagactcgtgtgaaaggatccctcaaagcaggcttctttgggacggtggtggagtacggagctgagaggaagatctccaggcacagcgttttgggtgcagctgtcagcgttggagttccacagggcgtttctctcaaagtcaagctcaacagggccagtcagacatacttcttccctattcacttgacggaccagcttctgcccagcgccatgttctatgccaccgtggggcctctagtggtctactttgccatgcaccgtctgatcatcaaaccatacctcagggctcagaaagagaaggaattggagaagcagagggaaagcgccgccaccgatgtgctgcagaagaagcaagaggcggagtccgctgtccggctgatgcaggaatctgtccgaaggataattgaggcagaagagtccagaatgggcctcatcatcgtcaatgcctggtacgggaagtttgtcaatgacaagagcaggaagagcgagaaggtgaaggtgattgacgtgactgtgcccctgcagtgcctggtgaaggactcgaagctcatcctcacggaggcctccaaggctgggctgcctggcttttatgacccgtgtgtgggggaagagaagaacctgaaagtgctctatcagttccggggcgtcctgcatcaggtgatggtgctggacagtgaggccctccggataccaaagcagtcccacaggatcgatacagatggataaactgccaagaaccagatttttaaaaggccgcaaaaaatcttttcctgggagtctacaaatttggaaatgaaaaaacccagacatcagatgtttttattttatattattattatagaaggtggtaccattatcaattatgtgaagggacatgcagacaccccagcttttgagggtgctgggggtaggactgaggcagccccactgggaaccagactgcagcctggcccatggctgttttcccaaggatcagttcctggagggaagggctctggccctgactccgctgtgtcccgagcacacgtgctgaccgcagcccgccgccctgtagttcttggctgggtctggaggtgtctgtggagcaccctgccctcaccacaggagcgtgagccacttctgcagtccacgctgaacatgggaaacaacctgaaaagcaggcaggcctcccggtcagggagcctctgctgtgctggcttcccatgaccacctcctcctgctgaaatattactgcttgaatctggagcagattgcgggtttataaaactgctttttatctgagaacaaacgggtttggaaattagtcgtcttttttccccactcccagagctgctcaaatcattccaccggccccctcggcttgggacagggtagtgtaactcccgatcccagggcctagccctgacacaggtggcttcccgtatcccggtgggaaaacgccctgccaccagcgggcttgagctggcctgtgtccctccactgcctgcaccacccacctccagagtgcagtgctgggcaagggcagctcaagaggacaggaccaggcgcttggcaagacatcagacacacccaacccaaaggcgtggaccccaggcccggcccgtggtacccagcaggtggcactgcagctccccgctcctgcaggtccagcgtcctcacaggaacaccagggcctgtgctccggagccttccttcagacccttcctccacgtgcccacttgggatgcagaatgcagcggagctaggaccccctccacggcctggacctcggctgcagtaaagttacgtgaggcctgtctctcggggcctggaagtggcagccatcagttgctcttgctgacccctcggagcaagcgccgcacaggtggtggctgagacagctggcgcggggggccccaagctgcgccggcctccagcccacccacagctgttgctgaagtcaggcctccctccccagcactggtatctgagtaacggctaagaacctccttcctctggttttgaaaagcagttcgggttgtccaattctgtaacattcatctccattttttaaaaaggtttctctgacggccccacggcccgagccgcggtgagcgtcgtgttgcatgagcctgggccccgggcttcccgtgcgcctctgccgcaggtgcttctgggcacccatcctctgcgtttcatttgcagtcgactgtacagaaggcactcaccacaataaacctttcctgaaagcaaaaagaatcggagcagaccacccaacggagcccgagccgccgcgcacgcacccaagaacgcgcgcatcggggccggcaagagacacggaggggccgacaggcgcacgccgcggttagcaagggcccacgaggggtgtaaagggcgggggcgaaaacggggggaagacagcgcgtacggagcacaagggggacggggcaccagcaagcggcaaacacaaggcaacccgcggctccgatagcgcacgaacggaacgaccgggcggctcaggacgag

SEQ ID NO: 370238 - DNA, 3582 bp, Homo sapiens
tgctggtacggcccggagttatgggatgacggctccgggccgccaggggccgctgtggcgcagccgggctggcccgcgctgtccctgacgcggatcactggcccctcttgagcacggccttgccggtttggcggggtgaaaggttgcgaagatggcgacggccttgagcgaggaggagctggacaatgaagactattactcgttgctgaacgtgcgcagggaggcctcttctgaagagctgaaagctgcctaccggaggctctgtatgctctaccatccagacaagcacagagacccagagctcaagtcacaggcggaacgactgtttaaccttgttcaccaggcttatgaagtgcttagtgacccccaaaccagggccatctatgatatatatgggaagagaggactggaaatggaaggatgggaggttgtggaaaggaggagaacccctgctgaaattcgagaggagtttgagcggctgcagagagagagagaagagaggagattgcagcagcgaaccaatcccaagggaacgatcagcgttggagtagatgccaccgacctttttgatcgctatgatgaggagtatgaagatgtgtccggcagtagctttccgcagattgaaattaataaaatgcacatatcccagtccattgaggcacccttgacagcgacagacacagccatcctctctggaagcctctcaacccagaatggaaatggaggaggttccattaactttgcgctcagacgagtaacttcggcaaagggatggggagagttggaatttggagctggagacctacaggggcctttgttcggtctcaagctgttccgtaatctcacaccaagatgttttcatcccgtggaatccgacccggcctgaccactgtcctagctcggaacctagacaagaacaccgtgggctacctgcagtggcgatggggtatccagtcagccatgaacactagcatcgtccgagacactaaaaccagccacttcactgtggccctgcagctgggaatccctcactcctttgcactgatcagctatcagcacaaattccaagatgacgatcagactcgtgtgaaaggatccctcaaagcaggcttctttgggacggtggtggagtacggagctgagaggaagatctccaggcacagcgttttgggtgcagctgtcagcgttggagttccacagggcgtttctctcaaagtcaagctcaacagggccagtcagacatacttcttccctattcacttgacggaccagcttctgcccagcgccatgttctatgccaccgtggggcctctagtggtctactttgccatgcaccgtctgatcatcaaaccatacctcagggctcagaaagagaaggaattggagaagcagagggaaagcgccgccaccgatgtgctgcagaagaagcaagaggcggagtccgctgtccggctgatgcaggaatctgtccgaaggataattgaggcagaagagtccagaatgggcctcatcatcgtcaatgcctggtacgggaagtttgtcaatgacaagagcaggaagagcgagaaggtgaaggtgattgacgtgactgtgcccctgcagtgcctggtgaaggactcgaagctcatcctcacggaggcctccaaggctgggctgcctggcttttatgacccgtgtgtgggggaagagaagaacctgaaagtgctctatcagttccggggcgtcctgcatcaggtgatggtgctggacagtgaggccctccggataccaaagcagtcccacaggatcgatacagatggataaactgccaagaaccagatttttaaaaggccgcaaaaaatcttttcctgggagtctacaaatttggaaatgaaaaaacccagacatcagatgtttttattttatattattattatagaaggtggtaccattatcaattatgtgaagggacatgcagacaccccagcttttgagggtgctgggggtaggactgaggcagccccactgggaaccagactgcagcctggcccatggctgttttcccaaggatcagttcctggagggaagggctctggccctgactccgctgtgtcccgagcacacgtgctgaccgcagcccgccgccctgtagttcttggctgggtctggaggtgtctgtggagcaccctgccctcaccacaggagcgtgagccacttctgcagtccacgctgaacatgggaaacaacctgaaaagcaggcaggcctcccggtcagggagcctctgctgtgctggcttcccatgaccacctcctcctgctgaaatattactgcttgaatctggagcagattgcgggtttataaaactgctttttatctgagaacaaacgggtttggaaattagtcgtcttttttccccactcccagagctgctcaaatcattccaccggccccctcggcttgggacagggtagtgtaactcccgatcccagggcctagccctgacacaggtggcttcccgtatcccggtgggaaaacgccctgccaccagcgggcttgagctggcctgtgtccctccactgcctgcaccacccacctccagagtgcagtgctgggcaagggcagctcaagaggacaggaccaggcgcttggcaagacatcagacacacccaacccaaaggcgtggaccccaggcccggcccgtggtacccagcaggtggcactgcagctccccgctcctgcaggtccagcgtcctcacaggaacaccagggcctgtgctccggagccttccttcagacccttcctccacgtgcccacttgggatgcagaatgcagcggagctaggaccccctccacggcctggacctcggctgcagtaaagttacgtgaggcctgtctctcggggcctggaagtggcagccatcagttgctcttgctgacccctcggagcaagcgccgcacaggtggtggctgagacagctggcgcggggggccccaagctgcgccggcctccagcccacccacagctgttgctgaagtcaggcctccctccccagcactggtatctgagtaacggctaagaacctccttcctctggttttgaaaagcagttcgggttgtccaattctgtaacattcatctccattttttaaaaaggtttctctgacggccccacggcccgagccgcggtgagcgtcgtgttgcatgagcctgggccccgggcttcccgtgcgcctctgccgcaggtgcttctgggcacccatcctctgcgtttcatttgcagtcgactgtacagaaggcactcaccacaataaacctttcctgaaagcaaaaagaatcggagcagaccacccaacggagcccgagccgccgcgcacgcacccaagaacgcgcgcatcggggccggcaagagacacggaggggccgacaggcgcacgccgcggttagcaagggcccacgaggggtgtaaagggcgggggcgaaaacggggggaagacagcgcgtacggagcacaagggggacggggcaccagcaagcggcaaacacaaggcaacccgcggctccgatagcgcacgaacggaacgaccgggcggctcaggacgag

SEQ ID NO: 370239 - DNA, 3512 bp, Homo sapiens
acgaagattataggcggctcctggttgtatttatgaggggacggtgctatgatgtagatggctgtgtagtgagcagacaactggacaatgaagactattactcgttgctgaacgtgcgcagggaggcctcttctgaagagctgaaagctgcctaccggaggctctgtatgctctaccatccagacaagcacagagacccagagctcaagtcacaggcggaacgactgtttaaccttgttcaccaggcttatgaagtgcttagtgacccccaaaccagggccatctatgatatatatgggaagagaggactggaaatggaaggatgggaggttgtggaaaggaggagaacccctgctgaaattcgagaggagtttgagcggctgcagagagagagagaagagaggagattgcagcagcgaaccaatcccaagggaacgatcagcgttggagtagatgccaccgacctttttgatcgctatgatgaggagtatgaagatgtgtccggcagtagctttccgcagattgaaattaataaaatgcacatatcccagtccattgaggcacccttgacagcgacagacacagccatcctctctggaagcctctcaacccagaatggaaatggaggaggttccattaactttgcgctcagacgagtaacttcggcaaagggatggggagagttggaatttggagctggagacctacaggggcctttgttcggtctcaagctgttccgtaatctcacaccaagatgctttgtgacaacaaactgtgctctgcagttttcatcccgtggaatccgacccggcctgaccactgtcctagctcggaacctagacaagaacaccgtgggctacctgcagtggcgatggggtatccagtcagccatgaacactagcatcgtccgagacactaaaaccagccacttcactgtggccctgcagctgggaatccctcactcctttgcactgatcagctatcagcacaaattccaagatgacgatcagactcgtgtgaaaggatccctcaaagcaggcttctttgggacggtggtggagtacggagctgagaggaagatctccaggcacagcgttttgggtgcagctgtcagcgttggagttccacagggcgtttctctcaaagtcaagctcaacagggccagtcagacatacttcttccctattcacttgacggaccagcttctgcccagcgccatgttctatgccaccgtggggcctctagtggtctactttgccatgcaccgtctgatcatcaaaccatacctcagggctcagaaagagaaggaattggagaagcagagggaaagcgccgccaccgatgtgctgcagaagaagcaagaggcggagtccgctgtccggctgatgcaggaatctgtccgaaggataattgaggcagaagagtccagaatgggcctcatcatcgtcaatgcctggtacgggaagtttgtcaatgacaagagcaggaagagcgagaaggtgaaggtgattgacgtgactgtgcccctgcagtgcctggtgaaggactcgaagctcatcctcacggaggcctccaaggctgggctgcctggcttttatgacccgtgtgtgggggaagagaagaacctgaaagtgctctatcagttccggggcgtcctgcatcaggtgatggtgctggacagtgaggccctccggataccaaagcagtcccacaggatcgatacagatggataaactgccaagaaccagatttttaaaaggccgcaaaaaatcttttcctgggagtctacaaatttggaaatgaaaaaacccagacatcagatgtttttattttatattattattatagaaggtggtaccattatcaattatgtgaagggacatgcagacaccccagcttttgagggtgctgggggtaggactgaggcagccccactgggaaccagactgcagcctggcccatggctgttttcccaaggatcagttcctggagggaagggctctggccctgactccgctgtgtcccgagcacacgtgctgaccgcagcccgccgccctgtagttcttggctgggtctggaggtgtctgtggagcaccctgccctcaccacaggagcgtgagccacttctgcagtccacgctgaacatgggaaacaacctgaaaagcaggcaggcctcccggtcagggagcctctgctgtgctggcttcccatgaccacctcctcctgctgaaatattactgcttgaatctggagcagattgcgggtttataaaactgctttttatctgagaacaaacgggtttggaaattagtcgtcttttttccccactcccagagctgctcaaatcattccaccggccccctcggcttgggacagggtagtgtaactcccgatcccagggcctagccctgacacaggtggcttcccgtatcccggtgggaaaacgccctgccaccagcgggcttgagctggcctgtgtccctccactgcctgcaccacccacctccagagtgcagtgctgggcaagggcagctcaagaggacaggaccaggcgcttggcaagacatcagacacacccaacccaaaggcgtggaccccaggcccggcccgtggtacccagcaggtggcactgcagctccccgctcctgcaggtccagcgtcctcacaggaacaccagggcctgtgctccggagccttccttcagacccttcctccacgtgcccacttgggatgcagaatgcagcggagctaggaccccctccacggcctggacctcggctgcagtaaagttacgtgaggcctgtctctcggggcctggaagtggcagccatcagttgctcttgctgacccctcggagcaagcgccgcacaggtggtggctgagacagctggcgcggggggccccaagctgcgccggcctccagcccacccacagctgttgctgaagtcaggcctccctccccagcactggtatctgagtaacggctaagaacctccttcctctggttttgaaaagcagttcgggttgtccaattctgtaacattcatctccattttttaaaaaggtttctctgacggccccacggcccgagccgcggtgagcgtcgtgttgcatgagcctgggccccgggcttcccgtgcgcctctgccgcaggtgcttctgggcacccatcctctgcgtttcatttgcagtcgactgtacagaaggcactcaccacaataaacctttcctgaaagcaaaaagaatcggagcagaccacccaacggagcccgagccgccgcgcacgcacccaagaacgcgcgcatcggggccggcaagagacacggaggggccgacaggcgcacgccgcggttagcaagggcccacgaggggtgtaaagggcgggggcgaaaacggggggaagacagcgcgtacggagcacaagggggacggggcaccagcaagcggcaaacacaaggcaacccgcggctccgatagcgcacgaacggaacgaccgggcggctcaggacgag

SEQ ID NO: 370240 - DNA, 3320 bp, Homo sapiens
gaatacagccatgggaaggtcttcagtccccctggaaccctgatggcaaaccacagagggaaggcacacagtgaagtcactgtgctatctgataccattgggacatgcagccccatgtttcccctggtgttgtgaaatgtgcccattaaagcttttgcaaagcatattaccctcgtggtcacatgcagaccaaataacaaagcggaagaaaagtgaagctgttgcggcagttctgcatccatgtgtgcttctgaacagaggaatcgtctgcacctttggccttgggctcacagtgcgttctttaggctgctgccattggcacttcctgttgttttgattcattcattaccagcaaataccatttttaggcacccttgacagcgacagacacagccatcctctctggaagcctctcaacccagaatggaaatggaggaggttccattaactttgcgctcagacgagtaacttcggcaaagggatggggagagttggaatttggagctggagacctacaggggcctttgttcggtctcaagctgttccgtaatctcacaccaagatgctttgtgacaacaaactgtgctctgcagttttcatcccgtggaatccgacccggcctgaccactgtcctagctcggaacctagacaagaacaccgtgggctacctgcagtggcgatggggtatccagtcagccatgaacactagcatcgtccgagacactaaaaccagccacttcactgtggccctgcagctgggaatccctcactcctttgcactgatcagctatcagcacaaattccaagatgacgatcagactcgtgtgaaaggatccctcaaagcaggcttctttgggacggtggtggagtacggagctgagaggaagatctccaggcacagcgttttgggtgcagctgtcagcgttggagttccacagggcgtttctctcaaagtcaagctcaacagggccagtcagacatacttcttccctattcacttgacggaccagcttctgcccagcgccatgttctatgccaccgtggggcctctagtggtctactttgccatgcaccgtctgatcatcaaaccatacctcagggctcagaaagagaaggaattggagaagcagagggaaagcgccgccaccgatgtgctgcagaagaagcaagaggcggagtccgctgtccggctgatgcaggaatctgtccgaaggataattgaggcagaagagtccagaatgggcctcatcatcgtcaatgcctggtacgggaagtttgtcaatgacaagagcaggaagagcgagaaggtgaaggtgattgacgtgactgtgcccctgcagtgcctggtgaaggactcgaagctcatcctcacggaggcctccaaggctgggctgcctggcttttatgacccgtgtgtgggggaagagaagaacctgaaagtgctctatcagttccggggcgtcctgcatcaggtgatggtgctggacagtgaggccctccggataccaaagcagtcccacaggatcgatacagatggataaactgccaagaaccagatttttaaaaggccgcaaaaaatcttttcctgggagtctacaaatttggaaatgaaaaaacccagacatcagatgtttttattttatattattattatagaaggtggtaccattatcaattatgtgaagggacatgcagacaccccagcttttgagggtgctgggggtaggactgaggcagccccactgggaaccagactgcagcctggcccatggctgttttcccaaggatcagttcctggagggaagggctctggccctgactccgctgtgtcccgagcacacgtgctgaccgcagcccgccgccctgtagttcttggctgggtctggaggtgtctgtggagcaccctgccctcaccacaggagcgtgagccacttctgcagtccacgctgaacatgggaaacaacctgaaaagcaggcaggcctcccggtcagggagcctctgctgtgctggcttcccatgaccacctcctcctgctgaaatattactgcttgaatctggagcagattgcgggtttataaaactgctttttatctgagaacaaacgggtttggaaattagtcgtcttttttccccactcccagagctgctcaaatcattccaccggccccctcggcttgggacagggtagtgtaactcccgatcccagggcctagccctgacacaggtggcttcccgtatcccggtgggaaaacgccctgccaccagcgggcttgagctggcctgtgtccctccactgcctgcaccacccacctccagagtgcagtgctgggcaagggcagctcaagaggacaggaccaggcgcttggcaagacatcagacacacccaacccaaaggcgtggaccccaggcccggcccgtggtacccagcaggtggcactgcagctccccgctcctgcaggtccagcgtcctcacaggaacaccagggcctgtgctccggagccttccttcagacccttcctccacgtgcccacttgggatgcagaatgcagcggagctaggaccccctccacggcctggacctcggctgcagtaaagttacgtgaggcctgtctctcggggcctggaagtggcagccatcagttgctcttgctgacccctcggagcaagcgccgcacaggtggtggctgagacagctggcgcggggggccccaagctgcgccggcctccagcccacccacagctgttgctgaagtcaggcctccctccccagcactggtatctgagtaacggctaagaacctccttcctctggttttgaaaagcagttcgggttgtccaattctgtaacattcatctccattttttaaaaaggtttctctgacggccccacggcccgagccgcggtgagcgtcgtgttgcatgagcctgggccccgggcttcccgtgcgcctctgccgcaggtgcttctgggcacccatcctctgcgtttcatttgcagtcgactgtacagaaggcactcaccacaataaacctttcctgaaagcaaaaagaatcggagcagaccacccaacggagcccgagccgccgcgcacgcacccaagaacgcgcgcatcggggccggcaagagacacggaggggccgacaggcgcacgccgcggttagcaagggcccacgaggggtgtaaagggcgggggcgaaaacggggggaagacagcgcgtacggagcacaagggggacggggcaccagcaagcggcaaacacaaggcaacccgcggctccgatagcgcacgaacggaacgaccgggcggctcaggacgag

SEQ ID NO: 370241 - DNA, 2815 bp, Homo sapiens
ggtcatggacgcctgggtccgcttcagtgctcagagccaagcccgggagcggctgtgtagctttgtgacaacaaactgtgctctgcagttttcatcccgtggaatccgacccggcctgaccactgtcctagctcggaacctagacaagaacaccgtgggctacctgcagtggcgatggggtatccagtcagccatgaacactagcatcgtccgagacactaaaaccagccacttcactgtggccctgcagctgggaatccctcactcctttgcactgatcagctatcagcacaaattccaagatgacgatcagactcgtgtgaaaggatccctcaaagcaggcttctttgggacggtggtggagtacggagctgagaggaagatctccaggcacagcgttttgggtgcagctgtcagcgttggagttccacagggcgtttctctcaaagtcaagctcaacagggccagtcagacatacttcttccctattcacttgacggaccagcttctgcccagcgccatgttctatgccaccgtggggcctctagtggtctactttgccatgcaccgtctgatcatcaaaccatacctcagggctcagaaagagaaggaattggagaagcagagggaaagcgccgccaccgatgtgctgcagaagaagcaagaggcggagtccgctgtccggctgatgcaggaatctgtccgaaggataattgaggcagaagagtccagaatgggcctcatcatcgtcaatgcctggtacgggaagtttgtcaatgacaagagcaggaagagcgagaaggtgaaggtgattgacgtgactgtgcccctgcagtgcctggtgaaggactcgaagctcatcctcacggaggcctccaaggctgggctgcctggcttttatgacccgtgtgtgggggaagagaagaacctgaaagtgctctatcagttccggggcgtcctgcatcaggtgatggtgctggacagtgaggccctccggataccaaagcagtcccacaggatcgatacagatggataaactgccaagaaccagatttttaaaaggccgcaaaaaatcttttcctgggagtctacaaatttggaaatgaaaaaacccagacatcagatgtttttattttatattattattatagaaggtggtaccattatcaattatgtgaagggacatgcagacaccccagcttttgagggtgctgggggtaggactgaggcagccccactgggaaccagactgcagcctggcccatggctgttttcccaaggatcagttcctggagggaagggctctggccctgactccgctgtgtcccgagcacacgtgctgaccgcagcccgccgccctgtagttcttggctgggtctggaggtgtctgtggagcaccctgccctcaccacaggagcgtgagccacttctgcagtccacgctgaacatgggaaacaacctgaaaagcaggcaggcctcccggtcagggagcctctgctgtgctggcttcccatgaccacctcctcctgctgaaatattactgcttgaatctggagcagattgcgggtttataaaactgctttttatctgagaacaaacgggtttggaaattagtcgtcttttttccccactcccagagctgctcaaatcattccaccggccccctcggcttgggacagggtagtgtaactcccgatcccagggcctagccctgacacaggtggcttcccgtatcccggtgggaaaacgccctgccaccagcgggcttgagctggcctgtgtccctccactgcctgcaccacccacctccagagtgcagtgctgggcaagggcagctcaagaggacaggaccaggcgcttggcaagacatcagacacacccaacccaaaggcgtggaccccaggcccggcccgtggtacccagcaggtggcactgcagctccccgctcctgcaggtccagcgtcctcacaggaacaccagggcctgtgctccggagccttccttcagacccttcctccacgtgcccacttgggatgcagaatgcagcggagctaggaccccctccacggcctggacctcggctgcagtaaagttacgtgaggcctgtctctcggggcctggaagtggcagccatcagttgctcttgctgacccctcggagcaagcgccgcacaggtggtggctgagacagctggcgcggggggccccaagctgcgccggcctccagcccacccacagctgttgctgaagtcaggcctccctccccagcactggtatctgagtaacggctaagaacctccttcctctggttttgaaaagcagttcgggttgtccaattctgtaacattcatctccattttttaaaaaggtttctctgacggccccacggcccgagccgcggtgagcgtcgtgttgcatgagcctgggccccgggcttcccgtgcgcctctgccgcaggtgcttctgggcacccatcctctgcgtttcatttgcagtcgactgtacagaaggcactcaccacaataaacctttcctgaaagcaaaaagaatcggagcagaccacccaacggagcccgagccgccgcgcacgcacccaagaacgcgcgcatcggggccggcaagagacacggaggggccgacaggcgcacgccgcggttagcaagggcccacgaggggtgtaaagggcgggggcgaaaacggggggaagacagcgcgtacggagcacaagggggacggggcaccagcaagcggcaaacacaaggcaacccgcggctccgatagcgcacgaacggaacgaccgggcggctcaggacgag

SEQ ID NO: 370242 - DNA, 4400 bp, Homo sapiens
tgctggtacggcccggagttatgggatgacggctccgggccgccaggggccgctgtggcgcagccgggctggcccgcgctgtccctgacgcggatcactggcccctcttgagcacggccttgccggtttggcggggtgaaaggttgcgaagatggcgacggccttgagcgaggaggagctggacaatgaagactattactcgttgctgaacgtgcgcagggaggcctcttctgaagagctgaaagctgcctaccggaggctctgtatgctctaccatccagacaagcacagagacccagagctcaagtcacaggcggaacgactgtttaaccttgttcaccaggcttatgaagtgcttagtgacccccaaaccagggccatctatgatatatatgggaagagaggactggaaatggaaggatgggaggttgtggaaaggaggagaacccctgctgaaattcgagaggagtttgagcggctgcagagagagagagaagagaggagattgcagcagcgaaccaatcccaagggaacgatcagcgttggagtagatgccaccgacctttttgatcgctatgatgaggagtatgaagatgtgtccggcagtagctttccgcagattgaaattaataaaatgcacatatcccagtccattgaggcacccttgacagcgacagacacagccatcctctctggaagcctctcaacccagaatggaaatggaggaggttccattaactttgcgctcagacgagtaacttcggcaaagggatggggagagttggaatttggagctggagacctacaggggcctttgttcggtctcaagctgttccgtaatctcacaccaagatgctttgtgacaacaaactgtgctctgcagttttcatcccgtggaatccgacccggcctgaccactgtcctagctcggaacctagacaagaacaccgtgggctacctgcagtggcgatggggtatccagtcagccatgaacactagcatcgtccgagacactaaaaccagccacttcactgtggccctgcagctgggaatccctcactcctttgcactgatcagctatcagcacaaattccaagatgacgatcagactcgtgtgaaaggatccctcaaagcaggcttctttgggacggtggtggagtacggagctgagaggaagatctccaggcacagcgttttgggtgcagctgtcagcgttggagttccacagggcgtttctctcaaagtcaagctcaacagggccagtcagacatacttcttccctattcacttgacggaccagcttctgcccagcgccatgttctatgccaccgtggggcctctagtggtctactttgccatgcaccgtctgatcatcaaaccatacctcagggctcagaaagagaaggaattggagaagcagagggaaagcgccgccaccgatgtgctgcagaagaagcaagaggcggagtccgctgtgagtgctgccccaccgttcccaagcgagggctgtaggggacacactccagaccccacatgttggtctcagggccttagaggtcagacttctcttctccaacaacttggctctccacttagtctttattgtgggatgcgacactgggctctgcagtccctgccctgaagataattaccctccaaaggcctaacaagggcttttttaaagtggtgagtattggcctctttttcttccctctgagtgttctgccttttactgagcaggagggagcaggcttcctgggtatgtggcgagcatactgccaggtggccatgggccgtgtgcgcggcctggcgagcacatgcctgtctgagggggcggcacagctatgcccagcagaatggcaccacaggagaacacaggtcctttctcaagaggagctgggattccagcttctcctgtgaaatctctttatttttaaagctgacaacgcattgtttttttattgggtcaacaaatcccacccacgcattaatgatccctagaaagggagctcccaccggtggccaccggagggtcatgccgtttcaggtgcttctcaccttctgacccagagctgcctgccctaggtctaggagtttcagagtgagccactcgggtagcagagctgtcagggtgcccactcccttcctttccaggccctgagcaagtatgttgacgtggacaagactgcctgcctgtggccctctcaccagaggtggaacaggcctggcagggccctgactgtgtcatccttgttctctggcaggtccggctgatgcaggaatctgtccgaaggataattgaggcagaagagtccagaatgggcctcatcatcgtcaatgcctggtacgggaagtttgtcaatgacaagagcaggaagagcgagaaggtgaaggtgattgacgtgactgtgcccctgcagtgcctggtgaaggactcgaagctcatcctcacggaggcctccaaggctgggctgcctggcttttatgacccgtgtgtgggggaagagaagaacctgaaagtgctctatcagttccggggcgtcctgcatcaggtgatggtgctggacagtgaggccctccggataccaaagcagtcccacaggatcgatacagatggataaactgccaagaaccagatttttaaaaggccgcaaaaaatcttttcctgggagtctacaaatttggaaatgaaaaaacccagacatcagatgtttttattttatattattattatagaaggtggtaccattatcaattatgtgaagggacatgcagacaccccagcttttgagggtgctgggggtaggactgaggcagccccactgggaaccagactgcagcctggcccatggctgttttcccaaggatcagttcctggagggaagggctctggccctgactccgctgtgtcccgagcacacgtgctgaccgcagcccgccgccctgtagttcttggctgggtctggaggtgtctgtggagcaccctgccctcaccacaggagcgtgagccacttctgcagtccacgctgaacatgggaaacaacctgaaaagcaggcaggcctcccggtcagggagcctctgctgtgctggcttcccatgaccacctcctcctgctgaaatattactgcttgaatctggagcagattgcgggtttataaaactgctttttatctgagaacaaacgggtttggaaattagtcgtcttttttccccactcccagagctgctcaaatcattccaccggccccctcggcttgggacagggtagtgtaactcccgatcccagggcctagccctgacacaggtggcttcccgtatcccggtgggaaaacgccctgccaccagcgggcttgagctggcctgtgtccctccactgcctgcaccacccacctccagagtgcagtgctgggcaagggcagctcaagaggacaggaccaggcgcttggcaagacatcagacacacccaacccaaaggcgtggaccccaggcccggcccgtggtacccagcaggtggcactgcagctccccgctcctgcaggtccagcgtcctcacaggaacaccagggcctgtgctccggagccttccttcagacccttcctccacgtgcccacttgggatgcagaatgcagcggagctaggaccccctccacggcctggacctcggctgcagtaaagttacgtgaggcctgtctctcggggcctggaagtggcagccatcagttgctcttgctgacccctcggagcaagcgccgcacaggtggtggctgagacagctggcgcggggggccccaagctgcgccggcctccagcccacccacagctgttgctgaagtcaggcctccctccccagcactggtatctgagtaacggctaagaacctccttcctctggttttgaaaagcagttcgggttgtccaattctgtaacattcatctccattttttaaaaaggtttctctgacggccccacggcccgagccgcggtgagcgtcgtgttgcatgagcctgggccccgggcttcccgtgcgcctctgccgcaggtgcttctgggcacccatcctctgcgtttcatttgcagtcgactgtacagaaggcactcaccacaataaacctttcctgaaagcaaaaagaatcggagcagaccacccaacggagcccgagccgccgcgcacgcacccaagaacgcgcgcatcggggccggcaagagacacggaggggccgacaggcgcacgccgcggttagcaagggcccacgaggggtgtaaagggcgggggcgaaaacggggggaagacagcgcgtacggagcacaagggggacggggcaccagcaagcggcaaacacaaggcaacccgcggctccgatagcgcacgaacggaacgaccgggcggctcaggacgag

SEQ ID NO: 370243 - DNA, 2836 bp, Homo sapiens
tgctggtacggcccggagttatgggatgacggctccgggccgccaggggccgctgtggcgcagccgggctggcccgcgctgtccctgacgcggatcactggcccctcttgagcacggccttgccggtttggcggggtgaaaggttgcgaagatggcgacggccttgagcgaggaggagctggacaatgaagactattactcgttgctgaacgtgcgcagggaggcctcttctgaagagctgaaagctgcctaccggaggctctgtatgctctaccatccagacaagcacagagacccagagctcaagtcacaggcggaacgactgtttaaccttgttcaccaggcttatgaagtgcttagtgacccccaaaccagggccatctatgatatatatgggaagagaggactggaaatggaaggatgggaggttgtggaaaggaggagaacccctgctgaaattcgagaggagtttgagcggctgcagagagagagagaagagaggagattgcagcagcgaaccaatcccaagggaacgatcagcgttggagtagatgccaccgacctttttgatcgctatgatgaggagtatgaagatgtgtccggcagtagctttccgcagattgaaattaataaaatgcacatatcccagtccattgaggcacccttgacagcgacagacacagccatcctctctggaagcctctcaacccagaatggaaatggaggaggttccattaactttgcgctcagacgagtaacttcggcaaagggatggggagagttggaatttggagctggagacctacaggggcctttgttcggtctcaagctgttccgtaatctcacaccaagatgctttgtgacaacaaactgtgctctgcagttttcatcccgtggaatccgacccggcctgaccactgtcctagctcggaacctagacaagaacaccgtgggctacctgcagtggcgatggggtatccagtcagccatgaacactagcatcgtccgagacactaaaaccagccacttcactgtggccctgcagctgggaatccctcactcctttgcactgatcagctatcagcacaaattccaagatgacgatcagactcgtgtgaaaggatccctcaaagcaggcttctttgggacggtggtggagtacggagctgagaggaagatctccaggcacagcgttttgggtgcagctgtcagcgttggagttccacagggcgtttctctcaaagtcaagctcaacagggccagtcagacatacttcttccctattcacttgacggaccagcttctgcccagcgccatgttctatgccaccgtggggcctctagtggtctactttgccatgcaccgtctgatcatcaaaccatacctcagggctcagaaagagaagtgtctgtggagcaccctgccctcaccacaggagcgtgagccacttctgcagtccacgctgaacatgggaaacaacctgaaaagcaggcaggcctcccggtcagggagcctctgctgtgctggcttcccatgaccacctcctcctgctgaaatattactgcttgaatctggagcagattgcgggtttataaaactgctttttatctgagaacaaacgggtttggaaattagtcgtcttttttccccactcccagagctgctcaaatcattccaccggccccctcggcttgggacagggtagtgtaactcccgatcccagggcctagccctgacacaggtggcttcccgtatcccggtgggaaaacgccctgccaccagcgggcttgagctggcctgtgtccctccactgcctgcaccacccacctccagagtgcagtgctgggcaagggcagctcaagaggacaggaccaggcgcttggcaagacatcagacacacccaacccaaaggcgtggaccccaggcccggcccgtggtacccagcaggtggcactgcagctccccgctcctgcaggtccagcgtcctcacaggaacaccagggcctgtgctccggagccttccttcagacccttcctccacgtgcccacttgggatgcagaatgcagcggagctaggaccccctccacggcctggacctcggctgcagtaaagttacgtgaggcctgtctctcggggcctggaagtggcagccatcagttgctcttgctgacccctcggagcaagcgccgcacaggtggtggctgagacagctggcgcggggggccccaagctgcgccggcctccagcccacccacagctgttgctgaagtcaggcctccctccccagcactggtatctgagtaacggctaagaacctccttcctctggttttgaaaagcagttcgggttgtccaattctgtaacattcatctccattttttaaaaaggtttctctgacggccccacggcccgagccgcggtgagcgtcgtgttgcatgagcctgggccccgggcttcccgtgcgcctctgccgcaggtgcttctgggcacccatcctctgcgtttcatttgcagtcgactgtacagaaggcactcaccacaataaacctttcctgaaagcaaaaagaatcggagcagaccacccaacggagcccgagccgccgcgcacgcacccaagaacgcgcgcatcggggccggcaagagacacggaggggccgacaggcgcacgccgcggttagcaagggcccacgaggggtgtaaagggcgggggcgaaaacggggggaagacagcgcgtacggagcacaagggggacggggcaccagcaagcggcaaacacaaggcaacccgcggctccgatagcgcacgaacggaacgaccgggcggctcaggacgag

SEQ ID NO: 370244 - DNA, 2234 bp, Homo sapiens
tgctggtacggcccggagttatgggatgacggctccgggccgccaggggccgctgtggcgcagccgggctggcccgcgctgtccctgacgcggatcactggcccctcttgagcacggccttgccggtttggcggggtgaaaggttgcgaagatggcgacggccttgagcgaggaggagctggacaatgaagactattactcgttgctgaacgtgcgcagggaggcctcttctgaagagctgaaagctgcctaccggaggctctgtatgctctaccatccagacaagcacagagacccagagctcaagtcacaggcggaacgactgtttaaccttgttcaccaggcttatgaagtgcttagtgacccccaaaccagggccatctatgatatatatgggaagagaggactggaaatggaaggatgggaggttgtggaaaggaggagaacccctgctgaaattcgagaggagtttgagcggctgcagagagagagagaagagaggagattgcagcagcgaaccaatcccaagggaacgatcagcgttggagtagatgccaccgacctttttgatcgctatgatgaggagtatgaagatgtgtccggcagtagctttccgcagattgaaattaataaaatgcacatatcccagtccattgaggcacccttgacagcgacagacacagccatcctctctggaagcctctcaacccagaatggaaatggaggaggttccattaactttgcgctcagacgagtaacttcggcaaagggatggggagagttggaatttggagctggagacctacaggggcctttgttcggtctcaagctgttccgtaatctcacaccaagatgctttgtgacaacaaactgtgctctgcagttttcatcccgtggaatccgacccggcctgaccactgtcctagctcggaacctagacaagaacaccgtgggctacctgcagtggcgatggggtatccagtcagccatgaacactagcatcgtccgagacactaaaaccagccacttcactgtggccctgcagctgggaatccctcactcctttgcactgatcagctatcagcacaaattccaagatgacgatcagactcgtgtgaaaggatccctcaaagcaggcttctttgggacggtggtggagtacggagctgagaggaagatctccaggcacagcgttttgggtgcagctgtcagcgttggagttccacagggcgtttctctcaaagtcaaggaattggagaagcagagggaaagcgccgccaccgatgtgctgcagaagaagcaagaggcggagtccgctgtccggctgatgcaggaatctgtccgaaggataattgaggcagaagagtccagaatgggcctcatcatcgtcaatgcctggtacgggaagtttgtcaatgacaagagcaggaagagcgagaaggtgaaggtgattgacgtgactgtgcccctgcagtgcctggtgaaggactcgaagctcatcctcacggaggcctccaaggctgggctgcctggcttttatgacccgtgtgtgggggaagagaagaacctgaaagtgctctatcagttccggggcgtcctgcatcaggtgatggtgctggacagtgaggccctccggataccaaagcagtcccacaggatcgatacagatggataaactgccaagaaccagatttttaaaaggccgcaaaaaatcttttcctgggagtctacaaatttggaaatgaaaaaacccagacatcagatgtttttattttatattattattatagaaggtggtaccattatcaattatgtgaagggacatgcagacaccccagcttttgagggtgctgggggtaggactgaggcagccccactgggaaccagactgcagcctggcccatggctgttttcccaaggatcagttcctggagggaagggctctggccctgactccgctgtgtcccgagcacacgtgctgaccgcagcccgccgccctgtagttcttggctgggtctggaggtgtctgtggagcaccctgccctcaccacaggagcgtgagccacttctgcagtccacgctgaacatgggaaacaacctgaaaagcaggcaggcctcccggtcagggagcctctgctgtgctggcttcccatgaccacctcctcctgctgaaatattactgcttgaatctggagcagattgcgggtttataaaactgctttttatctgagaac

SEQ ID NO: 370245 - DNA, 1815 bp, Homo sapiens
tgctggtacggcccggagttatgggatgacggctccgggccgccaggggccgctgtggcgcagccgggctggcccgcgctgtccctgacgcggatcactggcccctcttgagcacggccttgccggtttggcggggtgaaaggttgcgaagatggcgacggccttgagcgaggaggagctggacaatgaagactattactcgttgctgaacgtgcgcagggaggcctcttctgaagagctgaaagctgcctaccggaggctctgtatgctctaccatccagacaagcacagagacccagagctcaagtcacaggcggaacgactgtttaaccttgttcaccaggcttatgaagtgcttagtgacccccaaaccagggccatctatgatatatatgggaagagaggactggaaatggaaggatgggaggttgtggaaaggaggagaacccctgctgaaattcgagaggagtttgagcggctgcagagagagagagaagagaggagattgcagcagcgaaccaatcccaagggaacgatcagcgttggagtagatgccaccgacctttttgatcgctatgatgaggagtatgaagatgtgtccggcagtagctttccgcagattgaaattaataaaatgcacatatcccagtccattgaggcacccttgacagcgacagacacagccatcctctctggaagcctctcaacccagaatggaaatggaggaggttccattaactttgcgctcagacgagtaacttcggcaaagggatggggagagttggaatttggagctggagacctacaggggcctttgttcggtctcaagctgttccgtaatctcacaccaagatgctttgtgacaacaaactgtgctctgcagttttcatcccgtggaatccgacccggcctgaccactgtcctagctcggaacctagacaagaacaccgtgggctacctgcagtggcgatggggtatccagtcagccatgaacactagcatcgtccgagacactaaaaccagccacttcactgtggccctgcagctgggaatccctcactcctttgcactgatcagctatcagcacaaattccaagatgacgatcagactcgtgtgaaaggatccctcaaagcaggcttctttgggacggtggtggagtacggagctgagaggaagatctccaggcacagcgttttgggtgcagctgtcagcgttggagttccacagggcgtttctctcaaagtcaagctcaacagggccagtcagacatacttcttccctattcacttgacggaccagcttctgcccagcgccatgttctatgccaccgtggggcctctagtggtctactttgccatgcaccgtctgatcatcaaaccatacctcagggctcagaaagagaaggaattggagaagcagagggaaagcgccgccaccgatgtgctgcagaagaagcaagaggcggagtccgctgtgagtgctgccccaccgttcccaagcgagggctgtaggggacacactccagaccccacatgttggtctcagggccttagaggtcagacttctcttctccaacaacttggctctccacttagtctttattgtgggatgcgacactgggctctgcagtccctgccctgaagataattaccctccaaaggcctaacaagggcttttttaaagtggtccggctgatgcaggaatctgtccgaaggataattgaggcagaagagtccagaatgggcctcatcatcgtcaatgcctgtgaacccgacagattggcacatgaccacgagccagcaacccgcgagcaa

SEQ ID NO: 370246 - DNA, 1467 bp, Homo sapiens
tgctggtacggcccggagttatgggatgacggctccgggccgccaggggccgctgtggcgcagccgggctggcccgcgctgtccctgacgcggatcactggcccctcttgagcacggccttgccggtttggcggggtgaaaggttgcgaagatggcgacggccttgagcgaggaggagctggacaatgaagactattactcgttgctgaacgtgcgcagggaggcctcttctgaagagctgaaagctgcctaccggaggctctgtatgctctaccatccagacaagcacagagacccagagctcaagtcacaggcggaacgactgtttaaccttgttcaccaggcttatgaagtgcttagtgacccccaaaccagggccatctatgatatatatgggaagagaggactggaaatggaaggatgggaggttgtggaaaggaggagaacccctgctgaaattcgagaggagtttgagcggctgcagagagagagagaagagaggagattgcagcagcgaaccaatcccaagggaacgatcagcgttggagtagatgccaccgacctttttgatcgctatgatgaggagtatgaagatgtgtccggcagtagctttccgcagattgaaattaataaaatgcacatatcccagtccattgaggcacccttgacagcgacagacacagccatcctctctggaagcctctcaacccagaatggaaatggaggaggttccattaactttgcgctcagacgagtaacttcggcaaagggatggggagagttggaatttggagctggagacctacaggggcctttgttcggtctcaagctgttccgtaatctcacaccaagatgctttgtgacaacaaactgtgctctgcagttttcatcccgtggaatccgacccggcctgaccactgtcctagctcggaacctagacaagaacaccgtgggctacctgcagtggcgatggggtatccagtcagccatgaacactagcatcgtccgagacactaaaaccagccacttcactgtggccctgcagctgggaatccctcactcctttgcactgatcagctatcagcacaaattccaagatgacgatcagactcgtgtgaaaggatccctcaaagcaggcttctttgggacggtgcgttggcccaactgggccaacgcaccgtccagctcgtccctttccagttttacagtgaattgctgcgtgcgttggcccaacgttgggccaacgcaccgtcgactgttggaggaagatcttcagagatgaggggggcaaggccttcttcaagggtgcgtggtccaacgtcctgcggggcatggggggcgccttcgtgctggtcctgtacgacgagctcacgaaggtgatctcagggccgcggcctcctccacacacacacacacaccaggcgacacaagagaaccacgagaatcctaaacgtgcccgacaacgcg

SEQ ID NO: 370247 - DNA, 305 bp, Homo sapiens
aggagcataggctcagtgtcaccagagttttttatttcttgtgagaagctagaaaactgggttttcagtgaagtctcccactttttaattactggctgctaataaatcatggtgcactcactgcggctgccagaccgtgacccctgccttaaaggcctgtgtgcagcagatgcccagagctagtgggagggcagatacccatctccccacagagtcacacgccctagccacgcatccttgcaccctctgtctccccagctgggaatccctcactcctttgcactgatcagctatcagcacaaatt

SEQ ID NO: 370248 - DNA, 328 bp, Homo sapiens
cggctgaggggagtcgggaggttactaggaagattctggctaggaccctccccctctgtgtggatagaggcctgacctcctgcttttttttttactgggagctggcccagggatgcatagacgtgacagtaagtgaggtcttagccaggcagagaggaagtaacagaacagctgagagcaggtgctatccaggacctattctgtctctgtgtctctccagctttgtgacaacaaactgtgctctgcagttttcatcccgtggaatccgacccggcctgaccactgtcctagctcggaacctagacaagaacaccgtgggctacctgca

SEQ ID NO: 370249 - DNA, 3500 bp, Homo sapiens
  misc_feature (1)..(1): n is a, c, g, or t
naaaaatgagcatagaagaggccggcgtgttatatcggacgatggcgacggccttgagcgaggaggagctggacaatgaagactattactcgttgctgaacgtgcgcagggaggcctcttctgaagagctgaaagctgcctaccggaggctctgtatgctctaccatccagacaagcacagagacccagagctcaagtcacaggcggaacgactgtttaaccttgttcaccaggcttatgaagtgcttagtgacccccaaaccagggccatctatgatatatatgggaagagaggactggaaatggaaggatgggaggttgtggaaaggaggagaacccctgctgaaattcgagaggagtttgagcggctgcagagagagagagaagagaggagattgcagcagcgaaccaatcccaagggaacgatcagcgttggagtagatgccaccgacctttttgatcgctatgatgaggagtatgaagatgtgtccggcagtagctttccgcagattgaaattaataaaatgcacatatcccagtccattgaggcacccttgacagcgacagacacagccatcctctctggaagcctctcaacccagaatggaaatggaggaggttccattaactttgcgctcagacgagtaacttcggcaaagggatggggagagttggaatttggagctggagacctacaggggcctttgttcggtctcaagctgttccgtaatctcacaccaagatgctttgtgacaacaaactgtgctctgcagttttcatcccgtggaatccgacccggcctgaccactgtcctagctcggaacctagacaagaacaccgtgggctacctgcagtggcgatggggtatccagtcagccatgaacactagcatcgtccgagacactaaaaccagccacttcactgtggccctgcagctgggaatccctcactcctttgcactgatcagctatcagcacaaattccaagatgacgatcagactcgtgtgaaaggatccctcaaagcaggcttctttgggacggtggtggagtacggagctgagaggaagatctccaggcacagcgttttgggtgcagctgtcagcgttggagttccacagggcgtttctctcaaagtcaagctcaacagggccagtcagacatacttcttccctattcacttgacggaccagcttctgcccagcgccatgttctatgccaccgtggggcctctagtggtctactttgccatgcaccgtctgatcatcaaaccatacctcagggctcagaaagagaaggaattggagaagcagagggaaagcgccgccaccgatgtgctgcagaagaagcaagaggcggagtccgctgtccggctgatgcaggaatctgtccgaaggataattgaggcagaagagtccagaatgggcctcatcatcgtcaatgcctggtacgggaagtttgtcaatgacaagagcaggaagagcgagaaggtgaaggtgattgacgtgactgtgcccctgcagtgcctggtgaaggactcgaagctcatcctcacggaggcctccaaggctgggctgcctggcttttatgacccgtgtgtgggggaagagaagaacctgaaagtgctctatcagttccggggcgtcctgcatcaggtgatggtgctggacagtgaggccctccggataccaaagcagtcccacaggatcgatacagatggataaactgccaagaaccagatttttaaaaggccgcaaaaaatcttttcctgggagtctacaaatttggaaatgaaaaaacccagacatcagatgtttttattttatattattattatagaaggtggtaccattatcaattatgtgaagggacatgcagacaccccagcttttgagggtgctgggggtaggactgaggcagccccactgggaaccagactgcagcctggcccatggctgttttcccaaggatcagttcctggagggaagggctctggccctgactccgctgtgtcccgagcacacgtgctgaccgcagcccgccgccctgtagttcttggctgggtctggaggtgtctgtggagcaccctgccctcaccacaggagcgtgagccacttctgcagtccacgctgaacatgggaaacaacctgaaaagcaggcaggcctcccggtcagggagcctctgctgtgctggcttcccatgaccacctcctcctgctgaaatattactgcttgaatctggagcagattgcgggtttataaaactgctttttatctgagaacaaacgggtttggaaattagtcgtcttttttccccactcccagagctgctcaaatcattccaccggccccctcggcttgggacagggtagtgtaactcccgatcccagggcctagccctgacacaggtggcttcccgtatcccggtgggaaaacgccctgccaccagcgggcttgagctggcctgtgtccctccactgcctgcaccacccacctccagagtgcagtgctgggcaagggcagctcaagaggacaggaccaggcgcttggcaagacatcagacacacccaacccaaaggcgtggaccccaggcccggcccgtggtacccagcaggtggcactgcagctccccgctcctgcaggtccagcgtcctcacaggaacaccagggcctgtgctccggagccttccttcagacccttcctccacgtgcccacttgggatgcagaatgcagcggagctaggaccccctccacggcctggacctcggctgcagtaaagttacgtgaggcctgtctctcggggcctggaagtggcagccatcagttgctcttgctgacccctcggagcaagcgccgcacaggtggtggctgagacagctggcgcggggggccccaagctgcgccggcctccagcccacccacagctgttgctgaagtcaggcctccctccccagcactggtatctgagtaacggctaagaacctccttcctctggttttgaaaagcagttcgggttgtccaattctgtaacattcatctccattttttaaaaaggtttctctgacggccccacggcccgagccgcggtgagcgtcgtgttgcatgagcctgggccccgggcttcccgtgcgcctctgccgcaggtgcttctgggcacccatcctctgcgtttcatttgcagtcgactgtacagaaggcactcaccacaataaacctttcctgaaagcaaaaagaatcggagcagaccacccaacggagcccgagccgccgcgcacgcacccaagaacgcgcgcatcggggccggcaagagacacggaggggccgacaggcgcacgccgcggttagcaagggcccacgaggggtgtaaagggcgggggcgaaaacggggggaagacagcgcgtacggagcacaagggggacggggcaccagcaagcggcaaacacaaggcaacccgcggctccgatagcgcacgaacggaacgaccgggcggctcaggacgag

SEQ ID NO: 370250 - DNA, 3481 bp, Homo sapiens
  misc_feature (92)..(92): n is a, c, g, or t
aggtatttcagtacggggcctgggctttaattgaggtatagatggttgcctaggttatacacatatttactcgttgctgaacgtgcgcaggnaggcctcttctgaagagctgaaagctgcctaccggaggctctgtatgctctaccatccagacaagcacagagacccagagctcaagtcacaggcggaacgactgtttaaccttgttcaccaggcttatgaagtgcttagtgacccccaaaccagggccatctatgatatatatgggaagagaggactggaaatggaaggatgggaggttgtggaaaggaggagaacccctgctgaaattcgagaggagtttgagcggctgcagagagagagagaagagaggagattgcagcagcgaaccaatcccaagggaacgatcagcgttggagtagatgccaccgacctttttgatcgctatgatgaggagtatgaagatgtgtccggcagtagctttccgcagattgaaattaataaaatgcacatatcccagtccattgaggcacccttgacagcgacagacacagccatcctctctggaagcctctcaacccagaatggaaatggaggaggttccattaactttgcgctcagacgagtaacttcggcaaagggatggggagagttggaatttggagctggagacctacaggggcctttgttcggtctcaagctgttccgtaatctcacaccaagatgctttgtgacaacaaactgtgctctgcagttttcatcccgtggaatccgacccggcctgaccactgtcctagctcggaacctagacaagaacaccgtgggctacctgcagtggcgatggggtatccagtcagccatgaacactagcatcgtccgagacactaaaaccagccacttcactgtggccctgcagctgggaatccctcactcctttgcactgatcagctatcagcacaaattccaagatgacgatcagactcgtgtgaaaggatccctcaaagcaggcttctttgggacggtggtggagtacggagctgagaggaagatctccaggcacagcgttttgggtgcagctgtcagcgttggagttccacagggcgtttctctcaaagtcaagctcaacagggccagtcagacatacttcttccctattcacttgacggaccagcttctgcccagcgccatgttctatgccaccgtggggcctctagtggtctactttgccatgcaccgtctgatcatcaaaccatacctcagggctcagaaagagaaggaattggagaagcagagggaaagcgccgccaccgatgtgctgcagaagaagcaagaggcggagtccgctgtccggctgatgcaggaatctgtccgaaggataattgaggcagaagagtccagaatgggcctcatcatcgtcaatgcctggtacgggaagtttgtcaatgacaagagcaggaagagcgagaaggtgaaggtgattgacgtgactgtgcccctgcagtgcctggtgaaggactcgaagctcatcctcacggaggcctccaaggctgggctgcctggcttttatgacccgtgtgtgggggaagagaagaacctgaaagtgctctatcagttccggggcgtcctgcatcaggtgatggtgctggacagtgaggccctccggataccaaagcagtcccacaggatcgatacagatggataaactgccaagaaccagatttttaaaaggccgcaaaaaatcttttcctgggagtctacaaatttggaaatgaaaaaacccagacatcagatgtttttattttatattattattatagaaggtggtaccattatcaattatgtgaagggacatgcagacaccccagcttttgagggtgctgggggtaggactgaggcagccccactgggaaccagactgcagcctggcccatggctgttttcccaaggatcagttcctggagggaagggctctggccctgactccgctgtgtcccgagcacacgtgctgaccgcagcccgccgccctgtagttcttggctgggtctggaggtgtctgtggagcaccctgccctcaccacaggagcgtgagccacttctgcagtccacgctgaacatgggaaacaacctgaaaagcaggcaggcctcccggtcagggagcctctgctgtgctggcttcccatgaccacctcctcctgctgaaatattactgcttgaatctggagcagattgcgggtttataaaactgctttttatctgagaacaaacgggtttggaaattagtcgtcttttttccccactcccagagctgctcaaatcattccaccggccccctcggcttgggacagggtagtgtaactcccgatcccagggcctagccctgacacaggtggcttcccgtatcccggtgggaaaacgccctgccaccagcgggcttgagctggcctgtgtccctccactgcctgcaccacccacctccagagtgcagtgctgggcaagggcagctcaagaggacaggaccaggcgcttggcaagacatcagacacacccaacccaaaggcgtggaccccaggcccggcccgtggtacccagcaggtggcactgcagctccccgctcctgcaggtccagcgtcctcacaggaacaccagggcctgtgctccggagccttccttcagacccttcctccacgtgcccacttgggatgcagaatgcagcggagctaggaccccctccacggcctggacctcggctgcagtaaagttacgtgaggcctgtctctcggggcctggaagtggcagccatcagttgctcttgctgacccctcggagcaagcgccgcacaggtggtggctgagacagctggcgcggggggccccaagctgcgccggcctccagcccacccacagctgttgctgaagtcaggcctccctccccagcactggtatctgagtaacggctaagaacctccttcctctggttttgaaaagcagttcgggttgtccaattctgtaacattcatctccattttttaaaaaggtttctctgacggccccacggcccgagccgcggtgagcgtcgtgttgcatgagcctgggccccgggcttcccgtgcgcctctgccgcaggtgcttctgggcacccatcctctgcgtttcatttgcagtcgactgtacagaaggcactcaccacaataaacctttcctgaaagcaaaaagaatcggagcagaccacccaacggagcccgagccgccgcgcacgcacccaagaacgcgcgcatcggggccggcaagagacacggaggggccgacaggcgcacgccgcggttagcaagggcccacgaggggtgtaaagggcgggggcgaaaacggggggaagacagcgcgtacggagcacaagggggacggggcaccagcaagcggcaaacacaaggcaacccgcggctccgatagcgcacgaacggaacgaccgggcggctcaggacgag

SEQ ID NO: 370251 - DNA, 3536 bp, Homo sapiens
tgctggtacggcccggagttatgggatgacggctccgggccgccaggggccgctgtggcgcagccgggctggcccgcgctgtccctgacgcggatcactggcccctcttgagcacggccttgccggtttggcggggtgaaaggttgcgaagatggcgacggccttgagcgaggaggagctggacaatgaagactattactcgttgctgaacgtgcgcagggaggcctcttctgaagagctgaaagctgcctaccggaggctctgtatgctctaccatccagacaagcacagagacccagagctcaagtcacaggcggaacgactgtttaaccttgttcaccaggcttatgaaggttgtggaaaggaggagaacccctgctgaaattcgagaggagtttgagcggctgcagagagagagagaagagaggagattgcagcagcgaaccaatcccaagggaacgatcagcgttggagtagatgccaccgacctttttgatcgctatgatgaggagtatgaagatgtgtccggcagtagctttccgcagattgaaattaataaaatgcacatatcccagtccattgaggcacccttgacagcgacagacacagccatcctctctggaagcctctcaacccagaatggaaatggaggaggttccattaactttgcgctcagacgagtaacttcggcaaagggatggggagagttggaatttggagctggagacctacaggggcctttgttcggtctcaagctgttccgtaatctcacaccaagatgctttgtgacaacaaactgtgctctgcagttttcatcccgtggaatccgacccggcctgaccactgtcctagctcggaacctagacaagaacaccgtgggctacctgcagtggcgatggggtatccagtcagccatgaacactagcatcgtccgagacactaaaaccagccacttcactgtggccctgcagctgggaatccctcactcctttgcactgatcagctatcagcacaaattccaagatgacgatcagactcgtgtgaaaggatccctcaaagcaggcttctttgggacggtggtggagtacggagctgagaggaagatctccaggcacagcgttttgggtgcagctgtcagcgttggagttccacagggcgtttctctcaaagtcaagctcaacagggccagtcagacatacttcttccctattcacttgacggaccagcttctgcccagcgccatgttctatgccaccgtggggcctctagtggtctactttgccatgcaccgtctgatcatcaaaccatacctcagggctcagaaagagaaggaattggagaagcagagggaaagcgccgccaccgatgtgctgcagaagaagcaagaggcggagtccgctgtccggctgatgcaggaatctgtccgaaggataattgaggcagaagagtccagaatgggcctcatcatcgtcaatgcctggtacgggaagtttgtcaatgacaagagcaggaagagcgagaaggtgaaggtgattgacgtgactgtgcccctgcagtgcctggtgaaggactcgaagctcatcctcacggaggcctccaaggctgggctgcctggcttttatgacccgtgtgtgggggaagagaagaacctgaaagtgctctatcagttccggggcgtcctgcatcaggtgatggtgctggacagtgaggccctccggataccaaagcagtcccacaggatcgatacagatggataaactgccaagaaccagatttttaaaaggccgcaaaaaatcttttcctgggagtctacaaatttggaaatgaaaaaacccagacatcagatgtttttattttatattattattatagaaggtggtaccattatcaattatgtgaagggacatgcagacaccccagcttttgagggtgctgggggtaggactgaggcagccccactgggaaccagactgcagcctggcccatggctgttttcccaaggatcagttcctggagggaagggctctggccctgactccgctgtgtcccgagcacacgtgctgaccgcagcccgccgccctgtagttcttggctgggtctggaggtgtctgtggagcaccctgccctcaccacaggagcgtgagccacttctgcagtccacgctgaacatgggaaacaacctgaaaagcaggcaggcctcccggtcagggagcctctgctgtgctggcttcccatgaccacctcctcctgctgaaatattactgcttgaatctggagcagattgcgggtttataaaactgctttttatctgagaacaaacgggtttggaaattagtcgtcttttttccccactcccagagctgctcaaatcattccaccggccccctcggcttgggacagggtagtgtaactcccgatcccagggcctagccctgacacaggtggcttcccgtatcccggtgggaaaacgccctgccaccagcgggcttgagctggcctgtgtccctccactgcctgcaccacccacctccagagtgcagtgctgggcaagggcagctcaagaggacaggaccaggcgcttggcaagacatcagacacacccaacccaaaggcgtggaccccaggcccggcccgtggtacccagcaggtggcactgcagctccccgctcctgcaggtccagcgtcctcacaggaacaccagggcctgtgctccggagccttccttcagacccttcctccacgtgcccacttgggatgcagaatgcagcggagctaggaccccctccacggcctggacctcggctgcagtaaagttacgtgaggcctgtctctcggggcctggaagtggcagccatcagttgctcttgctgacccctcggagcaagcgccgcacaggtggtggctgagacagctggcgcggggggccccaagctgcgccggcctccagcccacccacagctgttgctgaagtcaggcctccctccccagcactggtatctgagtaacggctaagaacctccttcctctggttttgaaaagcagttcgggttgtccaattctgtaacattcatctccattttttaaaaaggtttctctgacggccccacggcccgagccgcggtgagcgtcgtgttgcatgagcctgggccccgggcttcccgtgcgcctctgccgcaggtgcttctgggcacccatcctctgcgtttcatttgcagtcgactgtacagaaggcactcaccacaataaacctttcctgaaagcaaaaagaatcggagcagaccacccaacggagcccgagccgccgcgcacgcacccaagaacgcgcgcatcggggccggcaagagacacggaggggccgacaggcgcacgccgcggttagcaagggcccacgaggggtgtaaagggcgggggcgaaaacggggggaagacagcgcgtacggagcacaagggggacggggcaccagcaagcggcaaacacaaggcaacccgcggctccgatagcgcacgaacggaacgaccgggcggctcaggacgag

SEQ ID NO: 370252 - DNA, 3352 bp, Homo sapiens
ccactagcatagtcacgggctttacttctggagccagggtggtgtcaccttctccaggaccaagtggatttccacaaaccagtgtggggaggggtgtgaatggcaatcacatatactgatcattcaacccagaaacctgagcgtcgtctctgatttttccttctctactcttggcatcctgtaggttgaaatatcacagggttgattccgctttctaaatgtttctcagattgaatttttttcctttggatctcagtgaccacattccaggggaacgatcagcgttggagtagatgccaccgacctttttgatcgctatgatgaggagtatgaagatgtgtccggcagtagctttccgcagattgaaattaataaaatgcacatatcccagtccattgaggcacccttgacagcgacagacacagccatcctctctggaagcctctcaacccagaatggaaatggaggaggttccattaactttgcgctcagacgagtaacttcggcaaagggatggggagagttggaatttggagctggagacctacaggggcctttgttcggtctcaagctgttccgtaatctcacaccaagatgctttgtgacaacaaactgtgctctgcagttttcatcccgtggaatccgacccggcctgaccactgtcctagctcggaacctagacaagaacaccgtgggctacctgcagtggcgatggggtatccagtcagccatgaacactagcatcgtccgagacactaaaaccagccacttcactgtggccctgcagctgggaatccctcactcctttgcactgatcagctatcagcacaaattccaagatgacgatcagactcgtgtgaaaggatccctcaaagcaggcttctttgggacggtggtggagtacggagctgagaggaagatctccaggcacagcgttttgggtgcagctgtcagcgttggagttccacagggcgtttctctcaaagtcaagctcaacagggccagtcagacatacttcttccctattcacttgacggaccagcttctgcccagcgccatgttctatgccaccgtggggcctctagtggtctactttgccatgcaccgtctgatcatcaaaccatacctcagggctcagaaagagaaggaattggagaagcagagggaaagcgccgccaccgatgtgctgcagaagaagcaagaggcggagtccgctgtccggctgatgcaggaatctgtccgaaggataattgaggcagaagagtccagaatgggcctcatcatcgtcaatgcctggtacgggaagtttgtcaatgacaagagcaggaagagcgagaaggtgaaggtgattgacgtgactgtgcccctgcagtgcctggtgaaggactcgaagctcatcctcacggaggcctccaaggctgggctgcctggcttttatgacccgtgtgtgggggaagagaagaacctgaaagtgctctatcagttccggggcgtcctgcatcaggtgatggtgctggacagtgaggccctccggataccaaagcagtcccacaggatcgatacagatggataaactgccaagaaccagatttttaaaaggccgcaaaaaatcttttcctgggagtctacaaatttggaaatgaaaaaacccagacatcagatgtttttattttatattattattatagaaggtggtaccattatcaattatgtgaagggacatgcagacaccccagcttttgagggtgctgggggtaggactgaggcagccccactgggaaccagactgcagcctggcccatggctgttttcccaaggatcagttcctggagggaagggctctggccctgactccgctgtgtcccgagcacacgtgctgaccgcagcccgccgccctgtagttcttggctgggtctggaggtgtctgtggagcaccctgccctcaccacaggagcgtgagccacttctgcagtccacgctgaacatgggaaacaacctgaaaagcaggcaggcctcccggtcagggagcctctgctgtgctggcttcccatgaccacctcctcctgctgaaatattactgcttgaatctggagcagattgcgggtttataaaactgctttttatctgagaacaaacgggtttggaaattagtcgtcttttttccccactcccagagctgctcaaatcattccaccggccccctcggcttgggacagggtagtgtaactcccgatcccagggcctagccctgacacaggtggcttcccgtatcccggtgggaaaacgccctgccaccagcgggcttgagctggcctgtgtccctccactgcctgcaccacccacctccagagtgcagtgctgggcaagggcagctcaagaggacaggaccaggcgcttggcaagacatcagacacacccaacccaaaggcgtggaccccaggcccggcccgtggtacccagcaggtggcactgcagctccccgctcctgcaggtccagcgtcctcacaggaacaccagggcctgtgctccggagccttccttcagacccttcctccacgtgcccacttgggatgcagaatgcagcggagctaggaccccctccacggcctggacctcggctgcagtaaagttacgtgaggcctgtctctcggggcctggaagtggcagccatcagttgctcttgctgacccctcggagcaagcgccgcacaggtggtggctgagacagctggcgcggggggccccaagctgcgccggcctccagcccacccacagctgttgctgaagtcaggcctccctccccagcactggtatctgagtaacggctaagaacctccttcctctggttttgaaaagcagttcgggttgtccaattctgtaacattcatctccattttttaaaaaggtttctctgacggccccacggcccgagccgcggtgagcgtcgtgttgcatgagcctgggccccgggcttcccgtgcgcctctgccgcaggtgcttctgggcacccatcctctgcgtttcatttgcagtcgactgtacagaaggcactcaccacaataaacctttcctgaaagcaaaaagaatcggagcagaccacccaacggagcccgagccgccgcgcacgcacccaagaacgcgcgcatcggggccggcaagagacacggaggggccgacaggcgcacgccgcggttagcaagggcccacgaggggtgtaaagggcgggggcgaaaacggggggaagacagcgcgtacggagcacaagggggacggggcaccagcaagcggcaaacacaaggcaacccgcggctccgatagcgcacgaacggaacgaccgggcggctcaggacgag

SEQ ID NO: 370253 - DNA, 3118 bp, Homo sapiens
tgctggtacggcccggagttatgggatgacggctccgggccgccaggggccgctgtggcgcagccgggctggcccgcgctgtccctgacgcggatcactggcccctcttgagcacggccttgccggtttggcggggtgaaaggttgcgaagatggcgacggccttgagcgaggaggagctggacaatgaagactattactcgttgctgaacgtgcgcagggaggcctcttctgaagagctgaaagctgcctaccggaggctctgtatgctctaccatccagacaagcacagagacccagagctcaagtcacaggcggaacgactgtttaaccttgttcaccaggcttatgaagtgcttagtgacccccaaaccagggccatctatgatatatatgggaagagaggactggaaatggaaggatgggaggttgtggaaaggaggagaacccctgctgaaattcgagaggagtttgagcggctgcagagagagagagaagagaggagattgcagcagcgaaccaatcccaagggaacgatcagcgttggagtagatgccaccgacctttttgatcgctatgatgaggagtatgaagatgtgtccggcagtagctttccgcagattgaaattaataaaatgcacatatcccagtccattgaggcacccttgacagcgacagacacagccatcctctctggaagcctctcaacccagaatggaaatggaggaggttccattaactttgcgctcagacgagtaacttcggcaaagggatggggagagttggaatttggagctggagacctacaggggcctttgttcggtctcaagctgttccgtaatctcacaccaagatgctttgtgacaacaaactgtgctctgcagttttcatcccgtggaatccgacccggcctgaccactgtcctagctcggaacctagacaagaacaccgtgggctacctgcagtggcgatggggtatccagtcagccatgaacactagcatcgtccgagacactaaaaccagccacttcactgtggccctgcagctgggaatccctcactcctttgcactgatcagctatcagcacaaattccaagatgacgatcagactcgtgtgaaaggatccctcaaagcaggcttctttgggacggtggtggagtacggagctgagaggaagatctccaggcacagcgttttgggtgcagctgtcagcgttggagttccacagggcgtttctctcaaagtcaagctcaacagggccagtcagacatacttcttccctattcacttgacggaccagcttctgcccagcgccatgttctatgccaccgtggggcctctagtggtctactttgccatgcaccgtctgatcatcaaaccatacctcagggctcagaaagagaaggaattggagaagcagagggaaagcgccgccaccgatgtgctgcagaagaagcaagaggcggagtccgctgtccggctgatgcaggaatctgtccgaaggataattgaggcagaagagtccagaatgggcctcatcatcgtcaatgcctggtacgggaagtttgtcaatgacaagagcaggaagagcgagaaggtgaaggtgattgacgtgactgtgcccctgcagtgcctggtgaaggactcgaagctcatcctcacggaggcctccaaggctgggctgcctggcttttatgacccgtgtgtgggggaagagaagaacctgaaagtgctctatcagttccggggcgtcctgcatcaggtgatggtgctggacagtgaggccctccggataccaaagcagtcccacaggatcgatacagatggataaactgccaagaaccagatttttaaaaggccgcaaaaaatcttttcctgggagtctacaaatttggaaatgaaaaaacccagacatcagatgtttttattttatattattattatagaaggtggtaccattatcaattatgtgaagggacatgcagacaccccagcttttgagggtgctgggggtaggactgaggcagccccactgggaaccagactgcagcctggcccatggctgttttcccaaggatcagttcctggagggaagggctctggccctgactccgctgtgtcccgagcacacgtgctgaccgcagcccgccgccctgtagttcttggctgggtctggaggtgtctgtggagcaccctgccctcaccacaggagcgtgagccacttctgcagtccacgctgaacatgggaaacaacctgaaaagcaggcaggcctcccggtcagggagcctctgctgtgctggcttcccatgaccacctcctcctgctgaaatattactgcttgaatctggagcagattgcgggtttataaaactgctttttatctgagaacaaacgggtttggaaattagtcgtcttttttccccactcccagagctgctcaaatcattccaccggccccctcggcttgggacagggtagtgtaactcccgatcccagggcctagccctgacacaggtggcttcccgtatcccggtgggaaaacgccctgccaccagcgggcttgagctggcctgtgtccctccactgcctgcaccacccacctccagagtgcagtgctgggcaagggcagctcaagaggacaggaccaggcgcttggcaagacatcagacacacccaacccaaaggcgtggaccccaggcccggcccgtggtacccagcaggtggcactgcagctccccgctcctgcaggtccagcgtcctcacaggaacaccagggcctgtgctccggagccttccttcagacccttcctccacgtgcccacttgggatgcagaatgcagcggagctaggaccccctccacggcctggacctcggctgcagtaaagttacgtgaggcctgtctctcggggcctggaagtggcagccatcagttgctcttgctgacccctcggagcaagcgccgcacaggtggtggctgagacagctggcgcggggggccccaagctgcgccggcctccagcccacccacagctgttgctgaagtcaggcctccctccccagcacaggcctctggagttggccaggcctctggagttgggcaggcctctggagttggg

SEQ ID NO: 370254 - DNA, 2390 bp, Homo sapiens
tgctggtacggcccggagttatgggatgacggctccgggccgccaggggccgctgtggcgcagccgggctggcccgcgctgtccctgacgcggatcactggcccctcttgagcacggccttgccggtttggcggggtgaaaggttgcgaagatggcgacggccttgagcgaggaggagctggacaatgaagactattactcgttgctgaacgtgcgcagggaggcctcttctgaagagctgaaagctgcctaccggaggctctgtatgctctaccatccagacaagcacagagacccagagctcaagtcacaggcggaacgactgtttaaccttgttcaccaggcttatgaagtgcttagtgacccccaaaccagggccatctatgatatatatgggaagagaggactggaaatggaaggatgggaggttgtggaaaggaggagaacccctgctgaaattcgagaggagtttgagcggctgcagagagagagagaagagaggagattgcagcagcgaaccaatcccaagggaacgatcagcgttggagtagatgccaccgacctttttgatcgctatgatgaggagtatgaagatgtgtccggcagtagctttccgcagattgaaattaataaaatgcacatatcccagtccattgaggcacccttgacagcgacagacacagccatcctctctggaagcctctcaacccagaatggaaatggaggaggttccattaactttgcgctcagacgagtaacttcggcaaagggatggggagagttggaatttggagctggagacctacaggggcctttgttcggtctcaagctgttccgtaatctcacaccaagatgctttgtgacaacaaactgtgctctgcagttttcatcccgtggaatccgacccggcctgaccactgtcctagctcggaacctagacaagaacaccgtgggctacctgcagtggcgatggggtatccagtcagccatgaacactagcatcgtccgagacactaaaaccagccacttcactgtggccctgcagctgggaatccctcactcctttgcactgatcagctatcagcacaaattccaagatgacgatcagactcgtgtgaaaggatccctcaaagcaggcttctttgggacggtggtggagtacggagctgagaggaagatctccaggcacagcgttttgggtgcagctgtcagcgttggagttccacagggcgtttctctcaaagtcaagctcaacagggccagtcagacatacttcttccctattcacttgacggaccagcttctgcccagcgccatgttctatgccaccgtggggcctctagtggtctactttgccatgcaccgtctgatcatcaaaccatacctcagggctcagaaagagaaggaattggagaagcagagggaaagcgccgccaccgatgtgctgcagaagaagcaagaggcggagtccgctgtccggctgatgcaggaatctgtccgaaggataattgaggcagaagagtccagaatgggcctcatcatcgtcaatgcctggtacgggaagtttgtcaatgacaagagcaggaagagcgagaaggtgaaggtgattgacgtgactgtgcccctgcagtgcctggtgaaggactcgaagctcatcctcacggaggcctccaaggctgggctgcctggcttttatgacccgtgtgtgggggaagagaagaacctgaaagtgctctatcagttccggggcgtcctgcatcaggtgatggtgctggacagtgaggccctccggataccaaagcagtcccacaggatcgatacagatggataaactgccaagaaccagatttttaaaaggccgcaaaaaatcttttcctgggagtctacaaatttggaaatgaaaaaacccagacatcagatgtttttattttatattattattatagaaggtggtaccattatcaattatgtgaagggacatgcagacaccccagcttttgagggtgctgggggtaggactgaggcagccccactgggaaccagactgcagcctggcccatggctgttttcccaaggatcagttcctggagggaagggctctggccctgactccgctgtgtcccgagcacacgtgctgaccgcagcccgccgccctgtagttcttggctgggtctggaggtgtctgtggagcaccctgccctcaccacaggagcgtgagccacttctgcagtccacgctgaacatgggaaacaacctgaaaagcaggcaggcctcccggtcagggagcctctgctgtgctggcttcccatgaccacctcctcctgctgaaatattactgcttgaatctggagcagattgcgggtttataaaactgctttttatctgagaac

SEQ ID NO: 370255 - DNA, 1852 bp, Homo sapiens
tgctggtacggcccggagttatgggatgacggctccgggccgccaggggccgctgtggcgcagccgggctggcccgcgctgtccctgacgcggatcactggcccctcttgagcacggccttgccggtttggcggggtgaaaggttgcgaagatggcgacggccttgagcgaggaggagctggacaatgaagactattactcgttgctgaacgtgcgcagggaggcctcttctgaagagctgaaagctgcctaccggaggctctgtatgctctaccatccagacaagcacagagacccagagctcaagtcacaggcggaacgactgtttaaccttgttcaccaggcttatgaagtgcttagtgacccccaaaccagggccatctatgatatatatgggaagagaggactggaaatggaaggatgggaggttgtggaaaggaggagaacccctgctgaaattcgagaggagtttgagcggctgcagagagagagagaagagaggagattgcagcagcgaaccaatcccaagggaacgatcagcgttggagtagatgccaccgacctttttgatcgctatgatgaggagtatgaagatgtgtccggcagtagctttccgcagattgaaattaataaaatgcacatatcccagtccattgaggcacccttgacagcgacagacacagccatcctctctggaagcctctcaacccagaatggaaatggaggaggttccattaactttgcgctcagacgagtaacttcggcaaagggatggggagagttggaatttggagctggagacctacaggggcctttgttcggtctcaagctgttccgtaatctcacaccaagatgctttgtgacaacaaactgtgctctgcagttttcatcccgtggaatccgacccggcctgaccactgtcctagctcggaacctagacaagaacaccgtgggctacctgcagtggcactgcagctccccgctcctgcaggtccagcgtcctcacaggaacaccagggcctgtgctccggagccttccttcagacccttcctccacgtgcccacttgggatgcagaatgcagcggagctaggaccccctccacggcctggacctcggctgcagtaaagttacgtgaggcctgtctctcggggcctggaagtggcagccatcagttgctcttgctgacccctcggagcaagcgccgcacaggtggtggctgagacagctggcgcggggggccccaagctgcgccggcctccagcccacccacagctgttgctgaagtcaggcctccctccccagcactggtatctgagtaacggctaagaacctccttcctctggttttgaaaagcagttcgggttgtccaattctgtaacattcatctccattttttaaaaaggtttctctgacggccccacggcccgagccgcggtgagcgtcgtgttgcatgagcctgggccccgggcttcccgtgcgcctctgccgcaggtgcttctgggcacccatcctctgcgtttcatttgcagtcgactgtacagaaggcactcaccacaataaacctttcctgaaagcaaaaagaatcggagcagaccacccaacggagcccgagccgccgcgcacgcacccaagaacgcgcgcatcggggccggcaagagacacggaggggccgacaggcgcacgccgcggttagcaagggcccacgaggggtgtaaagggcgggggcgaaaacggggggaagacagcgcgtacggagcacaagggggacggggcaccagcaagcggcaaacacaaggcaacccgcggctccgatagcgcacgaacggaacgaccgggcggctcaggacgag

SEQ ID NO: 370256 - DNA, 1152 bp, Homo sapiens
tgctggtacggcccggagttatgggatgacggctccgggccgccaggggccgctgtggcgcagccgggctggcccgcgctgtccctgacgcggatcactggcccctcttgagcacggccttgccggtttggcggggtgaaaggttgcgaagatggcgacggccttgagcgaggaggagctggacaatgaagactattactcgttgctgaacgtgcgcagggaggcctcttctgaagagctgaaagctgcctaccggaggctctgtatgctctaccatccagacaagcacagagacccagagctcaagtcacaggcggaacgactgtttaaccttgttcaccaggcttatgaagtgcttagtgacccccaaaccagggccatctatgatatatatgggaagagaggactggaaatggaaggatgggaggttgtggaaaggaggagaacccctgctgaaattcgagaggagtttgagcggctgcagagagagagagaagagaggagattgcagcagcgaaccaatcccaagggaacgatcagcgttggagtagatgccaccgacctttttgatcgctatgatgaggagtatgaagatgtgtccggcagtagctttccgcagattgaaattaataaaatgcacatatcccagtccattgaggcacccttgacagcgacagacacagccatcctctctggaagcctctcaacccagaatggaaatggaggaggttccattaactttgcgctcagacgagtaacttcggcaaagggatggggagaggtaagaatgtctattggctgagttgtgttgtctgtgcaaagccttatttctgaacatttacactctcaaagctcaccctcaaactcaccctgggggccccgttgttgtgtaagaacggtaccaagtgtcaagcttccataagttgactggtcctaaaagaaaaataggtctcatgagcctggccaacatggtgaaaccccgtctctactaaaaatacaaaacttagctgggcatggtggcacctgcctgtaatcccagctacttgggaggctgaggcaggagaatcacgagaatcacatgaacccaggaggcagaggttgcagcgagtcaagatcgcgccgttgcactccagtctgggggacaagagcaaa

SEQ ID NO: 370257 - DNA, 415 bp, Homo sapiens
tctacgtgtgtgtgacatttttggagagcttcctattttgaggctgtgggggatttaacactacagtcccagcccttgaggagcttagagagtgttgtggaagaactagaccatgggtgtcccaactttcttctgtcatgaatctgctccctgggggtcgaggaggctggagggagggaagggaaggtacctggcctcttctcaaatgacagctgcccctgaagtgatgaatgaggggcacaggcacagaccgcgttctctccctgcagagcaggcttctttgggacggtggtggagtacggagctgagaggaagatctccaggcacagcgttttgggtgcagctgtcagcgttggagttccacagggcgtttctctcaaagtcaagtaagttgaacttaggcctttcgggtcaa

SEQ ID NO: 370258 - DNA, 476 bp, Homo sapiens
ccaagtagattatgacttttcctaaaacttaacatgacagagatttgccttccagggggtctaatttgaagaggaaagtaatttaaatgtataggtttatataatagcattgtatttttctctattttattcattctttcattctcttcgatgactcccagcacctgcgcgtccatcttcattcttagccaatgacctttccttttacttaacagagaaaataacaatcagaagagtcttcataagttcccaccccgtctgcccgctttctacagccaaccccacatgccctgccttctctcctttcactgtggatgaaccgcccgtgccccaagcaaagacaaaccctccacttgaacactcacttgctgaaggatgtggcttaggcagttttcctgtctcctgaagccacagtattccccttcaactggattcttctcctcagcatataaatatacttttttttcctatcttta

SEQ ID NO: 370259 - DNA, 1248 bp, Homo sapiens
gctgtcaccatcgagcatggtttcctccctggtcctttccagaccccttactcccccctctctgaacttgcagttggaataggatagaggacaaggacatcagcaaaaacatgagcaactccccaggctccctttacctcactttctccacctgtgaacctgtggtagcccctctctgagtttgctgcaagggcccagtgagcttgccataatcagacgcagcagacacgggaagctcctgctctgccaccatgcagggatggaaaatctgtccactggaatccaggggaagggatggaagaggaagaaaaacaagcttggagcagtccaacccagctagggccctccattccctcagggacaccccacacccaccccacacactgggatgaacccttgcagaggaacaattcagatggtcacacattccaggacccaaatccgtaaacacaaagcatgtccgtcagtgccagcacctccccccggcgaatcaagcagctgtcccagagggcaaagggtctctgcagccatctgctttcatcagggctgcagcccccaggcagcagtactgggagcccctctcatctccgagaataaactctgaagccagcgaccctgcggacctgaatcatcagggagcctgtcagaggaggggcagtgactctgcgggacaagcaagcaggctatataagtttcagaaggctgggctccactcagatcttttccagcagctgctgcctgccagagaggcgccttcagagacccagcgcttacacaatacccaccatgtcccaggctggtgctcaggaagcccctatcaagaagaagcgcccccctgtgaaggaggaggacctgaagggggcccgaggaaacctgaccaagaaccaggaaatcaagtccaagacctaccaggtcatgcgagagtgtgagcaagctggctcggccgccccgtcggtgttcagccgcacccgcacaggtaccgagactgtctttgagaagcccaaagccggacccaccaagagtgtcttcggctgagaagtgtgcgccactccccttgctgcccgaatgctcggaaacaggagccttacccaggaactcttttttatgccagaacgcttcctctcccctgctgtctctggggctgccaccctcccccacagtccaggcccttcagccaagggctctgcaccagcaccttggaagcaccaataaagaggatgcccacgtggccccagcaaaaaaaaaaag

SEQ ID NO: 370260 - DNA, 2971 bp, Homo sapiens
attccccacttgctgtcgagttcagaagcctcctggcagacactggagccacgatgaagcccccaaggcctgtccgtacctgcagcaaagttctcgtcctgctttcactgctggccatccaccagactactactgccgaaaagaatggcatcgacatctacagcctcaccgtggactccagggtctcatcccgatttgcccacacggtcgtcaccagccgagtggtcaatagggccaatactgtgcaggaggccaccttccagatggagctgcccaagaaagccttcatcaccaacttctccatgatcatcgatggcatgacctacccagggatcatcaaggagaaggctgaagcccaggcacagtacagcgcagcagtggccaagggaaagagcgctggcctcgtcaaggccaccgggagaaacatggagcagttccaggtgtcggtcagtgtggctcccaatgccaagatcacctttgagctggtctatgaggagctgctcaagcggcgtttgggggtgtacgagctgctgctgaaagtgcggccccagcagctggtcaagcacctgcagatggacattcacatcttcgagccccagggcatcagctttctggagacagagagcaccttcatgaccaaccagctggtagacgccctcaccacctggcagaataagaccaaggctcacatccggttcaagccaacactttcccagcagcaaaagtccccagagcagcaagaaacagtcctggacggcaacctcattatccgctatgatgtggaccgggccatctccgggggctccattcagatcgagaacggctactttgtacactactttgcccccgagggcctaaccacaatgcccaagaatgtggtctttgtcattgacaagagcggctccatgagtggcaggaaaatccagcagacccgggaagccctaatcaagatcctggatgacctcagccccagagaccagttcaacctcatcgtcttcagtacagaagcaactcagtggaggccatcactggtgccagcctcagccgagaacgtgaacaaggccaggagctttgctgcgggcatccaggccctgggagggaccaacatcaatgatgcaatgctgatggctgtgcagttgctggacagcagcaaccaggaggagcggctgcccgaagggagtgtctcactcatcatcctgctcaccgatggcgaccccactgtgggggagactaaccccaggagcatccagaataacgtgcgggaagctgtaagtggccggtacagcctcttctgcctgggcttcggtttcgacgtcagctatgccttcctggagaagctggcactggacaatggcggcctggcccggcgcatccatgaggactcagactctgccctgcagctccaggacttctaccaggaagtggccaacccactgctgacagcagtgaccttcgagtacccaagcaatgccgtggaggaggtcactcagaacaacttccggctcctcttcaagggctcagagatggtggtggctgggaagctccaggaccgggggcctgatgtgctcacagccacagtcagtgggaagctgcctacacagaacatcactttccaaacggagtccagtgtggcagagcaggaggcggagttccagagccccaagtatatcttccacaacttcatggagaggctctgggcatacctgactatccagcagctgctggagcaaactgtctccgcatccgatgctgatcagcaggccctccggaaccaagcgctgaatttatcacttgcctacagctttgtcacgcctctcacatctatggtagtcaccaaacccgatgaccaagagcagtctcaagttgctgagaagcccatggaaggcgaaagtagaaacaggaatgtccactcaggttccactttcttcaaatattatctccagggagcaaaaataccaaaaccagaggcttccttttctccaagaagaggatggaatagacaagctggagctgctggctcccggatgaatttcagacctggggttctcagctccaggcaacttggactcccaggacctcctgatgttcctgaccatgctgcttaccaccccttccgccgtctggccatcttgcctgcttcagcaccaccagccacctcaaatcctgatccagctgtgtctcgtgtcatgaatatgaaaaaaacaaccatgacaacccaaaccccagccacaggctccctctgccatcctgccactgcctgggcagagtgtggagcggctctgtgtggaccccagacaccgccaggggccagtgaacctgctctcagaccctgagcaaggggttgaggtgactggccagtatgagagggagaaggctgggttctcatggatcgaagtgaccttcaagaaccccctggtatgggttcacgcatcccctgaacacgtggtggtgactcggaaccgaagaagctctgcgtacaagtggaaggagacgctattctcagtgatgcccggcctgaagatgaccatggacaagacgggtctcctgctgctcagtgacccagacaaagtgaccatcggcctgttgttctgggatggccgtggggaggggctccggctccttctgcgtgacactgaccgcttctccagccacgttggagggacccttggccagttttaccaggaggtgctctggggatctccagcagcatcagatgacggcagacgcacgctgagggttcagggcaatgaccactctgccaccagagagcgcaggctggattaccaggaggggcccccgggagtggagatttcctgctggtctgtggagctgtagttctgatggaaggagctgtgcccaccctgtacacttggcttccccctgcaactgcagggccgcttctggggcctggaccaccatggggaggaagagtcccactcattacaaataaagaaaggtggtgtgagcctgg

SEQ ID NO: 370261 - DNA, 3047 bp, Homo sapiens
gccccacagtgagaggaaggaaggcaacagtcgccagcagccgatgtgaagaccggactccgtgcgcccctcgccgcctctgcctggccacatcgatgttgtgtccgccgcctgctcgcccggaccacgatgaagcccccaaggcctgtccgtacctgcagcaaagttctcgtcctgctttcactgctggccatccaccagactactactgccgaaaagaatggcatcgacatctacagcctcaccgtggactccagggtctcatcccgatttgcccacacggtcgtcaccagccgagtggtcaatagggccaatactgtgcaggaggccaccttccagatggagctgcccaagaaagccttcatcaccaacttctccatgatcatcgatggcatgacctacccagggatcatcaaggagaaggctgaagcccaggcacagtacagcgcagcagtggccaagggaaagagcgctggcctcgtcaaggccaccgggagaaacatggagcagttccaggtgtcggtcagtgtggctcccaatgccaagatcacctttgagctggtctatgaggagctgctcaagcggcgtttgggggtgtacgagctgctgctgaaagtgcggccccagcagctggtcaagcacctgcagatggacattcacatcttcgagccccagggcatcagctttctggagacagagagcaccttcatgaccaaccagctggtagacgccctcaccacctggcagaataagaccaaggctcacatccggttcaagccaacactttcccagcagcaaaagtccccagagcagcaagaaacagtcctggacggcaacctcattatccgctatgatgtggaccgggccatctccgggggctccattcagatcgagaacggctactttgtacactactttgcccccgagggcctaaccacaatgcccaagaatgtggtctttgtcattgacaagagcggctccatgagtggcaggaaaatccagcagacccgggaagccctaatcaagatcctggatgacctcagccccagagaccagttcaacctcatcgtcttcagtacagaagcaactcagtggaggccatcactggtgccagcctcagccgagaacgtgaacaaggccaggagctttgctgcgggcatccaggccctgggagggaccaacatcaatgatgcaatgctgatggctgtgcagttgctggacagcagcaaccaggaggagcggctgcccgaagggagtgtctcactcatcatcctgctcaccgatggcgaccccactgtgggggagactaaccccaggagcatccagaataacgtgcgggaagctgtaagtggccggtacagcctcttctgcctgggcttcggtttcgacgtcagctatgccttcctggagaagctggcactggacaatggcggcctggcccggcgcatccatgaggactcagactctgccctgcagctccaggacttctaccaggaagtggccaacccactgctgacagcagtgaccttcgagtacccaagcaatgccgtggaggaggtcactcagaacaacttccggctcctcttcaagggctcagagatggtggtggctgggaagctccaggaccgggggcctgatgtgctcacagccacagtcagtgggaagctgcctacacagaacatcactttccaaacggagtccagtgtggcagagcaggaggcggagttccagagccccaagtatatcttccacaacttcatggagaggctctgggcatacctgactatccagcagctgctggagcaaactgtctccgcatccgatgctgatcagcaggccctccggaaccaagcgctgaatttatcacttgcctacagctttgtcacgcctctcacatctatggtagtcaccaaacccgatgaccaagagcagtctcaagttgctgagaagcccatggaaggcgaaagtagaaacaggaatgtccactcaggttccactttcttcaaatattatctccagggagcaaaaataccaaaaccagaggcttccttttctccaagaagaggatggaatagacaagctggagctgctggctcccggatgaatttcagacctggggttctcagctccaggcaacttggactcccaggacctcctgatgttcctgaccatgctgcttaccaccccttccgccgtctggccatcttgcctgcttcagcaccaccagccacctcaaatcctgatccagctgtgtctcgtgtcatgaatatgaaaaaaacaaccatgacaacccaaaccccagccacaggctccctctgccatcctgccactgcctgggcagagtgtggagcggctctgtgtggaccccagacaccgccaggggccagtgaacctgctctcagaccctgagcaaggggttgaggtgactggccagtatgagagggagaaggctgggttctcatggatcgaagtgaccttcaagaaccccctggtatgggttcacgcatcccctgaacacgtggtggtgactcggaaccgaagaagctctgcgtacaagtggaaggagacgctattctcagtgatgcccggcctgaagatgaccatggacaagacgggtctcctgctgctcagtgacccagacaaagtgaccatcggcctgttgttctgggatggccgtggggaggggctccggctccttctgcgtgacactgaccgcttctccagccacgttggagggacccttggccagttttaccaggaggtgctctggggatctccagcagcatcagatgacggcagacgcacgctgagggttcagggcaatgaccactctgccaccagagagcgcaggctggattaccaggaggggcccccgggagtggagatttcctgctggtctgtggagctgtagttctgatggaaggagctgtgcccaccctgtacacttggcttccccctgcaactgcagggccgcttctggggcctggaccaccatggggaggaagagtcccactcattacaaataaagaaaggtggtgtgagcctgg

SEQ ID NO: 370262 - DNA, 2377 bp, Homo sapiens
gttgaggcagggccggggcgggagggcgctgtcacttggtgatggtgttcgcgttcatgctcttgccgctgccgctgagcacgatgtagggggtcttctgagccttctgcttctcctggagcagggccacggtgcccaggggcgtgtcgctggagctcatcttcttcaggagcgcctcctcgtccagcttcttcatccgccgctctgtcttcatcttgcctgagcccttgccatctccgggggctccattcagatcgagaacggctactttgtacactactttgcccccgagggcctaaccacaatgcccaagaatgtggtctttgtcattgacaagagcggctccatgagtggcaggaaaatccagcagacccgggaagccctaatcaagatcctggatgacctcagccccagagaccagttcaacctcatcgtcttcagtacagaagcaactcagtggaggccatcactggtgccagcctcagccgagaacgtgaacaaggccaggagctttgctgcgggcatccaggccctgggagggaccaacatcaatgatgcaatgctgatggctgtgcagttgctggacagcagcaaccaggaggagcggctgcccgaagggagtgtctcactcatcatcctgctcaccgatggcgaccccactgtgggggagactaaccccaggagcatccagaataacgtgcgggaagctgtaagtggccggtacagcctcttctgcctgggcttcggtttcgacgtcagctatgccttcctggagaagctggcactggacaatggcggcctggcccggcgcatccatgaggactcagactctgccctgcagctccaggacttctaccaggaagtggccaacccactgctgacagcagtgaccttcgagtacccaagcaatgccgtggaggaggtcactcagaacaacttccggctcctcttcaagggctcagagatggtggtggctgggaagctccaggaccgggggcctgatgtgctcacagccacagtcagtgggaagctgcctacacagaacatcactttccaaacggagtccagtgtggcagagcaggaggcggagttccagagccccaagtatatcttccacaacttcatggagaggctctgggcatacctgactatccagcagctgctggagcaaactgtctccgcatccgatgctgatcagcaggccctccggaaccaagcgctgaatttatcacttgcctacagctttgtcacgcctctcacatctatggtagtcaccaaacccgatgaccaagagcagtctcaagttgctgagaagcccatggaaggcgaaagtagaaacaggaatgtccactcagctggagctgctggctcccggatgaatttcagacctggggttctcagctccaggcaacttggactcccaggacctcctgatgttcctgaccatgctgcttaccaccccttccgccgtctggccatcttgcctgcttcagcaccaccagccacctcaaatcctgatccagctgtgtctcgtgtcatgaatatgaaaagttcgtggcccctttccacatccttgcccccagcctgcccttcctgctccaggagccgtgccccggctgtcccagcccccatccacaggctccctctgccatcctgccactgcctgggcagagtgtggagcggctctgtgtggaccccagacaccgccaggggccagtgaacctgctctcagaccctgagcaaggggttgaggtgactggccagtatgagagggagaaggctgggttctcatggatcgaagtgaccttcaagaaccccctggtatgggttcacgcatcccctgaacacgtggtggtgactcggaaccgaagaagctctgcgtacaagtggaaggagacgctattctcagtgatgcccggcctgaagatgaccatggacaagacgggtctcctgctgctcagtgacccagacaaagtgaccatcggcctgttgttctgggatggccgtggggaggggctccggctccttctgcgtgacactgaccgcttctccagccacgttggagggacccttggccagttttaccaggaggtgctctggggatctccagcagcatcagatgacggcagacgcacgctgagggttcagggcaatgaccactctgccaccagagagcgcaggctggattaccaggaggggcccccgggagtggagatttcctgctggtctgtggagctgtagttctgatggaaggagctgtgcccaccctgtacacttggcttccccctgcaactgcagggccgcttctggggcctggaccaccatggggaggaagagtcccactcattacaaataaagaaaggtggtgtgagcctgg

SEQ ID NO: 370263 - DNA, 481 bp, Homo sapiens
  misc_feature (3)..(3): n is a, c, g, or t
tantactactaaattcgcggccgcgtcggctggtgctcaggaagcccctatcaagaagaagcgcccccctgtgaaggaggaggacctgaagggggcccgaggaaacctgaccaagaaccaggaaatcaagtccaagacctaccaggtcatgcgagagtgtgagcaagctggctcggccgccccgtcggtgttcagccgcacccgcacaggtaccgagactgtctttgagaagcccaaagccggacccaccaagagtgtcttcggctgagaagtgtgcgccactccccttgctgcccgaatgctcggaaacaggagccttacccaggaactcttttttatgccagaacgcttcctctcccctgctgtctctggggctgccaccctcccccacagtccaggcccttcagccaagggctctgcaccagcaccttggaagcaccaataaagaggatgcccacgtggccccagcaaaaaaaaaaag

SEQ ID NO: 370264 - DNA, 276 bp, Homo sapiens
  misc_feature (3)..(3): n is a, c, g, or t
tantactactaaattcgcggccgcgtcgacgcacgctgagggttcagggcaatgaccactctgccaccagagagcgcaggctggattaccaggaggggcccccgggagtggagatttcctgctggtctgtggagctgtagttctgatggaaggagctgtgcccaccctgtacacttggcttccccctgcaactgcagggccgcttctggggcctggaccaccatggggaggaagagtcccactcattacaaataaagaaaggtggtgtgagcctgg

SEQ ID NO: 370265 - DNA, 369 bp, Homo sapiens
ccccagtgtgaaggagtgctgagaaaggggcacccctcctgatgagggagggagctgctgcagaactccagggggtgtgatcaggggggactccccatgcaggtcggtgtcagacctggctggggcccagctatgacctctctggtctggtcctcccagggggttgaggtgactggccagtatgagagggagaaggctgggttctcatggatcgaagtgaccttcaagaaccccctggtatgggttcacgcatcccctgaacacgtgttggcttccccctgcaactgcagggccgcttctggggcctggaccaccatggggaggaagagtcccactcattacaaataaagaaaggtggtgtgagcctgg

SEQ ID NO: 370266 - DNA, 4873 bp, Homo sapiens
  misc_feature (28)..(28): n is a, c, g, or t
aagcaggctggtacgccctggagttaanggatggctgcgggtttggcggcgctgcgccggcaggcagcgaggccgggcgggccctgggccctcgcgcccctcccgcgaggcctgtcatgcagggccccgccgggaacgcgagccggggactgccaggcgggccgccctccacagtcgcgtccggggcgggccgctgcgagagcggcgcgctcatgcacagcttcggcatcttcctgcaggggctgctcggcgtcgtggccttcagcacgttaatgctcaaacgcttcagagaaccaaagcatgaaagacgtccgtggaggatatggtttttagacacttccaaacaagccataggaatgctgttcatccactttgcaaatgtatacctagcagatctcactgaagaggacccttgttcactgtacctcatcaacttcctcctggacgccactgtgggcatgctgctcatctacgtgggggtgcgcgccgtcagcgtcctggtagagtggcagcagtgggagtccctgcgcttcggcgaatatggagaccctctgcagtgtggagcctgggtcgggcagtgcgctctttacatcgtgatcatgatttttgaaaagtctgtcgtcttcatcgtcctcctaatacttcagtggaaaaaggtggccctgttgaatcccattgaaaacccagacttgaagctggccatcgtcatgctgatcgtccccttctttgtcaacgctttgatgttttgggtagtggacaatttcctcatgagaaaggggaagacgaaagctaagctagaagaaaggggagccaaccaggactcgaggaatgggagcaaggtccgctaccggagggccgcatcccacgaggagtctgagtctgagatcctgatctcagcggatgatgagatggaggagtccgacgtggaggaggacctccgcagactgacccccctcaagcctgtgaagaaaaagaagcaccgctttgggctacccctgctgcctgccagagaggcgccttcagagacccagcgcttacacaatacccaccatgtcccaggctggtgctcaggaagcccctatcaagaagaagcgcccccctgtgaaggaggaggacctgaagggggcccgaggaaacctgaccaagaaccaggaaatcaagtccaagacctaccaggtcatgcgagagtgtgagcaagctggctcggccgccccgtcggtgttcagccgcacccgcacaggtaccgagactgtctttgagaagcccaaagccggacccaccaagagtgtcttcggctgagaagtgtgcgccactccccttgctgcccgaatgctcggaaacaggagccttacccaggaactcttttttatgccagaacgcttcctctcccctgctgtctctggggctgccaccctcccccacagtccaggcccttcagccaagggctctgcaccagcaccttggaagcaccaataaagaggatgcccacgtggccccagcaaaaaaaaaaagaagcctcctggcagacactggagccacgatgaagcccccaaggcctgtccgtacctgcagcaaagttctcgtcctgctttcactgctggccatccaccagactactactgccgaaaagaatggcatcgacatctacagcctcaccgtggactccagggtctcatcccgatttgcccacacggtcgtcaccagccgagtggtcaatagggccaatactgtgcaggaggccaccttccagatggagctgcccaagaaagccttcatcaccaacttctccatgatcatcgatggcatgacctacccagggatcatcaaggagaaggctgaagcccaggcacagtacagcgcagcagtggccaagggaaagagcgctggcctcgtcaaggccaccgggagaaacatggagcagttccaggtgtcggtcagtgtggctcccaatgccaagatcacctttgagctggtctatgaggagctgctcaagcggcgtttgggggtgtacgagctgctgctgaaagtgcggccccagcagctggtcaagcacctgcagatggacattcacatcttcgagccccagggcatcagctttctggagacagagagcaccttcatgaccaaccagctggtagacgccctcaccacctggcagaataagaccaaggctcacatccggttcaagccaacactttcccagcagcaaaagtccccagagcagcaagaaacagtcctggacggcaacctcattatccgctatgatgtggaccgggccatctccgggggctccattcagatcgagaacggctactttgtacactactttgcccccgagggcctaaccacaatgcccaagaatgtggtctttgtcattgacaagagcggctccatgagtggcaggaaaatccagcagacccgggaagccctaatcaagatcctggatgacctcagccccagagaccagttcaacctcatcgtcttcagtacagaagcaactcagtggaggccatcactggtgccagcctcagccgagaacgtgaacaaggccaggagctttgctgcgggcatccaggccctgggagggaccaacatcaatgatgcaatgctgatggctgtgcagttgctggacagcagcaaccaggaggagcggctgcccgaagggagtgtctcactcatcatcctgctcaccgatggcgaccccactgtgggggagactaaccccaggagcatccagaataacgtgcgggaagctgtaagtggccggtacagcctcttctgcctgggcttcggtttcgacgtcagctatgccttcctggagaagctggcactggacaatggcggcctggcccggcgcatccatgaggactcagactctgccctgcagctccaggacttctaccaggaagtggccaacccactgctgacagcagtgaccttcgagtacccaagcaatgccgtggaggaggtcactcagaacaacttccggctcctcttcaagggctcagagatggtggtggctgggaagctccaggaccgggggcctgatgtgctcacagccacagtcagtgggaagctgcctacacagaacatcactttccaaacggagtccagtgtggcagagcaggaggcggagttccagagccccaagtatatcttccacaacttcatggagaggctctgggcatacctgactatccagcagctgctggagcaaactgtctccgcatccgatgctgatcagcaggccctccggaaccaagcgctgaatttatcacttgcctacagctttgtcacgcctctcacatctatggtagtcaccaaacccgatgaccaagagcagtctcaagttgctgagaagcccatggaaggcgaaagtagaaacaggaatgtccactcaggttccactttcttcaaatattatctccagggagcaaaaataccaaaaccaggtgacaaagtaggaggtggggggaggggagattgacagattgggctcagtcctggctgtggagggtagtgccttgcccagctcctctggctggtgacagccctcgggcctcagttcagttgtatctgatcaggacttgaccacacagaggcttccttttctccaagaagaggatggaatagacaagctggagctgctggctcccggatgaatttcagacctggggttctcagctccaggcaacttggactcccaggacctcctgatgttcctgaccatgctgcttaccaccccttccgccgtctggccatcttgcctgcttcagcaccaccagccacctcaaatcctgatccagctgtgtctcgtgtcatgaatatgaaaaccacaggctccctctgccatcctgccactgcctgggcagagtgtggagcggctctgtgtggaccccagacaccgccaggggccagtgaacctgctctcagaccctgagcaaggggttgaggtgactggccagtatgagagggagaaggctgggttctcatggatcgaagtgaccttcaagaaccccctggtatgggttcacgcatcccctgaacacgtggtggtgactcggaaccgaagaagctctgcgtacaagtggaaggagacgctattctcagtgatgcccggcctgaagatgaccatggacaagacgggtctcctgctgctcagtgacccagacaaagtgaccatcggcctgttgttctgggatggccgtggggaggggctccggctccttctgcgtgacactgaccgcttctccagccacgttggagggacccttggccagttttaccaggaggtgctctggggatctccagcagcatcagatgacggcagacgcacgctgagggttcagggcaatgaccactctgccaccagagagcgcaggctggattaccaggaggggcccccgggagtggagatttcctgctggtctgtggagctgtagttctgatggaaggagctgtgcccaccctgtacacttggcttccccctgcaactgcagggccgcttctggggcctggaccaccatggggaggaagagtcccactcattacaaataaagaaaggtggtgtgagcctgggaagtgggtgtctccagttccatgtggccaaatcctagggcctcaacctcgcatcctgaaccttagcatcgtggaacacagaagcttccactgtcagctctcaagagcccatggccaggaaggcccatgctgagctttcagtccagccccttcattttacaaacaaggaaactgagctcgaaccacccatttgagatgtcactgtggcccccagctagaggcccagggctgggagcattctccaggagcagaggttcagtctgcttcatggtctcttggaccagttttgactaca

SEQ ID NO: 370267 - DNA, 4663 bp, Homo sapiens
  misc_feature (28)..(28): n is a, c, g, or t
aagcaggctggtacgccctggagttaanggatggctgcgggtttggcggcgctgcgccggcaggcagcgaggccgggcgggccctgggccctcgcgcccctcccgcgaggcctgtcatgcagggccccgccgggaacgcgagccggggactgccaggcgggccgccctccacagtcgcgtccggggcgggccgctgcgagagcggcgcgctcatgcacagcttcggcatcttcctgcaggggctgctcggcgtcgtggccttcagcacgttaatgctcaaacgcttcagagaaccaaagcatgaaagacgtccgtggaggatatggtttttagacacttccaaacaagccataggaatgctgttcatccactttgcaaatgtatacctagcagatctcactgaagaggacccttgttcactgtacctcatcaacttcctcctggacgccactgtgggcatgctgctcatctacgtgggggtgcgcgccgtcagcgtcctggtagagtggcagcagtgggagtccctgcgcttcggcgaatatggagaccctctgcagtgtggagcctgggtcgggcagtgcgctctttacatcgtgatcatgatttttgaaaagtctgtcgtcttcatcgtcctcctaatacttcagtggaaaaaggtggccctgttgaatcccattgaaaacccagacttgaagctggccatcgtcatgctgatcgtccccttctttgtcaacgctttgatgttttgggtagtggacaatttcctcatgagaaaggggaagacgaaagctaagctagaagaaaggggagccaaccaggactcgaggaatgggagcaaggtccgctaccggagggccgcatcccacgaggagtctgagtctgagatcctgatctcagcggatgatgagatggaggagtccgacgtggaggaggacctccgcagactgacccccctcaagcctgtgaagaaaaagaagcaccgctttgggctacccctgctgcctgccagagaggcgccttcagagacccagcgcttacacaatacccaccatgtcccaggctggtgctcaggaagcccctatcaagaagaagcgcccccctgtgaaggaggaggacctgaagggggcccgaggaaacctgaccaagaaccaggaaatcaagtccaagacctaccaggtcatgcgagagtgtgagcaagctggctcggccgccccgtcggtgttcagccgcacccgcacaggtaccgagactgtctttgagaagcccaaagccggacccaccaagagtgtcttcggctgagaagtgtgcgccactccccttgctgcccgaatgctcggaaacaggagccttacccaggaactcttttttatgccagaacgcttcctctcccctgctgtctctggggctgccaccctcccccacagtccaggcccttcagccaagggctctgcaccagcaccttggaagcaccaataaagaggatgcccacgtggccccagcaaaaaaaaaaagaagcctcctggcagacactggagccacgatgaagcccccaaggcctgtccgtacctgcagcaaagttctcgtcctgctttcactgctggccatccaccagactactactgccgaaaagaatggcatcgacatctacagcctcaccgtggactccagggtctcatcccgatttgcccacacggtcgtcaccagccgagtggtcaatagggccaatactgtgcaggaggccaccttccagatggagctgcccaagaaagccttcatcaccaacttctccatgatcatcgatggcatgacctacccagggatcatcaaggagaaggctgaagcccaggcacagtacagcgcagcagtggccaagggaaagagcgctggcctcgtcaaggccaccgggagaaacatggagcagttccaggtgtcggtcagtgtggctcccaatgccaagatcacctttgagctggtctatgaggagctgctcaagcggcgtttgggggtgtacgagctgctgctgaaagtgcggccccagcagctggtcaagcacctgcagatggacattcacatcttcgagccccagggcatcagctttctggagacagagagcaccttcatgaccaaccagctggtagacgccctcaccacctggcagaataagaccaaggctcacatccggttcaagccaacactttcccagcagcaaaagtccccagagcagcaagaaacagtcctggacggcaacctcattatccgctatgatgtggaccgggccatctccgggggctccattcagatcgagaacggctactttgtacactactttgcccccgagggcctaaccacaatgcccaagaatgtggtctttgtcattgacaagagcggctccatgagtggcaggaaaatccagcagacccgggaagccctaatcaagatcctggatgacctcagccccagagaccagttcaacctcatcgtcttcagtacagaagcaactcagtggaggccatcactggtgccagcctcagccgagaacgtgaacaaggccaggagctttgctgcgggcatccaggccctgggagggaccaacatcaatgatgcaatgctgatggctgtgcagttgctggacagcagcaaccaggaggagcggctgcccgaagggagtgtctcactcatcatcctgctcaccgatggcgaccccactgtgggggagactaaccccaggagcatccagaataacgtgcgggaagctgtaagtggccggtacagcctcttctgcctgggcttcggtttcgacgtcagctatgccttcctggagaagctggcactggacaatggcggcctggcccggcgcatccatgaggactcagactctgccctgcagctccaggacttctaccaggaagtggccaacccactgctgacagcagtgaccttcgagtacccaagcaatgccgtggaggaggtcactcagaacaacttccggctcctcttcaagggctcagagatggtggtggctgggaagctccaggaccgggggcctgatgtgctcacagccacagtcagtgggaagctgcctacacagaacatcactttccaaacggagtccagtgtggcagagcaggaggcggagttccagagccccaagtatatcttccacaacttcatggagaggctctgggcatacctgactatccagcagctgctggagcaaactgtctccgcatccgatgctgatcagcaggccctccggaaccaagcgctgaatttatcacttgcctacagctttgtcacgcctctcacatctatggtagtcaccaaacccgatgaccaagagcagtctcaagttgctgagaagcccatggaaggcgaaagtagaaacaggaatgtccactcagctggagctgctggctcccggatgaatttcagacctggggttctcagctccaggcaacttggactcccaggacctcctgatgttcctgaccatgctgcttaccaccccttccgccgtctggccatcttgcctgcttcagcaccaccagccacctcaaatcctgatccagctgtgtctcgtgtcatgaatatgaaaaaaacaaccatgacaacccaaaccccagccacaggctccctctgccatcctgccactgcctgggcagagtgtggagcggctctgtgtggaccccagacaccgccaggggccagtgaacctgctctcagaccctgagcaaggggttgaggtgactggccagtatgagagggagaaggctgggttctcatggatcgaagtgaccttcaagaaccccctggtatgggttcacgcatcccctgaacacgtggtggtgactcggaaccgaagaagctctgcgtacaagtggaaggagacgctattctcagtgatgcccggcctgaagatgaccatggacaagacgggtctcctgctgctcagtgacccagacaaagtgaccatcggcctgttgttctgggatggccgtggggaggggctccggctccttctgcgtgacactgaccgcttctccagccacgttggagggacccttggccagttttaccaggaggtgctctggggatctccagcagcatcagatgacggcagacgcacgctgagggttcagggcaatgaccactctgccaccagagagcgcaggctggattaccaggaggggcccccgggagtggagatttcctgctggtctgtggagctgtagttctgatggaaggagctgtgcccaccctgtacacttggcttccccctgcaactgcagggccgcttctggggcctggaccaccatggggaggaagagtcccactcattacaaataaagaaaggtggtgtgagcctgggaagtgggtgtctccagttccatgtggccaaatcctagggcctcaacctcgcatcctgaaccttagcatcgtggaacacagaagcttccactgtcagctctcaagagcccatggccaggaaggcccatgctgagctttcagtccagccccttcattttacaaacaaggaaactgagctcgaaccacccatttgagatgtcactgtggcccccagctagaggcccagggctgggagcattctccaggagcagaggttcagtctgcttcatggtctcttggaccagttttgactaca

SEQ ID NO: 370268 - DNA, 4556 bp, Homo sapiens
cgcagtactactacgttcttaggtagcgaggctgggtggcggctgttcatccactttgcaaatgtatacctagcagatctcactgaagaggacccttgttcactgtacctcatcaacttcctcctggacgccactgtgggcatgctgctcatctacgtgggggtgcgcgccgtcagcgtcctggtagagtggcagcagtgggagtccctgcgcttcggcgaatatggagaccctctgcagtgtggagcctgggtcgggcagtgcgctctttacatcgtgatcatgatttttgaaaagtctgtcgtcttcatcgtcctcctaatacttcagtggaaaaaggtggccctgttgaatcccattgaaaacccagacttgaagctggccatcgtcatgctgatcgtccccttctttgtcaacgctttgatgttttgggtagtggacaatttcctcatgagaaaggggaagacgaaagctaagctagaagaaaggggagccaaccaggactcgaggaatgggagcaaggtccgctaccggagggccgcatcccacgaggagtctgagtctgagatcctgatctcagcggatgatgagatggaggagtccgacgtggaggaggacctccgcagactgacccccctcaagcctgtgaagaaaaagaagcaccgctttgggctacccctgctgcctgccagagaggcgccttcagagacccagcgcttacacaatacccaccatgtcccaggctggtgctcaggaagcccctatcaagaagaagcgcccccctgtgaaggaggaggacctgaagggggcccgaggaaacctgaccaagaaccaggaaatcaagtccaagacctaccaggtcatgcgagagtgtgagcaagctggctcggccgccccgtcggtgttcagccgcacccgcacaggtaccgagactgtctttgagaagcccaaagccggacccaccaagagtgtcttcggctgagaagtgtgcgccactccccttgctgcccgaatgctcggaaacaggagccttacccaggaactcttttttatgccagaacgcttcctctcccctgctgtctctggggctgccaccctcccccacagtccaggcccttcagccaagggctctgcaccagcaccttggaagcaccaataaagaggatgcccacgtggccccagcaaaaaaaaaaagaagcctcctggcagacactggagccacgatgaagcccccaaggcctgtccgtacctgcagcaaagttctcgtcctgctttcactgctggccatccaccagactactactgccgaaaagaatggcatcgacatctacagcctcaccgtggactccagggtctcatcccgatttgcccacacggtcgtcaccagccgagtggtcaatagggccaatactgtgcaggaggccaccttccagatggagctgcccaagaaagccttcatcaccaacttctccatgatcatcgatggcatgacctacccagggatcatcaaggagaaggctgaagcccaggcacagtacagcgcagcagtggccaagggaaagagcgctggcctcgtcaaggccaccgggagaaacatggagcagttccaggtgtcggtcagtgtggctcccaatgccaagatcacctttgagctggtctatgaggagctgctcaagcggcgtttgggggtgtacgagctgctgctgaaagtgcggccccagcagctggtcaagcacctgcagatggacattcacatcttcgagccccagggcatcagctttctggagacagagagcaccttcatgaccaaccagctggtagacgccctcaccacctggcagaataagaccaaggctcacatccggttcaagccaacactttcccagcagcaaaagtccccagagcagcaagaaacagtcctggacggcaacctcattatccgctatgatgtggaccgggccatctccgggggctccattcagatcgagaacggctactttgtacactactttgcccccgagggcctaaccacaatgcccaagaatgtggtctttgtcattgacaagagcggctccatgagtggcaggaaaatccagcagacccgggaagccctaatcaagatcctggatgacctcagccccagagaccagttcaacctcatcgtcttcagtacagaagcaactcagtggaggccatcactggtgccagcctcagccgagaacgtgaacaaggccaggagctttgctgcgggcatccaggccctgggagggaccaacatcaatgatgcaatgctgatggctgtgcagttgctggacagcagcaaccaggaggagcggctgcccgaagggagtgtctcactcatcatcctgctcaccgatggcgaccccactgtgggggagactaaccccaggagcatccagaataacgtgcgggaagctgtaagtggccggtacagcctcttctgcctgggcttcggtttcgacgtcagctatgccttcctggagaagctggcactggacaatggcggcctggcccggcgcatccatgaggactcagactctgccctgcagctccaggacttctaccaggaagtggccaacccactgctgacagcagtgaccttcgagtacccaagcaatgccgtggaggaggtcactcagaacaacttccggctcctcttcaagggctcagagatggtggtggctgggaagctccaggaccgggggcctgatgtgctcacagccacagtcagtgggaagctgcctacacagaacatcactttccaaacggagtccagtgtggcagagcaggaggcggagttccagagccccaagtatatcttccacaacttcatggagaggctctgggcatacctgactatccagcagctgctggagcaaactgtctccgcatccgatgctgatcagcaggccctccggaaccaagcgctgaatttatcacttgcctacagctttgtcacgcctctcacatctatggtagtcaccaaacccgatgaccaagagcagtctcaagttgctgagaagcccatggaaggcgaaagtagaaacaggaatgtccactcaggttccactttcttcaaatattatctccagggagcaaaaataccaaaaccaggtgacaaagtaggaggtggggggaggggagattgacagattgggctcagtcctggctgtggagggtagtgccttgcccagctcctctggctggtgacagccctcgggcctcagttcagttgtatctgatcaggacttgaccacacagaggcttccttttctccaagaagaggatggaatagacaagctggagctgctggctcccggatgaatttcagacctggggttctcagctccaggcaacttggactcccaggacctcctgatgttcctgaccatgctgcttaccaccccttccgccgtctggccatcttgcctgcttcagcaccaccagccacctcaaatcctgatccagctgtgtctcgtgtcatgaatatgaaaaccacaggctccctctgccatcctgccactgcctgggcagagtgtggagcggctctgtgtggaccccagacaccgccaggggccagtgaacctgctctcagaccctgagcaaggggttgaggtgactggccagtatgagagggagaaggctgggttctcatggatcgaagtgaccttcaagaaccccctggtatgggttcacgcatcccctgaacacgtggtggtgactcggaaccgaagaagctctgcgtacaagtggaaggagacgctattctcagtgatgcccggcctgaagatgaccatggacaagacgggtctcctgctgctcagtgacccagacaaagtgaccatcggcctgttgttctgggatggccgtggggaggggctccggctccttctgcgtgacactgaccgcttctccagccacgttggagggacccttggccagttttaccaggaggtgctctggggatctccagcagcatcagatgacggcagacgcacgctgagggttcagggcaatgaccactctgccaccagagagcgcaggctggattaccaggaggggcccccgggagtggagatttcctgctggtctgtggagctgtagttctgatggaaggagctgtgcccaccctgtacacttggcttccccctgcaactgcagggccgcttctggggcctggaccaccatggggaggaagagtcccactcattacaaataaagaaaggtggtgtgagcctgggaagtgggtgtctccagttccatgtggccaaatcctagggcctcaacctcgcatcctgaaccttagcatcgtggaacacagaagcttccactgtcagctctcaagagcccatggccaggaaggcccatgctgagctttcagtccagccccttcattttacaaacaaggaaactgagctcgaaccacccatttgagatgtcactgtggcccccagctagaggcccagggctgggagcattctccaggagcagaggttcagtctgcttcatggtctcttggaccagttttgactaca

SEQ ID NO: 370269 - DNA, 5103 bp, Homo sapiens
  misc_feature (28)..(28): n is a, c, g, or t
aagcaggctggtacgccctggagttaanggatggctgcgggtttggcggcgctgcgccggcaggcagcgaggccgggcgggccctgggccctcgcgcccctcccgcgaggcctgtcatgcagggccccgccgggaacgcgagccggggactgccaggcgggccgccctccacagtcgcgtccggggcgggccgctgcgagagcggcgcgctcatgcacagcttcggcatcttcctgcaggggctgctcggcgtcgtggccttcagcacgttaatgctcaaacgcttcagagaaccaaagcatgaaagacgtccgtggaggatatggtttttagacacttccaaacaagccataggaatgctgttcatccactttgcaaatgtatacctagcagatctcactgaagaggacccttgttcactgtacctcatcaacttcctcctggacgccactgtgggcatgctgctcatctacgtgggggtgcgcgccgtcagcgtcctggtagagtggcagcagtgggagtccctgcgcttcggcgaatatggagaccctctgcagtgtggagcctgggtcgggcagtgcgctctttacatcgtgatcatgatttttgaaaagtctgtcgtcttcatcgtcctcctaatacttcagtggaaaaaggtggccctgttgaatcccattgaaaacccagacttgaagctggccatcgtcatgctgatcgtccccttctttgtcaacgctttgatgttttgggtagtggacaatttcctcatgagaaaggggaagacgaaagctaagctagaagaaaggggagccaaccaggactcgaggaatgggagcaaggtccgctaccggagggccgcatcccacgaggagtctgagtctgagatcctgatctcagcggatgatgagatggaggagtccgacgtggaggaggacctccgcagactgacccccctcaagcctgtgaagaaaaagaagcaccgctttgggctacccctgctgcctgccagagaggcgccttcagagacccagcgcttacacaatacccaccatgtcccaggctggtgctcaggaagcccctatcaagaagaagcgcccccctgtgaaggaggaggacctgaagggggcccgaggaaacctgaccaagaaccaggaaatcaagtccaagacctaccaggtcatgcgagagtgtgagcaagctggctcggccgccccgtcggtgttcagccgcacccgcacaggtaccgagactgtctttgagaagcccaaagccggacccaccaagagtgtcttcggctgagaagtgtgcgccactccccttgctgcccgaatgctcggaaacaggagccttacccaggaactcttttttatgccagaacgcttcctctcccctgctgtctctggggctgccaccctcccccacagtccaggcccttcagccaagggctctgcaccagcaccttggaagcaccaataaagaggatgcccacgtggccccagcaaaaaaaaaaagaagcctcctggcagacactggagccacgatgaagcccccaaggcctgtccgtacctgcagcaaagttctcgtcctgctttcactgctggccatccaccagactactactgccgaaaagaatggcatcgacatctacagcctcaccgtggactccagggtctcatcccgatttgcccacacggtcgtcaccagccgagtggtcaatagggccaatactgtgcaggaggccaccttccagatggagctgcccaagaaagccttcatcaccaacttctccatgatcatcgatggcatgacctacccagggatcatcaaggagaaggctgaagcccaggcacagtacagcgcagcagtggccaagggaaagagcgctggcctcgtcaaggccaccgggagaaacatggagcagttccaggtgtcggtcagtgtggctcccaatgccaagatcacctttgagctggtctatgaggagctgctcaagcggcgtttgggggtgtacgagctgctgctgaaagtgcggccccagcagctggtcaagcacctgcagatggacattcacatcttcgagccccagggcatcagctttctggagacagagagcaccttcatgaccaaccagctggtagacgccctcaccacctggcagaataagaccaaggctcacatccggttcaagccaacactttcccagcagcaaaagtccccagagcagcaagaaacagtcctggacggcaacctcattatccgctatgatgtggaccgggccatctccgggggctccattcagatcgagaacggctactttgtacactactttgcccccgagggcctaaccacaatgcccaagaatgtggtctttgtcattgacaagagcggctccatgagtggcaggaaaatccagcagacccgggaagccctaatcaagatcctggatgacctcagccccagagaccagttcaacctcatcgtcttcagtacagaagcaactcagtggaggccatcactggtgccagcctcagccgagaacgtgaacaaggccaggagctttgctgcgggcatccaggccctgggagggaccaacatcaatgatgcaatgctgatggctgtgcagttgctggacagcagcaaccaggaggagcggctgcccgaagggagtgtctcactcatcatcctgctcaccgatggcgaccccactgtgggggagactaaccccaggagcatccagaataacgtgcgggaagctgtaagtggccggtacagcctcttctgcctgggcttcggtttcgacgtcagctatgccttcctggagaagctggcactggacaatggcggcctggcccggcgcatccatgaggactcagactctgccctgcagctccaggacttctaccaggaagtggccaacccactgctgacagcagtgaccttcgagtacccaagcaatgccgtggaggaggtcactcagaacaacttccggctcctcttcaagggctcagagatggtggtggctgggaagctccaggaccgggggcctgatgtgctcacagccacagtcagtgggaagctgcctacacagaacatcactttccaaacggagtccagtgtggcagagcaggaggcggagttccagagccccaagtatatcttccacaacttcatggagaggctctgggcatacctgactatccagcagctgctggagcaaactgtctccgcatccgatgctgatcagcaggccctccggaaccaagcgctgaatttatcacttgcctacagctttgtcacgcctctcacatctatggtagtcaccaaacccgatgaccaagagcagtctcaagttgctgagaagcccatggaaggcgaaagtagaaacaggaatgtccactcaggttccactttcttcaaatattatctccagggagcaaaaataccaaaaccagaggcttccttttctccaagaagaggatggaatagacaagctggagctgctggctcccggatgaatttcagacctggggttctcagctccaggcaacttggactcccaggacctcctgatgttcctgaccatgctgcttaccaccccttccgccgtctggccatctctgcacagccaggctggacctatccctgacagcatgctcttctgtttgaaaatctcctgtgacaaaggccattctaggtggagttgcctgcttcagcaccaccagccacctcaaatcctgatccagctgtgtctcgtgtcatgaatatgaaaatcgaaggtgcccccaaggccagaggccctgtcctaacagggggatcctgggaggggagtgacctgtcacatgtctcgatgttgaagtagtgagggaacccagccacacctagtcactgctccctccctcaacctcccactcctcaggaaggggctgcctaaacccagactttttcttcttttagaaacaaccatgacaacccaaaccccaggttcgtggcccctttccacatccttgcccccagcctgcccttcctgctccaggagccgtgccccggctgtcccagcccccatccacaggctccctctgccatcctgccactgcctgggcagagtgtggagcggctctgtgtggaccccagacaccgccaggggccagtgaacctgctctcagaccctgagcaaggggttgaggtgactggccagtatgagagggagaaggctgggttctcatggatcgaagtgaccttcaagaaccccctggtatgggttcacgcatcccctgaacacgtggtggtgactcggaaccgaagaagctctgcgtacaagtggaaggagacgctattctcagtgatgcccggcctgaagatgaccatggacaagacgggtctcctgctgctcagtgacccagacaaagtgaccatcggcctgttgttctgggatggccgtggggaggggctccggctccttctgcgtgacactgaccgcttctccagccacgttggagggacccttggccagttttaccaggaggtgctctggggatctccagcagcatcagatgacggcagacgcacgctgagggttcagggcaatgaccactctgccaccagagagcgcaggctggattaccaggaggggcccccgggagtggagatttcctgctggtctgtggagctgtagttctgatggaaggagctgtgcccaccctgtacacttggcttccccctgcaactgcagggccgcttctggggcctggaccaccatggggaggaagagtcccactcattacaaataaagaaaggtggtgtgagcctgggaagtgggtgtctccagttccatgtggccaaatcctagggcctcaacctcgcatcctgaaccttagcatcgtggaacacagaagcttccactgtcagctctcaagagcccatggccaggaaggcccatgctgagctttcagtccagccccttcattttacaaacaaggaaactgagctcgaaccacccatttgagatgtcactgtggcccccagctagaggcccagggctgggagcattctccaggagcagaggttcagtctgcttcatggtctcttggaccagttttgactaca

SEQ ID NO: 370270 - DNA, 4917 bp, Homo sapiens
  misc_feature (28)..(28): n is a, c, g, or t
aagcaggctggtacgccctggagttaanggatggctgcgggtttggcggcgctgcgccggcaggcagcgaggccgggcgggccctgggccctcgcgcccctcccgcgaggcctgtcatgcagggccccgccgggaacgcgagccggggactgccaggcgggccgccctccacagtcgcgtccggggcgggccgctgcgagagcggcgcgctcatgcacagcttcggcatcttcctgcaggggctgctcggcgtcgtggccttcagcacgttaatgctcaaacgcttcagagaaccaaagcatgaaagacgtccgtggaggatatggtttttagacacttccaaacaagccataggaatgctgttcatccactttgcaaatgtatacctagcagatctcactgaagaggacccttgttcactgtacctcatcaacttcctcctggacgccactgtgggcatgctgctcatctacgtgggggtgcgcgccgtcagcgtcctggtagagtggcagcagtgggagtccctgcgcttcggcgaatatggagaccctctgcagtgtggagcctgggtcgggcagtgcgctctttacatcgtgatcatgatttttgaaaagtctgtcgtcttcatcgtcctcctaatacttcagtggaaaaaggtggccctgttgaatcccattgaaaacccagacttgaagctggccatcgtcatgctgatcgtccccttctttgtcaacgctttgatgttttgggtagtggacaatttcctcatgagaaaggggaagacgaaagctaagctagaagaaaggggagccaaccaggactcgaggaatgggagcaaggtccgctaccggagggccgcatcccacgaggagtctgagtctgagatcctgatctcagcggatgatgagatggaggagtccgacgtggaggaggacctccgcagactgacccccctcaagcctgtgaagaaaaagaagcaccgctttgggctacccctgctgcctgccagagaggcgccttcagagacccagcgcttacacaatacccaccatgtcccaggctggtgctcaggaagcccctatcaagaagaagcgcccccctgtgaaggaggaggacctgaagggggcccgaggaaacctgaccaagaaccaggaaatcaagtccaagacctaccaggtcatgcgagagtgtgagcaagctggctcggccgccccgtcggtgttcagccgcacccgcacaggtaccgagactgtctttgagaagcccaaagccggacccaccaagagtgtcttcggctgagaagtgtgcgccactccccttgctgcccgaatgctcggaaacaggagccttacccaggaactcttttttatgccagaacgcttcctctcccctgctgtctctggggctgccaccctcccccacagtccaggcccttcagccaagggctctgcaccagcaccttggaagcaccaataaagaggatgcccacgtggccccagcaaaaaaaaaaagaagcctcctggcagacactggagccacgatgaagcccccaaggcctgtccgtacctgcagcaaagttctcgtcctgctttcactgctggccatccaccagactactactgccgaaaagaatggcatcgacatctacagcctcaccgtggactccagggtctcatcccgatttgcccacacggtcgtcaccagccgagtggtcaatagggccaatactgtgcaggaggccaccttccagatggagctgcccaagaaagccttcatcaccaacttctccatgatcatcgatggcatgacctacccagggatcatcaaggagaaggctgaagcccaggcacagtacagcgcagcagtggccaagggaaagagcgctggcctcgtcaaggccaccgggagaaacatggagcagttccaggtgtcggtcagtgtggctcccaatgccaagatcacctttgagctggtctatgaggagctgctcaagcggcgtttgggggtgtacgagctgctgctgaaagtgcggccccagcagctggtcaagcacctgcagatggacattcacatcttcgagccccagggcatcagctttctggagacagagagcaccttcatgaccaaccagctggtagacgccctcaccacctggcagaataagaccaaggctcacatccggttcaagccaacactttcccagcagcaaaagtccccagagcagcaagaaacagtcctggacggcaacctcattatccgctatgatgtggaccgggccatctccgggggctccattcagatcgagaacggctactttgtacactactttgcccccgagggcctaaccacaatgcccaagaatgtggtctttgtcattgacaagagcggctccatgagtggcaggaaaatccagcagacccgggaagccctaatcaagatcctggatgacctcagccccagagaccagttcaacctcatcgtcttcagtacagaagcaactcagtggaggccatcactggtgccagcctcagccgagaacgtgaacaaggccaggagctttgctgcgggcatccaggccctgggagggaccaacatcaatgatgcaatgctgatggctgtgcagttgctggacagcagcaaccaggaggagcggctgcccgaagggagtgtctcactcatcatcctgctcaccgatggcgaccccactgtgggggagactaaccccaggagcatccagaataacgtgcgggaagctgtaagtggccggtacagcctcttctgcctgggcttcggtttcgacgtcagctatgccttcctggagaagctggcactggacaatggcggcctggcccggcgcatccatgaggactcagactctgccctgcagctccaggacttctaccaggaagtggccaacccactgctgacagcagtgaccttcgagtacccaagcaatgccgtggaggaggtcactcagaacaacttccggctcctcttcaagggctcagagatggtggtggctgggaagctccaggaccgggggcctgatgtgctcacagccacagtcagtgggaagctgcctacacagaacatcactttccaaacggagtccagtgtggcagagcaggaggcggagttccagagccccaagtatatcttccacaacttcatggagaggctctgggcatacctgactatccagcagctgctggagcaaactgtctccgcatccgatgctgatcagcaggccctccggaaccaagcgctgaatttatcacttgcctacagctttgtcacgcctctcacatctatggtagtcaccaaacccgatgaccaagagcagtctcaagttgctgagaagcccatggaaggcgaaagtagaaacaggaatgtccactcaggttccactttcttcaaatattatctccagggagcaaaaataccaaaaccagaggcttccttttctccaagaagaggatggaatagacaagctggagctgctggctcccggatgaatttcagacctggggttctcagctccaggcaacttggactcccaggacctcctgatgttcctgaccatgctgcttaccaccccttccgccgtctggccatctctgcacagccaggctggacctatccctgacagcatgctcttctgtttgaaaatctcctgtgacaaaggccattctaggtggagtgtatgtgtggcaggatggggggctggagcttggtggcagcgctgctggttgcccgcctcctgactgccttcctgctccctttctgtttccggatgttcctgccctagtgcctgcttcagcaccaccagccacctcaaatcctgatccagctgtgtctcgtgtcatgaatatgaaaaccacaggctccctctgccatcctgccactgcctgggcagagtgtggagcggctctgtgtggaccccagacaccgccaggggccagtgaacctgctctcagaccctgagcaaggggttgaggtgactggccagtatgagagggagaaggctgggttctcatggatcgaagtgaccttcaagaaccccctggtatgggttcacgcatcccctgaacacgtggtggtgactcggaaccgaagaagctctgcgtacaagtggaaggagacgctattctcagtgatgcccggcctgaagatgaccatggacaagacgggtctcctgctgctcagtgacccagacaaagtgaccatcggcctgttgttctgggatggccgtggggaggggctccggctccttctgcgtgacactgaccgcttctccagccacgttggagggacccttggccagttttaccaggaggtgctctggggatctccagcagcatcagatgacggcagacgcacgctgagggttcagggcaatgaccactctgccaccagagagcgcaggctggattaccaggaggggcccccgggagtggagatttcctgctggtctgtggagctgtagttctgatggaaggagctgtgcccaccctgtacacttggcttccccctgcaactgcagggccgcttctggggcctggaccaccatggggaggaagagtcccactcattacaaataaagaaaggtggtgtgagcctgggaagtgggtgtctccagttccatgtggccaaatcctagggcctcaacctcgcatcctgaaccttagcatcgtggaacacagaagcttccactgtcagctctcaagagcccatggccaggaaggcccatgctgagctttcagtccagccccttcattttacaaacaaggaaactgagctcgaaccacccatttgagatgtcactgtggcccccagctagaggcccagggctgggagcattctccaggagcagaggttcagtctgcttcatggtctcttggaccagttttgactaca

SEQ ID NO: 370271 - DNA, 4715 bp, Homo sapiens
  misc_feature (28)..(28): n is a, c, g, or t
aagcaggctggtacgccctggagttaanggatggctgcgggtttggcggcgctgcgccggcaggcagcgaggccgggcgggccctgggccctcgcgcccctcccgcgaggcctgtcatgcagggccccgccgggaacgcgagccggggactgccaggcgggccgccctccacagtcgcgtccggggcgggccgctgcgagagcggcgcgctcatgcacagcttcggcatcttcctgcaggggctgctcggcgtcgtggccttcagcacgttaatgctcaaacgcttcagagaaccaaagcatgaaagacgtccgtggaggatatggtttttagacacttccaaacaagccataggaatgctgttcatccactttgcaaatgtatacctagcagatctcactgaagaggacccttgttcactgtacctcatcaacttcctcctggacgccactgtgggcatgctgctcatctacgtgggggtgcgcgccgtcagcgtcctggtagagtggcagcagtgggagtccctgcgcttcggcgaatatggagaccctctgcagtgtggagcctgggtcgggcagtgcgctctttacatcgtgatcatgatttttgaaaagtctgtcgtcttcatcgtcctcctaatacttcagtggaaaaaggtggccctgttgaatcccattgaaaacccagacttgaagctggccatcgtcatgctgatcgtccccttctttgtcaacgctttgatgttttgggtagtggacaatttcctcatgagaaaggggaagacgaaagctaagctagaagaaaggggagccaaccaggactcgaggaatgggagcaaggtccgctaccggagggccgcatcccacgaggagtctgagtctgagatcctgatctcagcggatgatgagatggaggagtccgacgtggaggaggacctccgcagactgacccccctcaagcctgtgaagaaaaagaagcaccgctttgggctacccctgctgcctgccagagaggcgccttcagagacccagcgcttacacaatacccaccatgtcccaggctggtgctcaggaagcccctatcaagaagaagcgcccccctgtgaaggaggaggacctgaagggggcccgaggaaacctgaccaagaaccaggaaatcaagtccaagacctaccaggtcatgcgagagtgtgagcaagctggctcggccgccccgtcggtgttcagccgcacccgcacaggtaccgagactgtctttgagaagcccaaagccggacccaccaagagtgtcttcggctgagaagtgtgcgccactccccttgctgcccgaatgctcggaaacaggagccttacccaggaactcttttttatgccagaacgcttcctctcccctgctgtctctggggctgccaccctcccccacagtccaggcccttcagccaagggctctgcaccagcaccttggaagcaccaataaagaggatgcccacgtggccccagcaaaaaaaaaaagaagcctcctggcagacactggagccacgatgaagcccccaaggcctgtccgtacctgcagcaaagttctcgtcctgctttcactgctggccatccaccagactactactgccgaaaagaatggcatcgacatctacagcctcaccgtggactccagggtctcatcccgatttgcccacacggtcgtcaccagccgagtggtcaatagggccaatactgtgcaggaggccaccttccagatggagctgcccaagaaagccttcatcaccaacttctccatgatcatcgatggcatgacctacccagggatcatcaaggagaaggctgaagcccaggcacagtacagcgcagcagtggccaagggaaagagcgctggcctcgtcaaggccaccgggagaaacatggagcagttccaggtgtcggtcagtgtggctcccaatgccaagatcacctttgagctggtctatgaggagctgctcaagcggcgtttgggggtgtacgagctgctgctgaaagtgcggccccagcagctggtcaagcacctgcagatggacattcacatcttcgagccccagggcatcagctttctggagacagagagcaccttcatgaccaaccagctggtagacgccctcaccacctggcagaataagaccaaggctcacatccggttcaagccaacactttcccagcagcaaaagtccccagagcagcaagaaacagtcctggacggcaacctcattatccgctatgatgtggaccgggccatctccgggggctccattcagatcgagaacggctactttgtacactactttgcccccgagggcctaaccacaatgcccaagaatgtggtctttgtcattgacaagagcggctccatgagtggcaggaaaatccagcagacccgggaagccctaatcaagatcctggatgacctcagccccagagaccagttcaacctcatcgtcttcagtacagaagcaactcagtggaggccatcactggtgccagcctcagccgagaacgtgaacaaggccaggagctttgctgcgggcatccaggccctgggagggaccaacatcaatgatgcaatgctgatggctgtgcagttgctggacagcagcaaccaggaggagcggctgcccgaagggagtgtctcactcatcatcctgctcaccgatggcgaccccactgtgggggagactaaccccaggagcatccagaataacgtgcgggaagctgtaagtggccggtacagcctcttctgcctgggcttcggtttcgacgtcagctatgccttcctggagaagctggcactggacaatggcggcctggcccggcgcatccatgaggactcagactctgccctgcagctccaggacttctaccaggaagtggccaacccactgctgacagcagtgaccttcgagtacccaagcaatgccgtggaggaggtcactcagaacaacttccggctcctcttcaagggctcagagatggtggtggctgggaagctccaggaccgggggcctgatgtgctcacagccacagtcagtgggaagctgcctacacagaacatcactttccaaacggagtccagtgtggcagagcaggaggcggagttccagagccccaagtatatcttccacaacttcatggagaggctctgggcatacctgactatccagcagctgctggagcaaactgtctccgcatccgatgctgatcagcaggccctccggaaccaagcgctgaatttatcacttgcctacagctttgtcacgcctctcacatctatggtagtcaccaaacccgatgaccaagagcagtctcaagttgctgagaagcccatggaaggcgaaagtagaaacaggaatgtccactcaggttccactttcttcaaatattatctccagggagcaaaaataccaaaaccaggtgacaaagtaggaggtggggggaggggagattgacagattgggctcagtcctggctgtggagggtagtgccttgcccagctcctctggctggtgacagccctcgggcctcagttcagttgtatctgatcaggacttgaccacacagaggcttccttttctccaagaagaggatggaatagacaagctggagctgctggctcccggatgaatttcagacctggggttctcagctccaggcaacttggactcccaggacctcctgatgttcctgaccatgctgcttaccaccccttccgccgtctggccatcttgcctgcttcagcaccaccagccacctcaaatcctgatccagctgtgtctcgtgtcatgaatatgaaaaccacaggctccctctgccatcctgccactgcctgggcagagtgtggagcggctctgtgtggaccccagacaccgccaggggccagtgaacctgctctcagaccctgagcaaggggttgaggtgactggccagtatgagagggagaaggctgggttctcatggatcgaagtgaccttcaagaaccccctggtatgggttcacgcatcccctgaacacgtggtggtgactcggaaccgaagaagctctgcgtacaagtggaaggagacgctattctcagtgatgcccggcctgaagatgaccatggacaagacgggtctcctgctgctcagtgacccagacaaagtgaccatcggcctgttgttctgggatggccgtggggaggggctccggctccttctgcgtgacactgaccgcttctccagccacgttggagggacccttggtactgagcccattaccggggcccaggccttcctcagaaaccagctgtgcttgggaacaggcagcgcccctcccctgcgtgtgtctcccaggcttcctctgtctctgacccttactgatccaccctttgtatctcaggccagttttaccaggaggtgctctggggatctccagcagcatcagatgacggcagacgcacgctgagggttcagggcaatgaccactctgccaccagagagcgcaggctggattaccaggaggggcccccgggagtggagatttcctgctggtctgtggagctgtagttctgatggaaggagctgtgcccaccctgtacacttggcttccccctgcaactgcagggccgcttctggggcctggaccaccatggggaggaagagtcccactcattacaaataaagaaaggtggtgtgagcctgg

SEQ ID NO: 370272 - DNA, 3574 bp, Homo sapiens
  misc_feature (28)..(28): n is a, c, g, or t
  misc_feature (3392)..(3392): n is a, c, g, or t
  misc_feature (3521)..(3521): n is a, c, g, or t
aagcaggctggtacgccctggagttaanggatggctgcgggtttggcggcgctgcgccggcaggcagcgaggccgggcgggccctgggccctcgcgcccctcccgcgaggcctgtcatgcagggccccgccgggaacgcgagccggggactgccaggcgggccgccctccacagtcgcgtccggggcgggccgctgcgagagcggcgcgctcatgcacagcttcggcatcttcctgcaggggctgctcggcgtcgtggccttcagcacgttaatgctcaaacgcttcagagaaccaaagcatgaaagacgtccgtggaggatatggtttttagacacttccaaacaagccataggaatgctgttcatccactttgcaaatgtatacctagcagatctcactgaagaggacccttgttcactgtacctcatcaacttcctcctggacgccactgtgggcatgctgctcatctacgtgggggtgcgcgccgtcagcgtcctggtagagtggcagcagtgggagtccctgcgcttcggcgaatatggagaccctctgcagtgtggagcctgggtcgggcagtgcgctctttacatcgtgatcatgatttttgaaaagtctgtcgtcttcatcgtcctcctaatacttcagtggaaaaaggtggccctgttgaatcccattgaaaacccagacttgaagctggccatcgtcatgctgatcgtccccttctttgtcaacgctttgatgttttgggtagtggacaatttcctcatgagaaaggggaagacgaaagctaagctagaagaaaggggagccaaccaggactcgaggaatgggagcaaggtccgctaccggagggccgcatcccacgaggagtctgagtctgagatcctgatctcagcggatgatgagatggaggagtccgacgtggaggaggacctccgcagactgacccccctcaagcctgtgaagaaaaagaagcaccgctttgggctacccctgctgcctgccagagaggcgccttcagagacccagcgcttacacaatacccaccatgtcccaggctggtgctcaggaagcccctatcaagaagaagcgcccccctgtgaaggaggaggacctgaagggggcccgaggaaacctgaccaagaaccaggaaatcaagtccaagacctaccaggtcatgcgagagtgtgagcaagctggctcggccgccccgtcggtgttcagccgcacccgcacaggtaccgagactgtctttgagaagcccaaagccggacccaccaagagtgtcttcggctgagaagtgtgcgccactccccttgctgcccgaatgctcggaaacaggagccttacccaggaactcttttttatgccagaacgcttcctctcccctgctgtctctggggctgccaccctcccccacagtccaggcccttcagccaagggctctgcaccagcaccttggaagcaccaataaagaggatgcccacgtggccccagcaaaaaaaaaaagaagcctcctggcagacactggagccacgatgaagcccccaaggcctgtccgtacctgcagcaaagttctcgtcctgctttcactgctggccatccaccagactactactgccgaaaagaatggcatcgacatctacagcctcaccgtggactccagggtctcatcccgatttgcccacacggtcgtcaccagccgagtggtcaatagggccaatactgtgcaggaggccaccttccagatggagctgcccaagaaagccttcatcaccaacttctccatgatcatcgatggcatgacctacccagggatcatcaaggagaaggctgaagcccaggcacagtacagcgcagcagtggccaagggaaagagcgctggcctcgtcaaggccaccgggagaaacatggagcagttccaggtgtcggtcagtgtggctcccaatgccaagatcacctttgagctggtctatgaggagctgctcaagcggcgtttgggggtgtacgagctgctgctgaaagtgcggccccagcagctggtcaagcacctgcagatggacattcacatcttcgagccccagggcatcagctttctggagacagagagcaccttcatgaccaaccagctggtagacgccctcaccacctggcagaataagaccaaggctcacatccggttcaagccaacactttcccagcagcaaaagtccccagagcagcaagaaacagtcctggacggcaacctcattatccgctatgatgtggaccgggccatctccgggggctccattcagatcgagaacggctactttgtacactactttgcccccgagggcctaaccacaatgcccaagaatgtggtctttgtcattgacaagagcggctccatgagtggcaggaaaatccagcagacccgggaagccctaatcaagatcctggatgacctcagccccagagaccagttcaacctcatcgtcttcagtacagaagcaactcagtggaggccatcactggtgccagcctcagccgagaacgtgaacaaggccaggagctttgctgcgggcatccaggccctgggagggaccaacatcaatgatgcaatgctgatggctgtgcagttgctggacagcagcaaccaggaggagcggctgcccgaagggagtgtctcactcatcatcctgctcaccgatggcgaccccactgtgggggagactaaccccaggagcatccagaataacgtgcgggaagctgtaagtggccggtacagcctcttctgcctgggcttcggtttcgacgtcagctatgccttcctggagaagctggcactggacaatggcggcctggcccggcgcatccatgaggactcagactctgccctgcagctccaggacttctaccaggaagtggccaacccactgctgacagcagtgaccttcgagtacccaagcaatgccgtggaggaggtcactcagaacaacttccggctcctcttcaagggctcagagatggtggtggctgggaagctccaggaccgggggcctgatgtgctcacagccacagtcagtgggaagctgcctacacagaacatcactttccaaacggagtccagtgtggcagagcaggaggcggagttccagagccccaagtatatcttccacaacttcatggagaggctctgggcatacctgactatccagcagctgctggagcaaactgtctccgcatccgatgctgatcagcaggccctccggaaccaagcgctgaatttatcacttgcctacagctttgtcacgcctctcacatctatggtagtcaccaaacccgatgaccaagagcagtctcaagttgctgagaagcccatggaaggcgaaagtagaaacaggtgtnccactcaggttccactttcttctattatctccagggagcataaatacctgctggctcccggatgaattcagaccctgggtctcagctcaggcacctgactccaggacccctgatgtcctgacatgctgntacacccttccgcgttggcatttgctgcttacacagcacctccgtcgtgggtt

SEQ ID NO: 370273 - DNA, 3630 bp, Homo sapiens
  misc_feature (28)..(28): n is a, c, g, or t
aagcaggctggtacgccctggagttaanggatggctgcgggtttggcggcgctgcgccggcaggcagcgaggccgggcgggccctgggccctcgcgcccctcccgcgaggcctgtcatgcagggccccgccgggaacgcgagccggggactgccaggcgggccgccctccacagtcgcgtccggggcgggccgctgcgagagcggcgcgctcatgcacagcttcggcatcttcctgcaggggctgctcggcgtcgtggccttcagcacgttaatgctcaaacgcttcagagaaccaaagcatgaaagacgtccgtggaggatatggtttttagacacttccaaacaagccataggaatgctgttcatccactttgcaaatgtatacctagcagatctcactgaagaggacccttgttcactgtacctcatcaacttcctcctggacgccactgtgggcatgctgctcatctacgtgggggtgcgcgccgtcagcgtcctggtagagtggcagcagtgggagtccctgcgcttcggcgaatatggagaccctctgcagtgtggagcctgggtcgggcagtgcgctctttacatcgtgatcatgatttttgaaaagtctgtcgtcttcatcgtcctcctaatacttcagtggaaaaaggtggccctgttgaatcccattgaaaacccagacttgaagctggccatcgtcatgctgatcgtccccttctttgtcaacgctttgatgttttgggtagtggacaatttcctcatgagaaaggggaagacgaaagctaagctagaagaaaggggagccaaccaggactcgaggaatgggagcaaggtccgctaccggagggccgcatcccacgaggagtctgagtctgagatcctgatctcagcggatgatgagatggaggagtccgacgtggaggaggacctccgcagactgacccccctcaagcctgtgaagaaaaagaagcaccgctttgggctacccctgctgcctgccagagaggcgccttcagagacccagcgcttacacaatacccaccatgtcccaggctggtgctcaggaagcccctatcaagaagaagcgcccccctgtgaaggaggaggacctgaagggggcccgaggaaacctgaccaagaaccaggaaatcaagtccaagacctaccaggtcatgcgagagtgtgagcaagctggctcggccgccccgtcggtgttcagccgcacccgcacaggtaccgagactgtctttgagaagcccaaagccggacccaccaagagtgtcttcggctgagaagtgtgcgccactccccttgctgcccgaatgctcggaaacaggagccttacccaggaactcttttttatgccagaacgcttcctctcccctgctgtctctggggctgccaccctcccccacagtccaggcccttcagccaagggctctgcaccagcaccttggaagcaccaataaagaggatgcccacgtggccccagcaaaaaaaaaaagaagcctcctggcagacactggagccacgatgaagcccccaaggcctgtccgtacctgcagcaaagttctcgtcctgctttcactgctggccatccaccagactactactgccgaaaagaatggcatcgacatctacagcctcaccgtggactccagggtctcatcccgatttgcccacacggtcgtcaccagccgagtggtcaatagggccaatactgtgcaggaggccaccttccagatggagctgcccaagaaagccttcatcaccaacttctccatgatcatcgatggcatgacctacccagggatcatcaaggagaaggctgaagcccaggcacagtacagcgcagcagtggccaagggaaagagcgctggcctcgtcaaggccaccgggagaaacatggagcagttccaggtgtcggtcagtgtggctcccaatgccaagatcacctttgagctggtctatgaggagctgctcaagcggcgtttgggggtgtacgagctgctgctgaaagtgcggccccagcagctggtcaagcacctgcagatggacattcacatcttcgagccccagggcatcagctttctggagacagagagcaccttcatgaccaaccagctggtagacgccctcaccacctggcagaataagaccaaggctcacatccggttcaagccaacactttcccagcagcaaaagtccccagagcagcaagaaacagtcctggacggcaacctcattatccgctatgatgtggaccgggccatctccgggggctccattcagatcgagaacggctactttgtacactactttgcccccgagggcctaaccacaatgcccaagaatgtggtctttgtcattgacaagagcggctccatgagtggcaggaaaatccagcagacccgggaagccctaatcaagatcctggatgacctcagccccagagaccagttcaacctcatcgtcttcagtacagaagcaactcagtggaggccatcactggtgccagcctcagccgagaacgtgaacaaggccaggagctttgctgcgggcatccaggccctgggagggaccaacatcaatgatgcaatgctgatggctgtgcagttgctggacagcagcaaccaggaggagcggctgcccgaagggagtgtctcactcatcatcctgctcaccgatggcgaccccactgtgggggagactaaccccaggagcatccagaataacgtgcgggaagctgtaagtggccggtacagcctcttctgcctgggcttcggtttcgacgtcagctatgccttcctggagaagctggcactggacaatggcggcctggcccggcgcatccatgaggactcagactctgccctgcagctccaggacttctaccaggaagtggccaacccactgctgacagcagtgaccttcgagtacccaagcaatgccgtggaggaggtcactcagaacaacttccggctcctcttcaagggctcagagatggtggtggctgggaagctccaggaccgggggcctgatgtgctcacagccacagtcagtgggaagctgcctacacagaacatcactttccaaacggagtccagtgtggcagagcaggaggcggagttccagagccccaagtatatcttccacaacttcatggagaggctctgggcatacctgactatccagcagctgctggagcaaactgtctccgcatccgatgctgatcagcaggccctccggaaccaagcgctgaatttatcacttgcctacagctttgtcacgcctctcacatctatggtagtcaccaaacccgatgaccaagagcagtctcaagttgctgagaagcccatggaaggcggtgggtgtggggttgagatctcagcctcccaggtagcagagtttggacccagcgttctccccgatcttccctgcatcctgaccaagaccccaaccgtgcccccaacagactccccctgggagattcagcctattcactgatgaggaaagtgaagccgggtctcctgtctccccaaattcattgcacctacgatatagtccaggattgggtagcaagattaaacacaagcgcttcaaattgatgaaaaccaccctga

SEQ ID NO: 370274 - DNA, 1789 bp, Homo sapiens
  misc_feature (28)..(28): n is a, c, g, or t
aagcaggctggtacgccctggagttaanggatggctgcgggtttggcggcgctgcgccggcaggcagcgaggccgggcgggccctgggccctcgcgcccctcccgcgaggcctgtcatgcagggccccgccgggaacgcgagccggggactgccaggcgggccgccctccacagtcgcgtccggggcgggccgctgcgagagcggcgcgctcatgcacagcttcggcatcttcctgcaggggctgctcggcgtcgtggccttcagcacgttaatgctcaaacgcttcagagaaccaaagcatgaaagacgtccgtggaggatatggtttttagacacttccaaacaagccataggaatgctgttcatccactttgcaaatgtatacctagcagatctcactgaagaggacccttgttcactgtacctcatcaacttcctcctggacgccactgtgggcatgctgctcatctacgtgggggtgcgcgccgtcagcgtcctggtagagtggcagcagtgggagtccctgcgcttcggcgaatatggagaccctctgcagtgtggagcctgggtcgggcagtgcgctctttacatcgtgatcatgatttttgaaaagtctgtcgtcttcatcgtcctcctaatacttcagtggaaaaaggtggccctgttgaatcccattgaaaacccagacttgaagctggccatcgtcatgctgatcgtccccttctttgtcaacgctttgatgttttgggtagtggacaatttcctcatgagaaaggggaagacgaaagctaagctagaagaaaggggagccaaccaggactcgaggaatgggagcaaggtccgctaccggagggccgcatcccacgaggagtctgagtctgagatcctgatctcagcggatgatgagatggaggagtccgacgtggaggaggacctccgcagactgacccccctcaagcctgtgaagaaaaagaagcaccgctttgggctacccgtatgacacattcccatgctgggggtgacgggagggccccgccagccgctggtgtgcagaggtcatcccacagcatcgttccttaccctctctctgcccttcctttctacctctgctcctcttgctgtctctgcccgctctcgcctgcccccagactactgtgacttaaaaagagggaagaggagccagcgcccgagggggccactggcggctggaggtccccattcagttgcactacaaacactgaccaaatatgcaaggaaggagctgtgtttgtttgttgtcgtcccagacagtgttgtgagggacctgaggccctgccccgtgtccgaccaccgagtggcaaggtggaaggaagcacaggcacacagaccgtgggtgggtctcctcaccgtggctgtgggcagtgcgaacacgtaacaccctcgggctaaaagtgactcgttgaccaagttggaaccggaatgctttcttactcaaaatggcttttgtaactattgatttctgaagctggttttatgagttgtgacagtgttaccaggttgggggtatgtgtttatttcctacaaagtacttacgggactaatgggcaaaacagagatttttaagtcttccgtatgctgtttgacttttatatttttaagttatattttcatactattgtatttaaaaactctttttagtccccaaagaaatgggtttatttgcctttcatggggtgtgggctggcaggaggaaaaatcgggagttttttatttggaatattattagatgatgccctatgataagatgag

SEQ ID NO: 370275 - DNA, 3066 bp, Homo sapiens
  misc_feature (28)..(28): n is a, c, g, or t
aagcaggctggtacgccctggagttaanggatggctgcgggtttggcggcgctgcgccggcaggcagcgaggccgggcgggccctgggccctcgcgcccctcccgcgaggcctgtcatgcagggccccgccgggaacgcgagccggggactgccaggcgggccgccctccacagtcgcgtccggggcgggccgctgcgagagcggcgcgctcatgcacagcttcggcatcttcctgcaggggctgctcggcgtcgtggccttcagcacgttaatgctcaaacgcttcagagaaccaaagcatgaaagacgtccgtggaggatatggtttttagacacttccaaacaagccataggaatgctgttcatccactttgcaaatgtatacctagcagatctcactgaagaggacccttgttcactgtacctcatcaacttcctcctggacgccactgtgggcatgctgctcatctacgtgggggtgcgcgccgtcagcgtcctggtagagtggcagcagtgggagtccctgcgcttcggcgaatatggagaccctctgcagtgtggagcctgggtcgggcagtgcgctctttacatcgtgatcatgatttttgaaaagtctgtcgtcttcatcgtcctcctaatacttcagtggaaaaaggtggccctgttgaatcccattgaaaacccagacttgaagctggccatcgtcatgctgatcgtccccttctttgtcaacgctttgatgttttgggtagtggacaatttcctcatgagaaaggggaagacgaaagctaagctagaagaaaggggagccaaccaggactcgaggaatgggagcaaggtccgctaccggagggccgcatcccacgaggagtctgagtctgagatcctgatctcagcggatgatgagatggaggagtccgacgtggaggaggacctccgcagactgacccccctcaagcctgtgaagaaaaagaagcaccgctttgggctacccctgctgcctgccagagaggcgccttcagagacccagcgcttacacaatacccaccatgtcccaggctggtgctcaggaagcccctatcaagaagaagcgcccccctgtgaaggaggaggacctgaagggggcccgaggaaacctgaccaagaaccaggaaatcaagtccaagacctaccaggtcatgcgagagtgtgagcaagctggctcggccgccccgtcggtgttcagccgcacccgcacaggtaccgagactgtctttgagaagcccaaagccggacccaccaagagtgtcttcggctgagaagtgtgcgccactccccttgctgcccgaatgctcggaaacaggagccttacccaggaactcttttttatgccagaacgcttcctctcccctgctgtctctggggctgccaccctcccccacagtccaggcccttcagccaagggctctgcaccagcaccttggaagcaccaataaagaggatgcccacgtggccccagcaaaaaaaaaaagaagcctcctggcagacactggagccacgatgaagcccccaaggcctgtccgtacctgcagcaaagttctcgtcctgctttcactgctggccatccaccagactactactgccgaaaagaatggcatcgacatctacagcctcaccgtggactccagggtctcatcccgatttgcccacacggtcgtcaccagccgagtggtcaatagggccaatactgtgcaggaggccaccttccagatggagctgcccaagaaagccttcatcaccaacttctccatgatcatcgatggcatgacctacccagggatcatcaaggagaaggctgaagcccaggcacagtacagcgcagcagtggccaagggaaagagcgctggcctcgtcaaggccaccgggagaaacatggagcagttccaggtgtcggtcagtgtggctcccaatgccaagatcacctttgagctggtctatgaggagctgctcaagcggcgtttgggggtgtacgagctgctgctgaaagtgcggccccagcagctggtcaagcacctgcagatggacattcacatcttcgagccccagggcatcagctttctggagacagagagcaccttcatgaccaaccagctggtagacgccctcaccacctggcagaataagaccaaggctcacatccggttcaagccaacactttcccagcagcaaaagtccccagagcagcaagaaacagtcctggacggcaacctcattatccgctatgatgtggaccgggccatctccgggggctccattcagatcgagaacggctactttgtacactactttgcccccgagggcctaaccacaatgcccaagaatgtggtctttgtcattgacaagagcggctccatgagtggcaggaaaatccagcagacccgggaagccctaatcaagatcctggatgacctcagccccagagaccagttcaacctcatcgtcttcagtacagaagcaactcagtggaggccatcactggtgccagcctcagccgagaacgtgaacaaggccaggagctttgctgcgggcatccaggccctgggagggaccaacatcaatgatgcaatgctgatggctgtgcagttgctggacagcagcaaccaggaggagcggctgcccgaagggagtgtctcactcatcatcctgctcaccgatggcgaccccactgtgggggagactaaccccaggagcatccagaataacgtgcgggaagctgtaagtggccggtacagcctcttctgcctgggcttcggtttcgacgtcagctatgccttcctggagaagctggcactggacaatggcggcctggcccggcgcatccatgaggactcagactctgccctgcagctccaggacttctaccaggaagtggccaacccactgctgacagcagtgaccttcgagtacccaagcaatgccgtggaggaggtcactcagaacaacttccggctcctcttcaagggctcagagatggtggtggctggggggggcccccctctttttggggggggggggggggggggggg

SEQ ID NO: 370276 - DNA, 1793 bp, Homo sapiens
acccagtgtatggacatcaggcctcccctccccaaggcaggacttcacctgtcctttactttcactgagtaggatccactatactctagaggctgactcatgaggaaaccttctaggaagggagggcttcctccgttcagaaagccaacagaggtcccttgaactgttttctgatccccaaatctgcactccgaatgcagctgcacagccaggctggacctatccctgacagcatgctcttctgtttgaaaatctcctgtgacaaaggccattctaggtggagtgtatgtgtggcaggatggggggctggagcttggtggcagcgctgctggttgcccgcctcctgactgccttcctgctccctttctgtttccggatgttcctgccctagtgcctgcttcagcaccaccagccacctcaaatcctgatccagctgtgtctcgtgtcatgaatatgaaaatcgaaggtgcccccaaggccagaggccctgtcctaacagggggatcctgggaggggagtgacctgtcacatgtctcgatgttgaagtagtgagggaacccagccacacctagtcactgctccctccctcaacctcccactcctcaggaaggggctgcctaaacccagactttttcttcttttagaaacaaccatgacaacccaaaccccaggttcgtggcccctttccacatccttgcccccagcctgcccttcctgctccaggagccgtgccccggctgtcccagcccccatccacaggctccctctgccatcctgccactgcctgggcagagtgtggagcggctctgtgtggaccccagacaccgccaggggccagtgaacctgctctcagaccctgagcaaggggttgaggtgactggccagtatgagagggagaaggctgggttctcatggatcgaagtgaccttcaagaaccccctggtatgggttcacgcatcccctgaacacgtggtggtgactcggaaccgaagaagctctgcgtacaagtggaaggagacgctattctcagtgatgcccggcctgaagatgaccatggacaagacgggtctcctgctgctcagtgacccagacaaagtgaccatcggcctgttgttctgggatggccgtggggaggggctccggctccttctgcgtgacactgaccgcttctccagccacgttggagggacccttggccagttttaccaggaggtgctctggggatctccagcagcatcagatgacggcagacgcacgctgagggttcagggcaatgaccactctgccaccagagagcgcaggctggattaccaggaggggcccccgggagtggagatttcctgctggtctgtggagctgtagttctgatggaaggagctgtgcccaccctgtacacttggcttccccctgcaactgcagggccgcttctggggcctggaccaccatggggaggaagagtcccactcattacaaataaagaaaggtggtgtgagcctgggaagtgggtgtctccagttccatgtggccaaatcctagggcctcaacctcgcatcctgaaccttagcatcgtggaacacagaagcttccactgtcagctctcaagagcccatggccaggaaggcccatgctgagctttcagtccagccccttcattttacaaacaaggaaactgagctcgaaccacccatttgagatgtcactgtggcccccagctagaggcccagggctgggagcattctccaggagcagaggttcagtctgcttcatggtctcttggaccagttttgactaca

SEQ ID NO: 370277 - DNA, 1825 bp, Homo sapiens
  misc_feature (28)..(28): n is a, c, g, or t
aagcaggctggtacgccctggagttaanggatggctgcgggtttggcggcgctgcgccggcaggcagcgaggccgggcgggccctgggccctcgcgcccctcccgcgaggcctgtcatgcagggccccgccgggaacgcgagccggggactgccaggcgggccgccctccacagtcgcgtccggggcgggccgctgcgagagcggcgcgctcatgcacagcttcggcatcttcctgcaggggctgctcggcgtcgtggccttcagcacgttaatgctcaaacgcttcagagaaccaaagcatgaaagacgtccgtggaggatatggtttttagacacttccaaacaagccataggaatgctgttcatccactttgcaaatgtatacctagcagatctcactgaagaggacccttgttcactgtacctcatcaacttcctcctggacgccactgtgggcatgctgctcatctacgtgggggtgcgcgccgtcagcgtcctggtagagtggcagcagtgggagtccctgcgcttcggcgaatatggagaccctctgcagtgtggagcctgggtcgggcagtgcgctctttacatcgtgatcatgatttttgaaaagtctgtcgtcttcatcgtcctcctaatacttcagtggaaaaaggtggccctgttgaatcccattgaaaacccagacttgaagctggccatcgtcatgctgatcgtccccttctttgtcaacgctttgatgttttgggtagtggacaatttcctcatgagaaaggggaagacgaaagctaagctagaagaaaggggagccaaccaggactcgaggaatgggagcaaggtccgctaccggagggccgcatcccacgaggagtctgagtctgagatcctgatctcagcggatgatgagatggaggagtccgacgtggaggaggacctccgcagactgacccccctcaagcctgtgaagaaaaagaagcaccgctttgggctacccctgctgcctgccagagaggcgccttcagagacccagcgcttacacaatacccaccatgtcccaggctggtgctcaggaagcccctatcaagaagaagcgcccccctgtgaaggaggaggacctgaagggggcccgaggaaacctgaccaagaaccaggaaatcaagtccaagacctaccaggtcatgcgagagtgtgagcaagctggctcggccgccccgtcggtgttcagccgcacccgcacaggtaccgagactgtctttgagaagcccaaagccggacccaccaagagtgtcttcggctgagaagtgtgcgccactccccttgctgcccgaatgctcggaaacaggagccttacccaggaactcttttttatgccagaacgcttcctctcccctgctgtctctggggctgccaccctcccccacagtccaggcccttcagccaagggctctgcaccagcaccttggaagcaccaataaagaggatgcccacgtggccccagcaaaaaaaaaaagaagcctcctggcagacactggagccacgatgaagcccccaaggcctgtccgtacctgcagcaaagttctcgtcctgctttcactgctggccatccaccagactactactgccgaaaaggtagccagtgtccatgggtgtggcgtgagctgggggatgagagaacgcctgggaagtggggaagagcctccgcatgtgccagcgtgtcagcacaagtgcgtgtgcatccctgtgtgtgcaaaaaaatggtgcagacctcccgccaggcactaccccaagggccttactggtattctcccacctaatagaggggat

SEQ ID NO: 370278 - DNA, 890 bp, Homo sapiens
catgtacctgcagtaccagctacttgggaggtagaggtgggagaatcacttgagccgaggaggcacaggttgcaacgagctgagatcacaccactgcactgcagcctgggggacagagtgagaccctgtccctgccccaccaaaaaagagaaagaaaaaatgaggaaactgaaatcagaagatttaagggccttcccacccaaggccactccgtgacttcctggacaagaggggctccggctccttctgcgtgacactgaccgcttctccagccacgttggagggacccttggccagttttaccaggaggtgctctggggatctccagcagcatcagatgacggcagacgcacgctgagggttcagggcaatgaccactctgccaccagagagcgcaggctggattaccaggaggggcccccgggagtggagatttcctgctggtctgtggagctgtagttctgatggaaggagctgtgcccaccctgtacacttggcttccccctgcaactgcagggccgcttctggggcctggaccaccatggggaggaagagtcccactcattacaaataaagaaaggtggtgtgagcctgggaagtgggtgtctccagttccatgtggccaaatcctagggcctcaacctcgcatcctgaaccttagcatcgtggaacacagaagcttccactgtcagctctcaagagcccatggccaggaaggcccatgctgagctttcagtccagccccttcattttacaaacaaggaaactgagctcgaaccacccatttgagatgtcactgtggcccccagctagaggcccagggctgggagcattctccaggagcagaggttcagtctgcttcatggtctcttggaccagttttgactaca

SEQ ID NO: 370279 - DNA, 1617 bp, Homo sapiens
  misc_feature (28)..(28): n is a, c, g, or t
aagcaggctggtacgccctggagttaanggatggctgcgggtttggcggcgctgcgccggcaggcagcgaggccgggcgggccctgggccctcgcgcccctcccgcgaggcctgtcatgcagggccccgccgggaacgcgagccggggactgccaggcgggccgccctccacagtcgcgtccggggcgggccgctgcgagagcggcgcgctcatgcacagcttcggcatcttcctgcaggggctgctcggcgtcgtggccttcagcacgttaatgctcaaacgcttcagagaaccaaagcatgaaagacgtccgtggaggatatggtttttagacacttccaaacaagccataggaatgctgttcatccactttgcaaatgtatacctagcagatctcactgaagaggacccttgttcactgtacctcatcaacttcctcctggacgccactgtgggcatgctgctcatctacgtgggggtgcgcgccgtcagcgtcctggtagagtggcagcagtgggagtccctgcgcttcggcgaatatgaagagaaggccaagagtttgctgatgagaatgcgggactcagggaaataagccacacagccccggcggttgagaccagatccaggtgacgcatggtgtctgcactctgattaccaggccactctttcccatgtggaagccctgacatctgggtcacggtgcttcatgggtcttgctgcccatccctggccaaactctcccttttgaaagcctctcgccacagatgtgttccctccttttggcccctattgctgtgacttctactgaggaaataattaaacccaaacaaaacacccacatgcctgaggttgttcattgcagtaaaaagcaagacacacaaggtccaggtgcagtggctcacacctgtcattcccagcactttgggaggcttaagcggggaggatcgcttgagcccaggagcttaagaccagccttggaaacaaagcaagatcccgtctctacaaaaaaaaaagaaaaagaaaaataaaaaaaacttttggagcgcgcctggcgggcccctaaagaaaaaggcttttctaaacacctgtggtgcggggcggagccgcggcacgcaatgatgattgagtacaacgttgcgactggcccggtttgccgaaggggaccccgggcactatactggatgcgtgggttgtctgcccacaattaaaaaaggcgcgcggggaactgcagggttttggaacctgatccaacggggatctgcgcggcctgacgggcacctcaccggacgggggctcagcgggatataatttaatacggggggggcgggaggaactttcaaaacaattctaggctgccccttaaggatgccgcacccaaagaggaaggggaattctggccacgaactcgtttgggagattgcttgaacccagaaccttcattactaaatacttttagaaaacacgacttcaggactggtggtgaacgacaatgtgccccaagtgccttttaatgaataccaacttgggtttacacgaagggcgcaataatggtgcaaaacacacggtgtggacgacttgctggacacgaaaacattgggagaggccggatcaacatg

SEQ ID NO: 370280 - DNA, 312 bp, Homo sapiens
gacatccctgggggggagcttgagggaggtccattattgttcatctcccagctgttgggggagaggctccccaagttggccgggtgtggggagaggggacatagctgccctctccgcacccactcctgggtggatctcaagccctggctgtgaagacccacaccccacctgagagaagactgcatctgtcgatttctccaaagctggagctgctggctcccggatgaatttcagacctggggttctcagctccaggcaacttggactcccaggacctcctgatgttcctgaccatgctgcttaccacccctt

SEQ ID NO: 370281 - DNA, 4609 bp, Homo sapiens
gctgtcaccatcgagcatggtttcctccctggtcctttccagaccccttactcccccctctctgaacttgcagttggaataggatagaggacaaggacatcagcaaaaacatgagcaactccccaggctccctttacctcactttctccacctgtgaacctgtggtagcccctctctgagtttgctgcaagggcccagtgagcttgccataatcagacgcagcagacacgggaagctcctgctctgccaccatgcagggatggaaaatctgtccactggaatccaggggaagggatggaagaggaagaaaaacaagcttggagcagtccaacccagctagggccctccattccctcagggacaccccacacccaccccacacactgggatgaacccttgcagaggaacaattcagatggtcacacattccaggacccaaatccgtaaacacaaagcatgtccgtcagtgccagcacctccccccggcgaatcaagcagctgtcccagagggcaaagggtctctgcagccatctgctttcatcagggctgcagcccccaggcagcagtactgggagcccctctcatctccgagaataaactctgaagccagcgaccctgcggacctgaatcatcagggagcctgtcagaggaggggcagtgactctgcgggacaagcaagcaggctatataagtttcagaaggctgggctccactcagatcttttccagcagctgctgcctgccagagaggcgccttcagagacccagcgcttacacaatacccaccatgtcccaggctggtgctcaggaagcccctatcaagaagaagcgcccccctgtgaaggaggaggacctgaagggggcccgaggaaacctgaccaagaaccaggaaatcaagtccaagacctaccaggtcatgcgagagtgtgagcaagctggctcggccgccccgtcggtgttcagccgcacccgcacaggtaccgagactgtctttgagaagcccaaagccggacccaccaagagtgtcttcggctgagaagtgtgcgccactccccttgctgcccgaatgctcggaaacaggagccttacccaggaactcttttttatgccagaacgcttcctctcccctgctgtctctggggctgccaccctcccccacagtccaggcccttcagccaagggctctgcaccagcaccttggaagcaccaataaagaggatgcccacgtggccccagcaaaaaaaaaaagaagcctcctggcagacactggagccacgatgaagcccccaaggcctgtccgtacctgcagcaaagttctcgtcctgctttcactgctggccatccaccagactactactgccgaaaagaatggcatcgacatctacagcctcaccgtggactccagggtctcatcccgatttgcccacacggtcgtcaccagccgagtggtcaatagggccaatactgtgcaggaggccaccttccagatggagctgcccaagaaagccttcatcaccaacttctccatgatcatcgatggcatgacctacccagggatcatcaaggagaaggctgaagcccaggcacagtacagcgcagcagtggccaagggaaagagcgctggcctcgtcaaggccaccgggagaaacatggagcagttccaggtgtcggtcagtgtggctcccaatgccaagatcacctttgagctggtctatgaggagctgctcaagcggcgtttgggggtgtacgagctgctgctgaaagtgcggccccagcagctggtcaagcacctgcagatggacattcacatcttcgagccccagggcatcagctttctggagacagagagcaccttcatgaccaaccagctggtagacgccctcaccacctggcagaataagaccaaggctcacatccggttcaagccaacactttcccagcagcaaaagtccccagagcagcaagaaacagtcctggacggcaacctcattatccgctatgatgtggaccgggccatctccgggggctccattcagatcgagaacggctactttgtacactactttgcccccgagggcctaaccacaatgcccaagaatgtggtctttgtcattgacaagagcggctccatgagtggcaggaaaatccagcagacccgggaagccctaatcaagatcctggatgacctcagccccagagaccagttcaacctcatcgtcttcagtacagaagcaactcagtggaggccatcactggtgccagcctcagccgagaacgtgaacaaggccaggagctttgctgcgggcatccaggccctgggagggaccaacatcaatgatgcaatgctgatggctgtgcagttgctggacagcagcaaccaggaggagcggctgcccgaagggagtgtctcactcatcatcctgctcaccgatggcgaccccactgtgggggagactaaccccaggagcatccagaataacgtgcgggaagctgtaagtggccggtacagcctcttctgcctgggcttcggtttcgacgtcagctatgccttcctggagaagctggcactggacaatggcggcctggcccggcgcatccatgaggactcagactctgccctgcagctccaggacttctaccaggaagtggccaacccactgctgacagcagtgaccttcgagtacccaagcaatgccgtggaggaggtcactcagaacaacttccggctcctcttcaagggctcagagatggtggtggctgggaagctccaggaccgggggcctgatgtgctcacagccacagtcagtgggaagctgcctacacagaacatcactttccaaacggagtccagtgtggcagagcaggaggcggagttccagagccccaagtatatcttccacaacttcatggagaggctctgggcatacctgactatccagcagctgctggagcaaactgtctccgcatccgatgctgatcagcaggccctccggaaccaagcgctgaatttatcacttgcctacagctttgtcacgcctctcacatctatggtagtcaccaaacccgatgaccaagagcagtctcaagttgctgagaagcccatggaaggcgaaagtagaaacaggaatgtccactcaggttccactttcttcaaatattatctccagggagcaaaaataccaaaaccaggtgacaaagtaggaggtggggggaggggagattgacagattgggctcagtcctggctgtggagggtagtgccttgcccagctcctctggctggtgacagccctcgggcctcagttcagttgtatctgatcaggacttgaccacacagaggcttccttttctccaagaagaggatggaatagacaagctggagctgctggctcccggatgaatttcagacctggggttctcagctccaggcaacttggactcccaggacctcctgatgttcctgaccatgctgcttaccaccccttccgccgtctggccatcttgcctgcttcagcaccaccagccacctcaaatcctgatccagctgtgtctcgtgtcatgaatatgaaaaccacaggctccctctgccatcctgccactgcctgggcagagtgtggagcggctctgtgtggaccccagacaccgccaggggccagtgaacctgctctcagaccctgagcaaggggttgaggtgactggccagtatgagagggagaaggctgggttctcatggatcgaagtgaccttcaagaaccccctggtatgggttcacgcatcccctgaacacgtggtggtgactcggaaccgaagaagctctgcgtacaagtggaaggagacgctattctcagtgatgcccggcctgaagatgaccatggacaagacgggtctcctgctgctcagtgacccagacaaagtgaccatcggcctgttgttctgggatggccgtggggaggggctccggctccttctgcgtgacactgaccgcttctccagccacgttggagggacccttggccagttttaccaggaggtgctctggggatctccagcagcatcagatgacggcagacgcacgctgagggttcagggcaatgaccactctgccaccagagagcgcaggctggattaccaggaggggcccccgggagtggagatttcctgctggtctgtggagctgtagttctgatggaaggagctgtgcccaccctgtacacttggcttccccctgcaactgcagggccgcttctggggcctggaccaccatggggaggaagagtcccactcattacaaataaagaaaggtggtgtgagcctgggaagtgggtgtctccagttccatgtggccaaatcctagggcctcaacctcgcatcctgaaccttagcatcgtggaacacagaagcttccactgtcagctctcaagagcccatggccaggaaggcccatgctgagctttcagtccagccccttcattttacaaacaaggaaactgagctcgaaccacccatttgagatgtcactgtggcccccagctagaggcccagggctgggagcattctccaggagcagaggttcagtctgcttcatggtctcttggaccagttttgactaca

SEQ ID NO: 370282 - DNA, 5210 bp, Homo sapiens
  misc_feature (28)..(28): n is a, c, g, or t
aagcaggctggtacgccctggagttaanggatggctgcgggtttggcggcgctgcgccggcaggcagcgaggccgggcgggccctgggccctcgcgcccctcccgcgaggcctgtcatgcagggccccgccgggaacgcgagccggggactgccaggcgggccgccctccacagtcgcgtccggggcgggccgctgcgagagcggcgcgctcatgcacagcttcggcatcttcctgcaggggctgctcggcgtcgtggccttcagcacgttaatgctcaaacgcttcagagaaccaaagcatgaaagacgtccgtggaggatatggtttttagacacttccaaacaagccataggaatgctgttcatccactttgcaaatgtatacctagcagatctcactgaagaggacccttgttcactgtacctcatcaacttcctcctggacgccactgtgggcatgctgctcatctacgtgggggtgcgcgccgtcagcgtcctggtagagtggcagcagtgggagtccctgcgcttcggcgaatatggagaccctctgcagtgtggagcctgggtcgggcagtgcgctctttacatcgtgatcatgatttttgaaaagtctgtcgtcttcatcgtcctcctaatacttcagtggaaaaaggtggccctgttgaatcccattgaaaacccagacttgaagctggccatcgtcatgctgatcgtccccttctttgtcaacgctttgatgttttgggtagtggacaatttcctcatgagaaaggggaagacgaaagctaagctagaagaaaggggagccaaccaggactcgaggaatgggagcaaggtccgctaccggagggccgcatcccacgaggagtctgagtctgagatcctgatctcagcggatgatgagatggaggagtccgacgtggaggaggacctccgcagactgacccccctcaagcctgtgaagaaaaagaagcaccgctttgggctacccctgctgcctgccagagaggcgccttcagagacccagcgcttacacaatacccaccatgtcccaggctggtgctcaggaagcccctatcaagaagaagcgcccccctgtgaaggaggaggacctgaagggggcccgaggaaacctgaccaagaaccaggaaatcaagtccaagacctaccaggtcatgcgagagtgtgagcaagctggctcggccgccccgtcggtgttcagccgcacccgcacaggtaccgagactgtctttgagaagcccaaagccggacccaccaagagtgtcttcggctgagaagtgtgcgccactccccttgctgcccgaatgctcggaaacaggagccttacccaggaactcttttttatgccagaacgcttcctctcccctgctgtctctggggctgccaccctcccccacagtccaggcccttcagccaagggctctgcaccagcaccttggaagcaccaataaagaggatgcccacgtggccccagcaaaaaaaaaaagaagcctcctggcagacactggagccacgatgaagcccccaaggcctgtccgtacctgcagcaaagttctcgtcctgctttcactgctggccatccaccagactactactgccgaaaagaatggcatcgacatctacagcctcaccgtggactccagggtctcatcccgatttgcccacacggtcgtcaccagccgagtggtcaatagggccaatactgtgcaggaggccaccttccagatggagctgcccaagaaagccttcatcaccaacttctccatgatcatcgatggcatgacctacccagggatcatcaaggagaaggctgaagcccaggcacagtacagcgcagcagtggccaagggaaagagcgctggcctcgtcaaggccaccgggagaaacatggagcagttccaggtgtcggtcagtgtggctcccaatgccaagatcacctttgagctggtctatgaggagctgctcaagcggcgtttgggggtgtacgagctgctgctgaaagtgcggccccagcagctggtcaagcacctgcagatggacattcacatcttcgagccccagggcatcagctttctggagacagagagcaccttcatgaccaaccagctggtagacgccctcaccacctggcagaataagaccaaggctcacatccggttcaagccaacactttcccagcagcaaaagtccccagagcagcaagaaacagtcctggacggcaacctcattatccgctatgatgtggaccgggccatctccgggggctccattcagatcgagaacggctactttgtacactactttgcccccgagggcctaaccacaatgcccaagaatgtggtctttgtcattgacaagagcggctccatgagtggcaggaaaatccagcagacccgggaagccctaatcaagatcctggatgacctcagccccagagaccagttcaacctcatcgtcttcagtacagaagcaactcagtggaggccatcactggtgccagcctcagccgagaacgtgaacaaggccaggagctttgctgcgggcatccaggccctgggagggaccaacatcaatgatgcaatgctgatggctgtgcagttgctggacagcagcaaccaggaggagcggctgcccgaagggagtgtctcactcatcatcctgctcaccgatggcgaccccactgtgggggagactaaccccaggagcatccagaataacgtgcgggaagctgtaagtggccggtacagcctcttctgcctgggcttcggtttcgacgtcagctatgccttcctggagaagctggcactggacaatggcggcctggcccggcgcatccatgaggactcagactctgccctgcagctccaggacttctaccaggaagtggccaacccactgctgacagcagtgaccttcgagtacccaagcaatgccgtggaggaggtcactcagaacaacttccggctcctcttcaagggctcagagatggtggtggctgggaagctccaggaccgggggcctgatgtgctcacagccacagtcagtgggaagctgcctacacagaacatcactttccaaacggagtccagtgtggcagagcaggaggcggagttccagagccccaagtatatcttccacaacttcatggagaggctctgggcatacctgactatccagcagctgctggagcaaactgtctccgcatccgatgctgatcagcaggccctccggaaccaagcgctgaatttatcacttgcctacagctttgtcacgcctctcacatctatggtagtcaccaaacccgatgaccaagagcagtctcaagttgctgagaagcccatggaaggcgaaagtagaaacaggaatgtccactcaggttccactttcttcaaatattatctccagggagcaaaaataccaaaaccagaggcttccttttctccaagaagaggatggaatagacaagctggagctgctggctcccggatgaatttcagacctggggttctcagctccaggcaacttggactcccaggacctcctgatgttcctgaccatgctgcttaccaccccttccgccgtctggccatctctgcacagccaggctggacctatccctgacagcatgctcttctgtttgaaaatctcctgtgacaaaggccattctaggtggagtgtatgtgtggcaggatggggggctggagcttggtggcagcgctgctggttgcccgcctcctgactgccttcctgctccctttctgtttccggatgttcctgccctagtgcctgcttcagcaccaccagccacctcaaatcctgatccagctgtgtctcgtgtcatgaatatgaaaatcgaaggtgcccccaaggccagaggccctgtcctaacagggggatcctgggaggggagtgacctgtcacatgtctcgatgttgaagtagtgagggaacccagccacacctagtcactgctccctccctcaacctcccactcctcaggaaggggctgcctaaacccagactttttcttcttttagaaacaaccatgacaacccaaaccccaggttcgtggcccctttccacatccttgcccccagcctgcccttcctgctccaggagccgtgccccggctgtcccagcccccatccacaggctccctctgccatcctgccactgcctgggcagagtgtggagcggctctgtgtggaccccagacaccgccaggggccagtgaacctgctctcagaccctgagcaaggggttgaggtgactggccagtatgagagggagaaggctgggttctcatggatcgaagtgaccttcaagaaccccctggtatgggttcacgcatcccctgaacacgtggtggtgactcggaaccgaagaagctctgcgtacaagtggaaggagacgctattctcagtgatgcccggcctgaagatgaccatggacaagacgggtctcctgctgctcagtgacccagacaaagtgaccatcggcctgttgttctgggatggccgtggggaggggctccggctccttctgcgtgacactgaccgcttctccagccacgttggagggacccttggccagttttaccaggaggtgctctggggatctccagcagcatcagatgacggcagacgcacgctgagggttcagggcaatgaccactctgccaccagagagcgcaggctggattaccaggaggggcccccgggagtggagatttcctgctggtctgtggagctgtagttctgatggaaggagctgtgcccaccctgtacacttggcttccccctgcaactgcagggccgcttctggggcctggaccaccatggggaggaagagtcccactcattacaaataaagaaaggtggtgtgagcctgggaagtgggtgtctccagttccatgtggccaaatcctagggcctcaacctcgcatcctgaaccttagcatcgtggaacacagaagcttccactgtcagctctcaagagcccatggccaggaaggcccatgctgagctttcagtccagccccttcattttacaaacaaggaaactgagctcgaaccacccatttgagatgtcactgtggcccccagctagaggcccagggctgggagcattctccaggagcagaggttcagtctgcttcatggtctcttggaccagttttgactaca

SEQ ID NO: 370283 - DNA, 4955 bp, Homo sapiens
  misc_feature (28)..(28): n is a, c, g, or t
aagcaggctggtacgccctggagttaanggatggctgcgggtttggcggcgctgcgccggcaggcagcgaggccgggcgggccctgggccctcgcgcccctcccgcgaggcctgtcatgcagggccccgccgggaacgcgagccggggactgccaggcgggccgccctccacagtcgcgtccggggcgggccgctgcgagagcggcgcgctcatgcacagcttcggcatcttcctgcaggggctgctcggcgtcgtggccttcagcacgttaatgctcaaacgcttcagagaaccaaagcatgaaagacgtccgtggaggatatggtttttagacacttccaaacaagccataggaatgctgttcatccactttgcaaatgtatacctagcagatctcactgaagaggacccttgttcactgtacctcatcaacttcctcctggacgccactgtgggcatgctgctcatctacgtgggggtgcgcgccgtcagcgtcctggtagagtggcagcagtgggagtccctgcgcttcggcgaatatggagaccctctgcagtgtggagcctgggtcgggcagtgcgctctttacatcgtgatcatgatttttgaaaagtctgtcgtcttcatcgtcctcctaatacttcagtggaaaaaggtggccctgttgaatcccattgaaaacccagacttgaagctggccatcgtcatgctgatcgtccccttctttgtcaacgctttgatgttttgggtagtggacaatttcctcatgagaaaggggaagacgaaagctaagctagaagaaaggggagccaaccaggactcgaggaatgggagcaaggtccgctaccggagggccgcatcccacgaggagtctgagtctgagatcctgatctcagcggatgatgagatggaggagtccgacgtggaggaggacctccgcagactgacccccctcaagcctgtgaagaaaaagaagcaccgctttgggctacccctgctgcctgccagagaggcgccttcagagacccagcgcttacacaatacccaccatgtcccaggctggtgctcaggaagcccctatcaagaagaagcgcccccctgtgaaggaggaggacctgaagggggcccgaggaaacctgaccaagaaccaggaaatcaagtccaagacctaccaggtcatgcgagagtgtgagcaagctggctcggccgccccgtcggtgttcagccgcacccgcacaggtaccgagactgtctttgagaagcccaaagccggacccaccaagagtgtcttcggctgagaagtgtgcgccactccccttgctgcccgaatgctcggaaacaggagccttacccaggaactcttttttatgccagaacgcttcctctcccctgctgtctctggggctgccaccctcccccacagtccaggcccttcagccaagggctctgcaccagcaccttggaagcaccaataaagaggatgcccacgtggccccagcaaaaaaaaaaagaagcctcctggcagacactggagccacgatgaagcccccaaggcctgtccgtacctgcagcaaagttctcgtcctgctttcactgctggccatccaccagactactactgccgaaaagaatggcatcgacatctacagcctcaccgtggactccagggtctcatcccgatttgcccacacggtcgtcaccagccgagtggtcaatagggccaatactgtgcaggaggccaccttccagatggagctgcccaagaaagccttcatcaccaacttctccatgatcatcgatggcatgacctacccagggatcatcaaggagaaggctgaagcccaggcacagtacagcgcagcagtggccaagggaaagagcgctggcctcgtcaaggccaccgggagaaacatggagcagttccaggtgtcggtcagtgtggctcccaatgccaagatcacctttgagctggtctatgaggagctgctcaagcggcgtttgggggtgtacgagctgctgctgaaagtgcggccccagcagctggtcaagcacctgcagatggacattcacatcttcgagccccagggcatcagctttctggagacagagagcaccttcatgaccaaccagctggtagacgccctcaccacctggcagaataagaccaaggctcacatccggttcaagccaacactttcccagcagcaaaagtccccagagcagcaagaaacagtcctggacggcaacctcattatccgctatgatgtggaccgggccatctccgggggctccattcagatcgagaacggctactttgtacactactttgcccccgagggcctaaccacaatgcccaagaatgtggtctttgtcattgacaagagcggctccatgagtggcaggaaaatccagcagacccgggaagccctaatcaagatcctggatgacctcagccccagagaccagttcaacctcatcgtcttcagtacagaagcaactcagtggaggccatcactggtgccagcctcagccgagaacgtgaacaaggccaggagctttgctgcgggcatccaggccctgggagggaccaacatcaatgatgcaatgctgatggctgtgcagttgctggacagcagcaaccaggaggagcggctgcccgaagggagtgtctcactcatcatcctgctcaccgatggcgaccccactgtgggggagactaaccccaggagcatccagaataacgtgcgggaagctgtaagtggccggtacagcctcttctgcctgggcttcggtttcgacgtcagctatgccttcctggagaagctggcactggacaatggcggcctggcccggcgcatccatgaggactcagactctgccctgcagctccaggacttctaccaggaagtggccaacccactgctgacagcagtgaccttcgagtacccaagcaatgccgtggaggaggtcactcagaacaacttccggctcctcttcaagggctcagagatggtggtggctgggaagctccaggaccgggggcctgatgtgctcacagccacagtcagtgggaagctgcctacacagaacatcactttccaaacggagtccagtgtggcagagcaggaggcggagttccagagccccaagtatatcttccacaacttcatggagaggctctgggcatacctgactatccagcagctgctggagcaaactgtctccgcatccgatgctgatcagcaggccctccggaaccaagcgctgaatttatcacttgcctacagctttgtcacgcctctcacatctatggtagtcaccaaacccgatgaccaagagcagtctcaagttgctgagaagcccatggaaggcgaaagtagaaacaggaatgtccactcaggttccactttcttcaaatattatctccagggagcaaaaataccaaaaccaggtgacaaagtaggaggtggggggaggggagattgacagattgggctcagtcctggctgtggagggtagtgccttgcccagctcctctggctggtgacagccctcgggcctcagttcagttgtatctgatcaggacttgaccacacagaggcttccttttctccaagaagaggatggaatagacaagctggagctgctggctcccggatgaatttcagacctggggttctcagctccaggcaacttggactcccaggacctcctgatgttcctgaccatgctgcttaccaccccttccgccgtctggccatcttgcctgcttcagcaccaccagccacctcaaatcctgatccagctgtgtctcgtgtcatgaatatgaaaagttcgtggcccctttccacatccttgcccccagcctgcccttcctgctccaggagccgtgccccggctgtcccagcccccatccacaggctccctctgccatcctgccactgcctgggcagagtgtggagcggctctgtgtggaccccagacaccgccaggggccagtgaacctgctctcagaccctgagcaaggggttgaggtgactggccagtatgagagggagaaggctgggttctcatggatcgaagtgaccttcaagaaccccctggtatgggttcacgcatcccctgaacacgtggtggtgactcggaaccgaagaagctctgcgtacaagtggaaggagacgctattctcagtgatgcccggcctgaagatgaccatggacaagacgggtctcctgctgctcagtgacccagacaaagtgaccatcggcctgttgttctgggatggccgtggggaggggctccggctccttctgcgtgacactgaccgcttctccagccacgttggagggacccttggccagttttaccaggaggtgctctggggatctccagcagcatcagatgacggcagacgcacgctgagggttcagggcaatgaccactctgccaccagagagcgcaggctggattaccaggaggggcccccgggagtggagatttcctgctggtctgtggagctgtagttctgatggaaggagctgtgcccaccctgtacacttggcttccccctgcaactgcagggccgcttctggggcctggaccaccatggggaggaagagtcccactcattacaaataaagaaaggtggtgtgagcctgggaagtgggtgtctccagttccatgtggccaaatcctagggcctcaacctcgcatcctgaaccttagcatcgtggaacacagaagcttccactgtcagctctcaagagcccatggccaggaaggcccatgctgagctttcagtccagccccttcattttacaaacaaggaaactgagctcgaaccacccatttgagatgtcactgtggcccccagctagaggcccagggctgggagcattctccaggagcagaggttcagtctgcttcatggtctcttggaccagttttgactaca

SEQ ID NO: 370284 - DNA, 4636 bp, Homo sapiens
  misc_feature (28)..(28): n is a, c, g, or t
aagcaggctggtacgccctggagttaanggatggctgcgggtttggcggcgctgcgccggcaggcagcgaggccgggcgggccctgggccctcgcgcccctcccgcgaggcctgtcatgcagggccccgccgggaacgcgagccggggactgccaggcgggccgccctccacagtcgcgtccggggcgggccgctgcgagagcggcgcgctcatgcacagcttcggcatcttcctgcaggggctgctcggcgtcgtggccttcagcacgttaatgctcaaacgcttcagagaaccaaagcatgaaagacgtccgtggaggatatggtttttagacacttccaaacaagccataggaatgctgttcatccactttgcaaatgtatacctagcagatctcactgaagaggacccttgttcactgtacctcatcaacttcctcctggacgccactgtgggcatgctgctcatctacgtgggggtgcgcgccgtcagcgtcctggtagagtggcagcagtgggagtccctgcgcttcggcgaatatggagaccctctgcagtgtggagcctgggtcgggcagtgcgctctttacatcgtgatcatgatttttgaaaagtctgtcgtcttcatcgtcctcctaatacttcagtggaaaaaggtggccctgttgaatcccattgaaaacccagacttgaagctggccatcgtcatgctgatcgtccccttctttgtcaacgctttgatgttttgggtagtggacaatttcctcatgagaaaggggaagacgaaagctaagctagaagaaaggggagccaaccaggactcgaggaatgggagcaaggtccgctaccggagggccgcatcccacgaggagtctgagtctgagatcctgatctcagcggatgatgagatggaggagtccgacgtggaggaggacctccgcagactgacccccctcaagcctgtgaagaaaaagaagcaccgctttgggctacccctgctgcctgccagagaggcgccttcagagacccagcgcttacacaatacccaccatgtcccaggctggtgctcaggaagcccctatcaagaagaagcgcccccctgtgaaggaggaggacctgaagggggcccgaggaaacctgaccaagaaccaggaaatcaagtccaagacctaccaggtcatgcgagagtgtgagcaagctggctcggccgccccgtcggtgttcagccgcacccgcacaggtaccgagactgtctttgagaagcccaaagccggacccaccaagagtgtcttcggctgagaagtgtgcgccactccccttgctgcccgaatgctcggaaacaggagccttacccaggaactcttttttatgccagaacgcttcctctcccctgctgtctctggggctgccaccctcccccacagtccaggcccttcagccaagggctctgcaccagcaccttggaagcaccaataaagaggatgcccacgtggccccagcaaaaaaaaaaagaagcctcctggcagacactggagccacgatgaagcccccaaggcctgtccgtacctgcagcaaagttctcgtcctgctttcactgctggccatccaccagactactactgccgaaaagaatggcatcgacatctacagcctcaccgtggactccagggtctcatcccgatttgcccacacggtcgtcaccagccgagtggtcaatagggccaatactgtgcaggaggccaccttccagatggagctgcccaagaaagccttcatcaccaacttctccatgatcatcgatggcatgacctacccagggatcatcaaggagaaggctgaagcccaggcacagtacagcgcagcagtggccaagggaaagagcgctggcctcgtcaaggccaccgggagaaacatggagcagttccaggtgtcggtcagtgtggctcccaatgccaagatcacctttgagctggtctatgaggagctgctcaagcggcgtttgggggtgtacgagctgctgctgaaagtgcggccccagcagctggtcaagcacctgcagatggacattcacatcttcgagccccagggcatcagctttctggagacagagagcaccttcatgaccaaccagctggtagacgccctcaccacctggcagaataagaccaaggctcacatccggttcaagccaacactttcccagcagcaaaagtccccagagcagcaagaaacagtcctggacggcaacctcattatccgctatgatgtggaccgggccatctccgggggctccattcagatcgagaacggctactttgtacactactttgcccccgagggcctaaccacaatgcccaagaatgtggtctttgtcattgacaagagcggctccatgagtggcaggaaaatccagcagacccgggaagccctaatcaagatcctggatgacctcagccccagagaccagttcaacctcatcgtcttcagtacagaagcaactcagtggaggccatcactggtgccagcctcagccgagaacgtgaacaaggccaggagctttgctgcgggcatccaggccctgggagggaccaacatcaatgatgcaatgctgatggctgtgcagttgctggacagcagcaaccaggaggagcggctgcccgaagggagtgtctcactcatcatcctgctcaccgatggcgaccccactgtgggggagactaaccccaggagcatccagaataacgtgcgggaagctgtaagtggccggtacagcctcttctgcctgggcttcggtttcgacgtcagctatgccttcctggagaagctggcactggacaatggcggcctggcccggcgcatccatgaggactcagactctgccctgcagctccaggacttctaccaggaagtggccaacccactgctgacagcagtgaccttcgagtacccaagcaatgccgtggaggaggtcactcagaacaacttccggctcctcttcaagggctcagagatggtggtggctgggaagctccaggaccgggggcctgatgtgctcacagccacagtcagtgggaagctgcctacacagaacatcactttccaaacggagtccagtgtggcagagcaggaggcggagttccagagccccaagtatatcttccacaacttcatggagaggctctgggcatacctgactatccagcagctgctggagcaaactgtctccgcatccgatgctgatcagcaggccctccggaaccaagcgctgaatttatcacttgcctacagctttgtcacgcctctcacatctatggtagtcaccaaacccgatgaccaagagcagtctcaagttgctgagaagcccatggaaggcgaaagtagaaacaggaatgtccactcagctggagctgctggctcccggatgaatttcagacctggggttctcagctccaggcaacttggactcccaggacctcctgatgttcctgaccatgctgcttaccaccccttccgccgtctggccatcttgcctgcttcagcaccaccagccacctcaaatcctgatccagctgtgtctcgtgtcatgaatatgaaaaccacaggctccctctgccatcctgccactgcctgggcagagtgtggagcggctctgtgtggaccccagacaccgccaggggccagtgaacctgctctcagaccctgagcaaggggttgaggtgactggccagtatgagagggagaaggctgggttctcatggatcgaagtgaccttcaagaaccccctggtatgggttcacgcatcccctgaacacgtggtggtgactcggaaccgaagaagctctgcgtacaagtggaaggagacgctattctcagtgatgcccggcctgaagatgaccatggacaagacgggtctcctgctgctcagtgacccagacaaagtgaccatcggcctgttgttctgggatggccgtggggaggggctccggctccttctgcgtgacactgaccgcttctccagccacgttggagggacccttggccagttttaccaggaggtgctctggggatctccagcagcatcagatgacggcagacgcacgctgagggttcagggcaatgaccactctgccaccagagagcgcaggctggattaccaggaggggcccccgggagtggagatttcctgctggtctgtggagctgtagttctgatggaaggagctgtgcccaccctgtacacttggcttccccctgcaactgcagggccgcttctggggcctggaccaccatggggaggaagagtcccactcattacaaataaagaaaggtggtgtgagcctgggaagtgggtgtctccagttccatgtggccaaatcctagggcctcaacctcgcatcctgaaccttagcatcgtggaacacagaagcttccactgtcagctctcaagagcccatggccaggaaggcccatgctgagctttcagtccagccccttcattttacaaacaaggaaactgagctcgaaccacccatttgagatgtcactgtggcccccagctagaggcccagggctgggagcattctccaggagcagaggttcagtctgcttcatggtctcttggaccagttttgactaca

SEQ ID NO: 370285 - DNA, 4524 bp, Homo sapiens
  misc_feature (28)..(28): n is a, c, g, or t
aagcaggctggtacgccctggagttaanggatggctgcgggtttggcggcgctgcgccggcaggcagcgaggccgggcgggccctgggccctcgcgcccctcccgcgaggcctgtcatgcagggccccgccgggaacgcgagccggggactgccaggcgggccgccctccacagtcgcgtccggggcgggccgctgcgagagcggcgcgctcatgcacagcttcggcatcttcctgcaggggctgctcggcgtcgtggccttcagcacgttaatgctcaaacgcttcagagaaccaaagcatgaaagacgtccgtggaggatatggtttttagacacttccaaacaagccataggaatgctgttcatccactttgcaaatgtatacctagcagatctcactgaagaggacccttgttcactgtacctcatcaacttcctcctggacgccactgtgggcatgctgctcatctacgtgggggtgcgcgccgtcagcgtcctggtagagtggcagcagtgggagtccctgcgcttcggcgaatatggagaccctctgcagtgtggagcctgggtcgggcagtgcgctctttacatcgtgatcatgatttttgaaaagtctgtcgtcttcatcgtcctcctaatacttcagtggaaaaaggtggccctgttgaatcccattgaaaacccagacttgaagctggccatcgtcatgctgatcgtccccttctttgtcaacgctttgatgttttgggtagtggacaatttcctcatgagaaaggggaagacgaaagctaagctagaagaaaggggagccaaccaggactcgaggaatgggagcaaggtccgctaccggagggccgcatcccacgaggagtctgagtctgagatcctgatctcagcggatgatgagatggaggagtccgacgtggaggaggacctccgcagactgacccccctcaagcctgtgaagaaaaagaagcaccgctttgggctacccctgctgcctgccagagaggcgccttcagagacccagcgcttacacaatacccaccatgtcccaggctggtgctcaggaagcccctatcaagaagaagcgcccccctgtgaaggaggaggacctgaagggggcccgaggaaacctgaccaagaaccaggaaatcaagtccaagacctaccaggtcatgcgagagtgtgagcaagctggctcggccgccccgtcggtgttcagccgcacccgcacaggtaccgagactgtctttgagaagcccaaagccggacccaccaagagtgtcttcggctgagaagtgtgcgccactccccttgctgcccgaatgctcggaaacaggagccttacccaggaactcttttttatgccagaacgcttcctctcccctgctgtctctggggctgccaccctcccccacagtccaggcccttcagccaagggctctgcaccagcaccttggaagcaccaataaagaggatgcccacgtggccccagcaaaaaaaaaaagaagcctcctggcagacactggagccacgatgaagcccccaaggcctgtccgtacctgcagcaaagttctcgtcctgctttcactgctggccatccaccagactactactgccgaaaagaatggcatcgacatctacagcctcaccgtggactccagggtctcatcccgatttgcccacacggtcgtcaccagccgagtggtcaatagggccaatactgtgcaggaggccaccttccagatggagctgcccaagaaagccttcatcaccaacttctccatgatcatcgatggcatgacctacccagggatcatcaaggagaaggctgaagcccaggcacagtacagcgcagcagtggccaagggaaagagcgctggcctcgtcaaggccaccgggagaaacatggagcagttccaggtgtcggtcagtgtggctcccaatgccaagatcacctttgagctggtctatgaggagctgctcaagcggcgtttgggggtgtacgagctgctgctgaaagtgcggccccagcagctggtcaagcacctgcagatggacattcacatcttcgagccccagggcatcagctttctggagacagagagcaccttcatgaccaaccagctggtagacgccctcaccacctggcagaataagaccaaggctcacatccggttcaagccaacactttcccagcagcaaaagtccccagagcagcaagaaacagtcctggacggcaacctcattatccgctatgatgtggaccgggccatctccgggggctccattcagatcgagaacggctactttgtacactactttgcccccgagggcctaaccacaatgcccaagaatgtggtctttgtcattgacaagagcggctccatgagtggcaggaaaatccagcagacccgggaagccctaatcaagatcctggatgacctcagccccagagaccagttcaacctcatcgtcttcagtacagaagcaactcagtggaggccatcactggtgccagcctcagccgagaacgtgaacaaggccaggagctttgctgcgggcatccaggccctgggagggaccaacatcaatgatgcaatgctgatggctgtgcagttgctggacagcagcaaccaggaggagcggctgcccgaagggagtgtctcactcatcatcctgctcaccgatggcgaccccactgtgggggagactaaccccaggagcatccagaataacgtgcgggaagctgtaagtggccggtacagcctcttctgcctgggcttcggtttcgacgtcagctatgccttcctggagaagctggcactggacaatggcggcctggcccggcgcatccatgaggactcagactctgccctgcagctccaggacttctaccaggaagtggccaacccactgctgacagcagtgaccttcgagtacccaagcaatgccgtggaggaggtcactcagaacaacttccggctcctcttcaagggctcagagatggtggtggctgggaagctccaggaccgggggcctgatgtgctcacagccacagtcagtgggaagctgcctacacagaacatcactttccaaacggagtccagtgtggcagagcaggaggcggagttccagagccccaagtatatcttccacaacttcatggagaggctctgggcatacctgactatccagcagctgctggagcaaactgtctccgcatccgatgctgatcagcaggccctccggaaccaagcgctgaatttatcacttgcctacagctttgtcacgcctctcacatctatggtagtcaccaaacccgatgaccaagagcagtctcaagttgctgagaagcccatggaaggcgaaagtagaaacaggaatgtccactcagctggagctgctggctcccggatgaatttcagacctggggttctcagctccaggcaacttggactcccaggacctcctgatgttcctgaccatgctgcttaccaccccttccgccgtctggccatcttgcctgcttcagcaccaccagccacctcaaatcctgatccagctgtgtctcgtgtcatgaatatgaaaagggttgaggtgactggccagtatgagagggagaaggctgggttctcatggatcgaagtgaccttcaagaaccccctggtatgggttcacgcatcccctgaacacgtggtggtgactcggaaccgaagaagctctgcgtacaagtggaaggagacgctattctcagtgatgcccggcctgaagatgaccatggacaagacgggtctcctgctgctcagtgacccagacaaagtgaccatcggcctgttgttctgggatggccgtggggaggggctccggctccttctgcgtgacactgaccgcttctccagccacgttggagggacccttggccagttttaccaggaggtgctctggggatctccagcagcatcagatgacggcagacgcacgctgagggttcagggcaatgaccactctgccaccagagagcgcaggctggattaccaggaggggcccccgggagtggagatttcctgctggtctgtggagctgtagttctgatggaaggagctgtgcccaccctgtacacttggcttccccctgcaactgcagggccgcttctggggcctggaccaccatggggaggaagagtcccactcattacaaataaagaaaggtggtgtgagcctgggaagtgggtgtctccagttccatgtggccaaatcctagggcctcaacctcgcatcctgaaccttagcatcgtggaacacagaagcttccactgtcagctctcaagagcccatggccaggaaggcccatgctgagctttcagtccagccccttcattttacaaacaaggaaactgagctcgaaccacccatttgagatgtcactgtggcccccagctagaggcccagggctgggagcattctccaggagcagaggttcagtctgcttcatggtctcttggaccagttttgactaca

SEQ ID NO: 370286 - DNA, 4660 bp, Homo sapiens
  misc_feature (28)..(28): n is a, c, g, or t
aagcaggctggtacgccctggagttaanggatggctgcgggtttggcggcgctgcgccggcaggcagcgaggccgggcgggccctgggccctcgcgcccctcccgcgaggcctgtcatgcagggccccgccgggaacgcgagccggggactgccaggcgggccgccctccacagtcgcgtccggggcgggccgctgcgagagcggcgcgctcatgcacagcttcggcatcttcctgcaggggctgctcggcgtcgtggccttcagcacgttaatgctcaaacgcttcagagaaccaaagcatgaaagacgtccgtggaggatatggtttttagacacttccaaacaagccataggaatgctgttcatccactttgcaaatgtatacctagcagatctcactgaagaggacccttgttcactgtacctcatcaacttcctcctggacgccactgtgggcatgctgctcatctacgtgggggtgcgcgccgtcagcgtcctggtagagtggcagcagtgggagtccctgcgcttcggcgaatatggagaccctctgcagtgtggagcctgggtcgggcagtgcgctctttacatcgtgatcatgatttttgaaaagtctgtcgtcttcatcgtcctcctaatacttcagtggaaaaaggtggccctgttgaatcccattgaaaacccagacttgaagctggccatcgtcatgctgatcgtccccttctttgtcaacgctttgatgttttgggtagtggacaatttcctcatgagaaaggggaagacgaaagctaagctagaagaaaggggagccaaccaggactcgaggaatgggagcaaggtccgctaccggagggccgcatcccacgaggagtctgagtctgagatcctgatctcagcggatgatgagatggaggagtccgacgtggaggaggacctccgcagactgacccccctcaagcctgtgaagaaaaagaagcaccgctttgggctacccctgctgcctgccagagaggcgccttcagagacccagcgcttacacaatacccaccatgtcccaggctggtgctcaggaagcccctatcaagaagaagcgcccccctgtgaaggaggaggacctgaagggggcccgaggaaacctgaccaagaaccaggaaatcaagtccaagacctaccaggtcatgcgagagtgtgagcaagctggctcggccgccccgtcggtgttcagccgcacccgcacaggtaccgagactgtctttgagaagcccaaagccggacccaccaagagtgtcttcggctgagaagtgtgcgccactccccttgctgcccgaatgctcggaaacaggagccttacccaggaactcttttttatgccagaacgcttcctctcccctgctgtctctggggctgccaccctcccccacagtccaggcccttcagccaagggctctgcaccagcaccttggaagcaccaataaagaggatgcccacgtggccccagcaaaaaaaaaaagaagcctcctggcagacactggagccacgatgaagcccccaaggcctgtccgtacctgcagcaaagttctcgtcctgctttcactgctggccatccaccagactactactgccgaaaagaatggcatcgacatctacagcctcaccgtggactccagggtctcatcccgatttgcccacacggtcgtcaccagccgagtggtcaatagggccaatactgtgcaggaggccaccttccagatggagctgcccaagaaagccttcatcaccaacttctccatgatcatcgatggcatgacctacccagggatcatcaaggagaaggctgaagcccaggcacagtacagcgcagcagtggccaagggaaagagcgctggcctcgtcaaggccaccgggagaaacatggagcagttccaggtgtcggtcagtgtggctcccaatgccaagatcacctttgagctggtctatgaggagctgctcaagcggcgtttgggggtgtacgagctgctgctgaaagtgcggccccagcagctggtcaagcacctgcagatggacattcacatcttcgagccccagggcatcagctttctggagacagagagcaccttcatgaccaaccagctggtagacgccctcaccacctggcagaataagaccaaggctcacatccggttcaagccaacactttcccagcagcaaaagtccccagagcagcaagaaacagtcctggacggcaacctcattatccgctatgatgtggaccgggccatctccgggggctccattcagatcgagaacggctactttgtacactactttgcccccgagggcctaaccacaatgcccaagaatgtggtctttgtcattgacaagagcggctccatgagtggcaggaaaatccagcagacccgggaagccctaatcaagatcctggatgacctcagccccagagaccagttcaacctcatcgtcttcagtacagaagcaactcagtggaggccatcactggtgccagcctcagccgagaacgtgaacaaggccaggagctttgctgcgggcatccaggccctgggagggaccaacatcaatgatgcaatgctgatggctgtgcagttgctggacagcagcaaccaggaggagcggctgcccgaagggagtgtctcactcatcatcctgctcaccgatggcgaccccactgtgggggagactaaccccaggagcatccagaataacgtgcgggaagctgtaagtggccggtacagcctcttctgcctgggcttcggtttcgacgtcagctatgccttcctggagaagctggcactggacaatggcggcctggcccggcgcatccatgaggactcagactctgccctgcagctccaggacttctaccaggaagtggccaacccactgctgacagcagtgaccttcgagtacccaagcaatgccgtggaggaggtcactcagaacaacttccggctcctcttcaagggctcagagatggtggtggctgggaagctccaggaccgggggcctgatgtgctcacagccacagtcagtgggaagctgcctacacagaacatcactttccaaacggagtccagtgtggcagagcaggaggcggagttccagagccccaagtatatcttccacaacttcatggagaggctctgggcatacctgactatccagcagctgctggagcaaactgtctccgcatccgatgctgatcagcaggccctccggaaccaagcgctgaatttatcacttgcctacagctttgtcacgcctctcacatctatggtagtcaccaaacccgatgaccaagagcagtctcaagttgctgagaagcccatggaaggcgaaagtagaaacaggaatgtccactcaggttccactttcttcaaatattatctccagggagcaaaaataccaaaaccaggtgacaaagtaggaggtggggggaggggagattgacagattgggctcagtcctggctgtggagggtagtgccttgcccagctcctctggctggtgacagccctcgggcctcagttcagttgtatctgatcaggacttgaccacacagaggcttccttttctccaagaagaggatggaatagacaagctggagctgctggctcccggatgaatttcagacctggggttctcagctccaggcaacttggactcccaggacctcctgatgttcctgaccatgctgcttaccaccccttccgccgtctggccatcttgcctgcttcagcaccaccagccacctcaaatcctgatccagctgtgtctcgtgtcatgaatatgaaaaccacaggctccctctgccatcctgccactgcctgggcagagtgtggagcggctctgtgtggaccccagacaccgccaggggccagtgaacctgctctcagaccctgagcaaggggttgaggtgactggccagtatgagagggagaaggctgggttctcatggatcgaagtgaccttcaagaaccccctggtatgggttcacgcatcccctgaacacgtggtggtgactcggaaccgaagaagctctgcgtacaagtggaaggagacgctattctcagtgatgcccggcctgaagatgaccatggacaagacgggtctcctgctgctcagtgacccagacaaagtgaccatcggcctgttgttctgggatggccgtggggaggggctccggctccttctgcgtgacactgaccgcttctccagccacgttggagggacccttggccagttttaccaggaggtgctctggggatctccagcagcatcagatgacggcagacgcacgctgagggttcagggcaatgaccactctgccaccagagagcgcaggctggattaccaggaggggcccccgggagtggagatttcctgctggtctgtggagctgtagttctgatggaaggagctgtgcccaccctgtacacttggcttccccctgcaactgcagggccgcttctggggcctggaccaccatggggaggaagagtcccactcattacaaataaagaaaggtggtgtgagcctggaaaaaaaaaaaatatttcattatatataattaaaatatataaattaaatttaatataaaactcggttttttttttttttttt

SEQ ID NO: 370287 - DNA, 3884 bp, Homo sapiens
ggaagaagggggctcagggaggaaccccctgaagaacccctcttctatgtggctttggtggtattccacggctggtgctcaggaagcccctatcaagaagaagcgcccccctgtgaaggaggaggacctgaagggggcccgaggaaacctgaccaagaaccaggaaatcaagtccaagacctaccaggtcatgcgagagtgtgagcaagctggctcggccgccccgtcggtgttcagccgcacccgcacaggtaccgagactgtctttgagaagcccaaagccggacccaccaagagtgtcttcggctgagaagtgtgcgccactccccttgctgcccgaatgctcggaaacaggagccttacccaggaactcttttttatgccagaacgcttcctctcccctgctgtctctggggctgccaccctcccccacagtccaggcccttcagccaagggctctgcaccagcaccttggaagcaccaataaagaggatgcccacgtggccccagcaaaaaaaaaaagaagcctcctggcagacactggagccacgatgaagcccccaaggcctgtccgtacctgcagcaaagttctcgtcctgctttcactgctggccatccaccagactactactgccgaaaagaatggcatcgacatctacagcctcaccgtggactccagggtctcatcccgatttgcccacacggtcgtcaccagccgagtggtcaatagggccaatactgtgcaggaggccaccttccagatggagctgcccaagaaagccttcatcaccaacttctccatgatcatcgatggcatgacctacccagggatcatcaaggagaaggctgaagcccaggcacagtacagcgcagcagtggccaagggaaagagcgctggcctcgtcaaggccaccgggagaaacatggagcagttccaggtgtcggtcagtgtggctcccaatgccaagatcacctttgagctggtctatgaggagctgctcaagcggcgtttgggggtgtacgagctgctgctgaaagtgcggccccagcagctggtcaagcacctgcagatggacattcacatcttcgagccccagggcatcagctttctggagacagagagcaccttcatgaccaaccagctggtagacgccctcaccacctggcagaataagaccaaggctcacatccggttcaagccaacactttcccagcagcaaaagtccccagagcagcaagaaacagtcctggacggcaacctcattatccgctatgatgtggaccgggccatctccgggggctccattcagatcgagaacggctactttgtacactactttgcccccgagggcctaaccacaatgcccaagaatgtggtctttgtcattgacaagagcggctccatgagtggcaggaaaatccagcagacccgggaagccctaatcaagatcctggatgacctcagccccagagaccagttcaacctcatcgtcttcagtacagaagcaactcagtggaggccatcactggtgccagcctcagccgagaacgtgaacaaggccaggagctttgctgcgggcatccaggccctgggagggaccaacatcaatgatgcaatgctgatggctgtgcagttgctggacagcagcaaccaggaggagcggctgcccgaagggagtgtctcactcatcatcctgctcaccgatggcgaccccactgtgggggagactaaccccaggagcatccagaataacgtgcgggaagctgtaagtggccggtacagcctcttctgcctgggcttcggtttcgacgtcagctatgccttcctggagaagctggcactggacaatggcggcctggcccggcgcatccatgaggactcagactctgccctgcagctccaggacttctaccaggaagtggccaacccactgctgacagcagtgaccttcgagtacccaagcaatgccgtggaggaggtcactcagaacaacttccggctcctcttcaagggctcagagatggtggtggctgggaagctccaggaccgggggcctgatgtgctcacagccacagtcagtgggaagctgcctacacagaacatcactttccaaacggagtccagtgtggcagagcaggaggcggagttccagagccccaagtatatcttccacaacttcatggagaggctctgggcatacctgactatccagcagctgctggagcaaactgtctccgcatccgatgctgatcagcaggccctccggaaccaagcgctgaatttatcacttgcctacagctttgtcacgcctctcacatctatggtagtcaccaaacccgatgaccaagagcagtctcaagttgctgagaagcccatggaaggcgaaagtagaaacaggaatgtccactcaggttccactttcttcaaatattatctccagggagcaaaaataccaaaaccaggtgacaaagtaggaggtggggggaggggagattgacagattgggctcagtcctggctgtggagggtagtgccttgcccagctcctctggctggtgacagccctcgggcctcagttcagttgtatctgatcaggacttgaccacacagaggcttccttttctccaagaagaggatggaatagacaagctggagctgctggctcccggatgaatttcagacctggggttctcagctccaggcaacttggactcccaggacctcctgatgttcctgaccatgctgcttaccaccccttccgccgtctggccatcttgcctgcttcagcaccaccagccacctcaaatcctgatccagctgtgtctcgtgtcatgaatatgaaaaccacaggctccctctgccatcctgccactgcctgggcagagtgtggagcggctctgtgtggaccccagacaccgccaggggccagtgaacctgctctcagaccctgagcaaggggttgaggtgactggccagtatgagagggagaaggctgggttctcatggatcgaagtgaccttcaagaaccccctggtatgggttcacgcatcccctgaacacgtggtggtgactcggaaccgaagaagctctgcgtacaagtggaaggagacgctattctcagtgatgcccggcctgaagatgaccatggacaagacgggtctcctgctgctcagtgacccagacaaagtgaccatcggcctgttgttctgggatggccgtggggaggggctccggctccttctgcgtgacactgaccgcttctccagccacgttggagggacccttggccagttttaccaggaggtgctctggggatctccagcagcatcagatgacggcagacgcacgctgagggttcagggcaatgaccactctgccaccagagagcgcaggctggattaccaggaggggcccccgggagtggagatttcctgctggtctgtggagctgtagttctgatggaaggagctgtgcccaccctgtacacttggcttccccctgcaactgcagggccgcttctggggcctggaccaccatggggaggaagagtcccactcattacaaataaagaaaggtggtgtgagcctgggaagtgggtgtctccagttccatgtggccaaatcctagggcctcaacctcgcatcctgaaccttagcatcgtggaacacagaagcttccactgtcagctctcaagagcccatggccaggaaggcccatgctgagctttcagtccagccccttcattttacaaacaaggaaactgagctcgaaccacccatttgagatgtcactgtggcccccagctagaggcccagggctgggagcattctccaggagcagaggttcagtctgcttcatggtctcttggaccagttttgactaca

SEQ ID NO: 370288 - DNA, 3856 bp, Homo sapiens
cgtagtagagactagcgcttttacgtacccaccatgtcccaggctggtgctcaggaagcccctatcaagaagaagcgcccccctgtgaaggaggaggacctgaagggggcccgaggaaacctgaccaagaaccaggaaatcaagtccaagacctaccaggtcatgcgagagtgtgagcaagctggctcggccgccccgtcggtgttcagccgcacccgcacaggtaccgagactgtctttgagaagcccaaagccggacccaccaagagtgtcttcggctgagaagtgtgcgccactccccttgctgcccgaatgctcggaaacaggagccttacccaggaactcttttttatgccagaacgcttcctctcccctgctgtctctggggctgccaccctcccccacagtccaggcccttcagccaagggctctgcaccagcaccttggaagcaccaataaagaggatgcccacgtggccccagcaaaaaaaaaaagaagcctcctggcagacactggagccacgatgaagcccccaaggcctgtccgtacctgcagcaaagttctcgtcctgctttcactgctggccatccaccagactactactgccgaaaagaatggcatcgacatctacagcctcaccgtggactccagggtctcatcccgatttgcccacacggtcgtcaccagccgagtggtcaatagggccaatactgtgcaggaggccaccttccagatggagctgcccaagaaagccttcatcaccaacttctccatgatcatcgatggcatgacctacccagggatcatcaaggagaaggctgaagcccaggcacagtacagcgcagcagtggccaagggaaagagcgctggcctcgtcaaggccaccgggagaaacatggagcagttccaggtgtcggtcagtgtggctcccaatgccaagatcacctttgagctggtctatgaggagctgctcaagcggcgtttgggggtgtacgagctgctgctgaaagtgcggccccagcagctggtcaagcacctgcagatggacattcacatcttcgagccccagggcatcagctttctggagacagagagcaccttcatgaccaaccagctggtagacgccctcaccacctggcagaataagaccaaggctcacatccggttcaagccaacactttcccagcagcaaaagtccccagagcagcaagaaacagtcctggacggcaacctcattatccgctatgatgtggaccgggccatctccgggggctccattcagatcgagaacggctactttgtacactactttgcccccgagggcctaaccacaatgcccaagaatgtggtctttgtcattgacaagagcggctccatgagtggcaggaaaatccagcagacccgggaagccctaatcaagatcctggatgacctcagccccagagaccagttcaacctcatcgtcttcagtacagaagcaactcagtggaggccatcactggtgccagcctcagccgagaacgtgaacaaggccaggagctttgctgcgggcatccaggccctgggagggaccaacatcaatgatgcaatgctgatggctgtgcagttgctggacagcagcaaccaggaggagcggctgcccgaagggagtgtctcactcatcatcctgctcaccgatggcgaccccactgtgggggagactaaccccaggagcatccagaataacgtgcgggaagctgtaagtggccggtacagcctcttctgcctgggcttcggtttcgacgtcagctatgccttcctggagaagctggcactggacaatggcggcctggcccggcgcatccatgaggactcagactctgccctgcagctccaggacttctaccaggaagtggccaacccactgctgacagcagtgaccttcgagtacccaagcaatgccgtggaggaggtcactcagaacaacttccggctcctcttcaagggctcagagatggtggtggctgggaagctccaggaccgggggcctgatgtgctcacagccacagtcagtgggaagctgcctacacagaacatcactttccaaacggagtccagtgtggcagagcaggaggcggagttccagagccccaagtatatcttccacaacttcatggagaggctctgggcatacctgactatccagcagctgctggagcaaactgtctccgcatccgatgctgatcagcaggccctccggaaccaagcgctgaatttatcacttgcctacagctttgtcacgcctctcacatctatggtagtcaccaaacccgatgaccaagagcagtctcaagttgctgagaagcccatggaaggcgaaagtagaaacaggaatgtccactcaggttccactttcttcaaatattatctccagggagcaaaaataccaaaaccaggtgacaaagtaggaggtggggggaggggagattgacagattgggctcagtcctggctgtggagggtagtgccttgcccagctcctctggctggtgacagccctcgggcctcagttcagttgtatctgatcaggacttgaccacacagaggcttccttttctccaagaagaggatggaatagacaagctggagctgctggctcccggatgaatttcagacctggggttctcagctccaggcaacttggactcccaggacctcctgatgttcctgaccatgctgcttaccaccccttccgccgtctggccatcttgcctgcttcagcaccaccagccacctcaaatcctgatccagctgtgtctcgtgtcatgaatatgaaaaccacaggctccctctgccatcctgccactgcctgggcagagtgtggagcggctctgtgtggaccccagacaccgccaggggccagtgaacctgctctcagaccctgagcaaggggttgaggtgactggccagtatgagagggagaaggctgggttctcatggatcgaagtgaccttcaagaaccccctggtatgggttcacgcatcccctgaacacgtggtggtgactcggaaccgaagaagctctgcgtacaagtggaaggagacgctattctcagtgatgcccggcctgaagatgaccatggacaagacgggtctcctgctgctcagtgacccagacaaagtgaccatcggcctgttgttctgggatggccgtggggaggggctccggctccttctgcgtgacactgaccgcttctccagccacgttggagggacccttggccagttttaccaggaggtgctctggggatctccagcagcatcagatgacggcagacgcacgctgagggttcagggcaatgaccactctgccaccagagagcgcaggctggattaccaggaggggcccccgggagtggagatttcctgctggtctgtggagctgtagttctgatggaaggagctgtgcccaccctgtacacttggcttccccctgcaactgcagggccgcttctggggcctggaccaccatggggaggaagagtcccactcattacaaataaagaaaggtggtgtgagcctgggaagtgggtgtctccagttccatgtggccaaatcctagggcctcaacctcgcatcctgaaccttagcatcgtggaacacagaagcttccactgtcagctctcaagagcccatggccaggaaggcccatgctgagctttcagtccagccccttcattttacaaacaaggaaactgagctcgaaccacccatttgagatgtcactgtggcccccagctagaggcccagggctgggagcattctccaggagcagaggttcagtctgcttcatggtctcttggaccagttttgactaca

SEQ ID NO: 370289 - DNA, 1512 bp, Homo sapiens
  misc_feature (28)..(28): n is a, c, g, or t
aagcaggctggtacgccctggagttaanggatggctgcgggtttggcggcgctgcgccggcaggcagcgaggccgggcgggccctgggccctcgcgcccctcccgcgaggcctgtcatgcagggccccgccgggaacgcgagccggggactgccaggcgggccgccctccacagtcgcgtccggggcgggccgctgcgagagcggcgcgctcatgcacagcttcggcatcttcctgcaggggctgctcggcgtcgtggccttcagcacgttaatgctcaaacgcttcagagaaccaaagcatgaaagacgtccgtggaggatatggtttttagacacttccaaacaagccataggaatgctgttcatccactttgcaaatgtatacctagcagatctcactgaagaggacccttgttcactgtacctcatcaacttcctcctggacgccactgtgggcatgctgctcatctacgtgggggtgcgcgccgtcagcgtcctggtagagtggcagcagtgggagtccctgcgcttcggcgaatatggagaccctctgcagtgtggagcctgggtcgggcagtgcgctctttacatcgtgatcatgatttttgaaaagtctgtcgtcttcatcgtcctcctaatacttcagtggaaaaaggtggccctgttgaatcccattgaaaacccagacttgaagctggccatcgtcatgctgatcgtccccttctttgtcaacgctttgatgttttgggtagtggacaatttcctcatgagaaaggggaagacgaaagctaagctagaagaaaggggagccaaccaggactcgaggaatgggagcaaggtccgctaccggagggccgcatcccacgaggagtctgagtctgagatcctgatctcagcggatgatgagatggaggagtccgacgtggaggaggacctccgcagactgacccccctcaagcctgtgaagaaaaagaagcaccgctttgggctacccctgctgcctgccagagaggcgccttcagagacccagcgcttacacaatacccaccatgtcccaggctggtgctcaggaagcccctatcaagaagaagcgcccccctgtgaaggaggaggacctgaagggggcccgaggaaacctgaccaagaaccaggaaatcaagtccaagacctaccaggtcatgcgagagtgtgagcaagctggctcggccgccccgtcggtgttcagccgcacccgcacaggtaccgagactgtctttgagaagcccaaagccggacccaccaagagtgtcttcggctgagaagtgtgcgccactccccttgctgcccgaatgctcggaaacaggagccttacccaggaactcttttttatgccagaacgcttcctctcccctgctgtctctggggctgccaccctcccccacagtccaggcccttcagccaagggctctgcaccagcaccttggaagcaccaataaagaggatgcccacgtggccccagcaaaaaaaaaaag

SEQ ID NO: 370290 - DNA, 4105 bp, Homo sapiens
  misc_feature (28)..(28): n is a, c, g, or t
  misc_feature (4038)..(4039): n is a, c, g, or t
  misc_feature (4068)..(4068): n is a, c, g, or t
aagcaggctggtacgccctggagttaanggatggctgcgggtttggcggcgctgcgccggcaggcagcgaggccgggcgggccctgggccctcgcgcccctcccgcgaggcctgtcatgcagggccccgccgggaacgcgagccggggactgccaggcgggccgccctccacagtcgcgtccggggcgggccgctgcgagagcggcgcgctcatgcacagcttcggcatcttcctgcaggggctgctcggcgtcgtggccttcagcacgttaatgctcaaacgcttcagagaaccaaagcatgaaagacgtccgtggaggatatggtttttagacacttccaaacaagccataggaatgctgttcatccactttgcaaatgtatacctagcagatctcactgaagaggacccttgttcactgtacctcatcaacttcctcctggacgccactgtgggcatgctgctcatctacgtgggggtgcgcgccgtcagcgtcctggtagagtggcagcagtgggagtccctgcgcttcggcgaatatggagaccctctgcagtgtggagcctgggtcgggcagtgcgctctttacatcgtgatcatgatttttgaaaagtctgtcgtcttcatcgtcctcctaatacttcagtggaaaaaggtggccctgttgaatcccattgaaaacccagacttgaagctggccatcgtcatgctgatcgtccccttctttgtcaacgctttgatgttttgggtagtggacaatttcctcatgagaaaggggaagacgaaagctaagctagaagaaaggggagccaaccaggactcgaggaatgggagcaaggtccgctaccggagggccgcatcccacgaggagtctgagtctgagatcctgatctcagcggatgatgagatggaggagtccgacgtggaggaggacctccgcagactgacccccctcaagcctgtgaagaaaaagaagcaccgctttgggctacccctgctgcctgccagagaggcgccttcagagacccagcgcttacacaatacccaccatgtcccaggctggtgctcaggaagcccctatcaagaagaagcgcccccctgtgaaggaggaggacctgaagggggcccgaggaaacctgaccaagaaccaggaaatcaagtccaagacctaccaggtcatgcgagagtgtgagcaagctggctcggccgccccgtcggtgttcagccgcacccgcacaggtaccgagactgtctttgagaagcccaaagccggacccaccaagagtgtcttcggctgagaagtgtgcgccactccccttgctgcccgaatgctcggaaacaggagccttacccaggaactcttttttatgccagaacgcttcctctcccctgctgtctctggggctgccaccctcccccacagtccaggcccttcagccaagggctctgcaccagcaccttggaagcaccaataaagaggatgcccacgtggccccagcaaaaaaaaaaagaagcctcctggcagacactggagccacgatgaagcccccaaggcctgtccgtacctgcagcaaagttctcgtcctgctttcactgctggccatccaccagactactactgccgaaaagaatggcatcgacatctacagcctcaccgtggactccagggtctcatcccgatttgcccacacggtcgtcaccagccgagtggtcaatagggccaatactgtgcaggaggccaccttccagatggagctgcccaagaaagccttcatcaccaacttctccatgatcatcgatggcatgacctacccagggatcatcaaggagaaggctgaagcccaggcacagtacagcgcagcagtggccaagggaaagagcgctggcctcgtcaaggccaccgggagaaacatggagcagttccaggtgtcggtcagtgtggctcccaatgccaagatcacctttgagctggtctatgaggagctgctcaagcggcgtttgggggtgtacgagctgctgctgaaagtgcggccccagcagctggtcaagcacctgcagatggacattcacatcttcgagccccagggcatcagctttctggagacagagagcaccttcatgaccaaccagctggtagacgccctcaccacctggcagaataagaccaaggctcacatccggttcaagccaacactttcccagcagcaaaagtccccagagcagcaagaaacagtcctggacggcaacctcattatccgctatgatgtggaccgggccatctccgggggctccattcagatcgagaacggctactttgtacactactttgcccccgagggcctaaccacaatgcccaagaatgtggtctttgtcattgacaagagcggctccatgagtggcaggaaaatccagcagacccgggaagccctaatcaagatcctggatgacctcagccccagagaccagttcaacctcatcgtcttcagtacagaagcaactcagtggaggccatcactggtgccagcctcagccgagaacgtgaacaaggccaggagctttgctgcgggcatccaggccctgggagggaccaacatcaatgatgcaatgctgatggctgtgcagttgctggacagcagcaaccaggaggagcggctgcccgaagggagtgtctcactcatcatcctgctcaccgatggcgaccccactgtgggggagactaaccccaggagcatccagaataacgtgcgggaagctgtaagtggccggtacagcctcttctgcctgggcttcggtttcgacgtcagctatgccttcctggagaagctggcactggacaatggcggcctggcccggcgcatccatgaggactcagactctgccctgcagctccaggacttctaccaggaagtggccaacccactgctgacagcagtgaccttcgagtacccaagcaatgccgtggaggaggtcactcagaacaacttccggctcctcttcaagggctcagagatggtggtggctgggaagctccaggaccgggggcctgatgtgctcacagccacagtcagtgggaagctgcctacacagaacatcactttccaaacggagtccagtgtggcagagcaggaggcggagttccagagccccaagtatatcttccacaacttcatggagaggctctgggcatacctgactatccagcagctgctggagcaaactgtctccgcatccgatgctgatcagcaggccctccggaaccaagcgctgaatttatcacttgcctacagctttgtcacgcctctcacatctatggtagtcaccaaacccgatgaccaagagcagtctcaagttgctgagaagcccatggaaggcgaaagtagaaacaggaatgtccactcagctggagctgctggctcccggatgaatttcagacctggggttctcagctccaggcaacttggactcccaggacctcctgatgttcctgaccatgctgcttaccaccccttccgccgtctggccatcttgcctgcttcagcaccaccagccacctcaaatcctgatccagctgtgtctcgtgtcatgaatatgaaaaaaacaaccatgacaacccaaaccccagccacaggctccctctgccatcctgccactgcctgggcagagtgtggagcggctctgtgtggaccccagacaccgccaggggccagtgaacctgctctcagaccctgagcaaggggttgaggtgactggccagtatgagagggagaaggctgggttctcatggatcgaagtgaccttcaagaaccccctggtatgggttcacgcatcccctgaacacgtggtggtgactcggaaccgaagaagctctgcgtacaagtggaaggagacgctattctcagtgatgcccggcctgaagatgaccatggacaagacgggtctcctgctgctcagtgacccagacaaagtgaccatcggcctgttgtctgattggcgtgggagggctcgtcttgactcgtcactggctcatcgagttgtcnntacgacgtgtgacctcaacgtacagcgangttgtgtgtaggtcctcttcactctgcggctcggtct

SEQ ID NO: 370291 - DNA, 3071 bp, Homo sapiens
  misc_feature (28)..(28): n is a, c, g, or t
aagcaggctggtacgccctggagttaanggatggctgcgggtttggcggcgctgcgccggcaggcagcgaggccgggcgggccctgggccctcgcgcccctcccgcgaggcctgtcatgcagggccccgccgggaacgcgagccggggactgccaggcgggccgccctccacagtcgcgtccggggcgggccgctgcgagagcggcgcgctcatgcacagcttcggcatcttcctgcaggggctgctcggcgtcgtggccttcagcacgttaatgctcaaacgcttcagagaaccaaagcatgaaagacgtccgtggaggatatggtttttagacacttccaaacaagccataggaatgctgttcatccactttgcaaatgtatacctagcagatctcactgaagaggacccttgttcactgtacctcatcaacttcctcctggacgccactgtgggcatgctgctcatctacgtgggggtgcgcgccgtcagcgtcctggtagagtggcagcagtgggagtccctgcgcttcggcgaatatggagaccctctgcagtgtggagcctgggtcgggcagtgcgctctttacatcgtgatcatgatttttgaaaagtctgtcgtcttcatcgtcctcctaatacttcagtggaaaaaggtggccctgttgaatcccattgaaaacccagacttgaagctggccatcgtcatgctgatcgtccccttctttgtcaacgctttgatgttttgggtagtggacaatttcctcatgagaaaggggaagacgaaagctaagctagaagaaaggggagccaaccaggactcgaggaatgggagcaaggtccgctaccggagggccgcatcccacgaggagtctgagtctgagatcctgatctcagcggatgatgagatggaggagtccgacgtggaggaggacctccgcagactgacccccctcaagcctgtgaagaaaaagaagcaccgctttgggctacccctgctgcctgccagagaggcgccttcagagacccagcgcttacacaatacccaccatgtcccaggctggtgctcaggaagcccctatcaagaagaagcgcccccctgtgaaggaggaggacctgaagggggcccgaggaaacctgaccaagaaccaggaaatcaagtccaagacctaccaggtcatgcgagagtgtgagcaagctggctcggccgccccgtcggtgttcagccgcacccgcacaggtaccgagactgtctttgagaagcccaaagccggacccaccaagagtgtcttcggctgagaagtgtgcgccactccccttgctgcccgaatgctcggaaacaggagccttacccaggaactcttttttatgccagaacgcttcctctcccctgctgtctctggggctgccaccctcccccacagtccaggcccttcagccaagggctctgcaccagcaccttggaagcaccaataaagaggatgcccacgtggccccagcaaaaaaaaaaagaagcctcctggcagacactggagccacgatgaagcccccaaggcctgtccgtacctgcagcaaagttctcgtcctgctttcactgctggccatccaccagactactactgccgaaaagaatggcatcgacatctacagcctcaccgtggactccagggtctcatcccgatttgcccacacggtcgtcaccagccgagtggtcaatagggccaatactgtgcaggaggccaccttccagatggagctgcccaagaaagccttcatcaccaacttctccatgatcatcgatggcatgacctacccagggatcatcaaggagaaggctgaagcccaggcacagtacagcgcagcagtggccaagggaaagagcgctggcctcgtcaaggccaccgggagaaacatggagcagttccaggtgtcggtcagtgtggctcccaatgccaagatcacctttgagctggtctatgaggagctgctcaagcggcgtttgggggtgtacgagctgctgctgaaagtgcggccccagcagctggtcaagcacctgcagatggacattcacatcttcgagccccagggcatcagctttctggagacagagagcaccttcatgaccaaccagctggtagacgccctcaccacctggcagaataagaccaaggctcacatccggttcaagccaacactttcccagcagcaaaagtccccagagcagcaagaaacagtcctggacggcaacctcattatccgctatgatgtggaccgggccatctccgggggctccattcagatcgagaacggctactttgtacactactttgcccccgagggcctaaccacaatgcccaagaatgtggtctttgtcattgacaagagcggctccatgagtggcaggaaaatccagcagacccgggaagccctaatcaagatcctggatgacctcagccccagagaccagttcaacctcatcgtcttcagtacagaagcaactcagtggaggccatcactggtgccagcctcagccgagaacgtgaacaaggccaggagctttgctgcgggcatccaggccctgggagggaccaacatcaatgatgcaatgctgatggctgtgcagttgctggacagcagcaaccaggaggagcggctgcccgaagggagtgtctcactcatcatcctgctcaccgatggcgaccccactgtgggggagactaaccccaggagcatccagaataacgtgcgggaagctgtaagtggccggtacagcctcttctgcctgggcttcggtttcgacgtcagctatgccttcctggagaagctggcactggacaatggcggcctggcccggcgcatccatgaggactcagactctgccctgcagctccaggacttctaccaggaagtggccaacccactgctgacagcagtgaccttcgagtacccaagcaatgccgtggaggaggtcactcagaacaacttccggctcctcttcaagggctctcggtttggggggggctttttggggcgggggggggggttttcgggggggggggggggggccccct

SEQ ID NO: 370292 - DNA, 1210 bp, Homo sapiens
catgtacctgcagtaccagctacttgggaggtagaggtgggagaatcacttgagccgaggaggcacaggttgcaacgagctgagatcacaccactgcactgcagcctgggggacagagtgagaccctgtccctgccccaccaaaaaagagaaagaaaaaatgaggaaactgaaatcagaagatttaagggccttcccacccaaggccactccgtgacttcctggacaagaggggaagcccagcccactccccaccctgactactgaggttctgtgcacacgtctctaccttcctgctcaagacactgggtctttccacagcctgaagatgaccatggacaagacgggtctcctgctgctcagtgacccagacaaagtgaccatcggcctgttgttctgggatggccgtggggaggggctccggctccttctgcgtgacactgaccgcttctccagccacgttggagggacccttggtactgagcccattaccggggcccaggccttcctcagaaaccagctgtgcttgggaacaggcagcgcccctcccctgcgtgtgtctcccaggcttcctctgtctctgacccttactgatccaccctttgtatctcaggccagttttaccaggaggtgctctggggatctccagcagcatcagatgacggcagacgcacgctgagggttcagggcaatgaccactctgccaccagagagcgcaggctggattaccaggaggggcccccgggagtggagatttcctgctggtctgtggagctgtagttctgatggaaggagctgtgcccaccctgtacacttggcttccccctgcaactgcagggccgcttctggggcctggaccaccatggggaggaagagtcccactcattacaaataaagaaaggtggtgtgagcctgggaagtgggtgtctccagttccatgtggccaaatcctagggcctcaacctcgcatcctgaaccttagcatcgtggaacacagaagcttccactgtcagctctcaagagcccatggccaggaaggcccatgctgagctttcagtccagccccttcattttacaaacaaggaaactgagctcgaaccacccatttgagatgtcactgtggcccccagctagaggcccagggctgggagcattctccaggagcagaggttcagtctgcttcatggtctcttggaccagttttgactaca

SEQ ID NO: 370293 - DNA, 332 bp, Homo sapiens
cctgggcttgctgtgggatctgggcagggagagggggtcactgaggcccctcggctctgaggttccagaaatattcttcaagcaaatcactattttctcaccctcatcccaaacccctgggtccaggggagactaaccccaggagcatccagaataacgtgcgggaagctgtaagtggccggtacagcctcttctgcctgggcttcggtttcgacgtcagctatgccttcctggagaagctggcactggacaatggcggcctggcccggcgcatccatgaggactcagactctgccctgcagctccaggtgccagtgtgccccaggtgggct

SEQ ID NO: 370294 - DNA, 945 bp, Homo sapiens
  misc_feature (752)..(752): n is a, c, g, or t
  misc_feature (757)..(757): n is a, c, g, or t
  misc_feature (761)..(761): n is a, c, g, or t
  misc_feature (763)..(763): n is a, c, g, or t
  misc_feature (767)..(767): n is a, c, g, or t
  misc_feature (776)..(777): n is a, c, g, or t
  misc_feature (781)..(781): n is a, c, g, or t
  misc_feature (785)..(785): n is a, c, g, or t
ccagcgtgtgaagggggcgtggcacgctgagaaggagcagacaagatggcgacgtccgtggggcaccgatgtctgggattactgcacggggtcgcgccgtggcggagcagcctccatccctgtgagatcactgccctgagccaatccctacagcccttacggaagctgccttttagagcctttcgcacagatgccagaaaaatccacactgcccctgcccgaaccatgttcctgctgcgtcccctgcccattctgttggtgacaggcggcgggtatgcagggtaccggcagtatgagaagtacagggagcgagagctggagaagctgggattggagattccacccaaacttgctggtcactgggaggtggctttgtacaagtcagtgccaacgcgcttgctgtcacgggcctggggtcgcctcaatcaggtggagctgccacactggctgcgcaggcccgtctacagcctgtacatctggacgtttggggtgaacatgaaagaggccgctgtggaggacctgcatcactaccgcaacctcagcgagttcttccggcgcaagctgaagccgcaggcccggcctgtctgtggcctgcacagcgtgattagcccatcggatggaaggatcctcaactttgggcaggtgaagaactgtgaggtggagcaggtaaagggggtcacctactccctggagtcgttcctgggcccgcgtatgtgcacagaggacctgcccttcccaccaggcggtggtgntcttnagancngtgncccggaggnnggcncttnactggttcttcccggcccggggtcactgtcatccccgtggtgtccccggcctccggtcgttggacggcggcgggagctctctcaaggggcgcggcgaaggtctatccggggggggccattgggaagcaagcgaattaagaggggggcttcagctctgttg

SEQ ID NO: 370295 - DNA, 739 bp, Homo sapiens
aaggcctgggtggtaatcggccgaggggaagctggagccacctgcggctctgagagggacagacggtgctcagcctgtgtcctggggcaaagctggattcattttcctccctggcgatcttctggggcccacagctggtgatatggaggcactgacaccctggtctcggcgcttgttttagaagaggcagaacagtgataaagacaaggatctaaatgggcaaggacgccctgccctcactgggctcactggcagccctgaccctctattctgcaccctgtgagccaccgagactgaaccaaacccaggaagcggcgccaccaaccagcctcgcagaggcagaggccctggagcagtgacagcacaggagatctgctggctcgggggaaggggaggaaagaggaaaacaaagggagtgatcgagtgagcctcgccccgccctccctgcgccggcccatgatgtgtcagtcagaggcgcggcaaggaccagagctccgcgcggcgaaatggttgcacttcccccagctggccctgaggcggaggctggggcagctgagctgcatgtccagacccgctctgaaactgcgctcctggcccttgaccgtcctctactacctcctgcccttcggcgccctcagaccgctcagccgggtgggatggaggcccgtaagcaggggcttgtccagtcagtgccaacgcgcttgctgtccggctggggcccccccgtgggtcccctgtg

SEQ ID NO: 370296 - DNA, 383 bp, Homo sapiens
cagcacctgaagtttaagaggctgccccttcctgggtacctggccctgccggagagctctgggaccatctagtgggacccagtgcttgtccccaggccatcgtctgtcttaggtgctccaggcttccctgaaggaagagagaacagagaaaacctgtcccagtttatcaggaacgcaggcctggggagcccccagtggcggggacagggccagatttcatgttgaccctggggatgctgtgaatttctcctgcaggagagacatcattgaattttttcaactgtatcagtagcacagtatttttgtatgaaaagtgggagacttctgaacagtaattcatttaattgcaaagcattttgaaataaaaaaaatcaaacttaaaa

SEQ ID NO: 370297 - DNA, 2396 bp, Homo sapiens
ccagcgtgtgaagggggcgtggcacgctgagaaggagcagacaagatggcgacgtccgtggggcaccgatgtctgggattactgcacggggtcgcgccgtggcggagcagcctccatccctgtgagatcactgccctgagccaatccctacagcccttacggaagctgccttttagagcctttcgcacagatgccagaaaaatccacactgcccctgcccgaaccatgttcctgctgcgtcccctgcccattctgttggtgacaggcggcgggtatgcagggtaccggcagtatgagaagtacagggagcgagagctggagaagctgggattggagattccacccaaacttgctggtcactgggaggtggctttgtacaagtcagtgccaacgcgcttgctgtcacgggcctggggtcgcctcaatcaggtggagctgccacactggctgcgcaggcccgtctacagcctgtacatctggacgtttggggtgaacatgaaagaggccgctgtggaggacctgcatcactaccgcaacctcagcgagttcttccggcgcaagctgaagccgcaggcccggcctgtctgtggcctgcacagcgtgattagcccatcggatggaaggatcctcaactttgggcaggtgaagaactgtgaggtggagcaggtaaagggggtcacctactccctggagtcgttcctgggcccgcgtatgtgcacagaggacctgcccttcccaccagccgcgtcgtgtgactccttcaagaaccagctggtcacccgggaagggaatgagctctatcactgtgtcatctacctggcccctggggactaccactgcttccactcccccaccgactggactgtgtcccaccggcgccacttcccaggctccctgatgtcagtgaaccctggcatggctcgctggatcaaagagctcttctgccataacgagcgggtggtcctgacgggggactggaaacatggcttcttctcactgacagctgtgggggccaccaacgtgggctccattcgcatctactttgaccgggacctgcacacaaacagcccaaggcacagcaagggctcctacaatgacttcagcttcgtgacgcacaccaatagagagggcgtccccatgcgtaagggcgagcacctgggcgagttcaacctgggctccaccatcgtgctcatcttcgaggcccccaaggacttcaatttccagctgaaaacaggacagaaaatccgctttggggaagccctgggctcgctctagagtctctttcctgattatggctgctaagggatcttttccaaacagagtgagggtcttttcaagagggaggcccatgaggccatccaggtaagggcctgcctcagcgtggttgggagtctgaccaggtaggacttgaatgattcggctaccacctgttccagaggtgcagacaagaggtggcgagagcccccatcatgcccctcaacctatcccgttccttctgcctacaaataaaaagtgcaggctggaatgatctcagtcacatttggatctttttaaacactgtatagacggaagagcctgcattcctgaccgaaccttcagttggtctcggttgtcgttttttcttgctgctcctccccccatcacctgagctgttttctgttggccccttttgttttttggccttaacgctcctgctgcacagggtgaggtgcctccttggcacagactgtggatgcctctcccccagcagagccacacagccttcgtgacaactgctttccgttcccacattcacctcatcctgctctttagaaaaagcagtctttgtgcttgtggctgaacgcatcaccctggactctgctagtgtcttctgaggacactgatgacactgattaatgatacagacctttgcaggacctgatgagtgacccttctggagctggccaggtcctctgcagcaggcaagaccaatcaatcactgaacctgcctcatggcaccagagtgaacagggcaggcaggtagtaggcccagctggggaaatgggagagttcctgtccccctccacatatccctacatgaaatatgggaaagttgctgctattgattcagggtctgtcttggaggcagaggacccttggtggatagttggtcagtgcctggaaaacctgtcccagtttatcaggaacgcaggcctggggagcccccagtggcggggacagggccagatttcatgttgaccctggggatgctgtgaatttctcctgcaggagagacatcattgaattttttcaactgtatcagtagcacagtatttttgtatgaaaagtgggagacttctgaacagtaattcatttaattgcaaagcattttgaaataaaaaaaatcaaacttaaaa

SEQ ID NO: 370298 - DNA, 2881 bp, Homo sapiens
aaggcctgggtggtaatcggccgaggggaagctggagccacctgcggctctgagagggacagacggtgctcagcctgtgtcctggggcaaagctggattcattttcctccctggcgatcttctggggcccacagctggtgatatggaggcactgacaccctggtctcggcgcttgttttagaagaggcagaacagtgataaagacaaggatctaaatgggcaaggacgccctgccctcactgggctcactggcagccctgaccctctattctgcaccctgtgagccaccgagactgaaccaaacccaggaagcggcgccaccaaccagcctcgcagaggcagaggccctggagcagtgacagcacaggagatctgctggctcgggggaaggggaggaaagaggaaaacaaagggagtgatcgagtgagcctcgccccgccctccctgcgccggcccatgatgtgtcagtcagaggcgcggcaaggaccagagctccgcgcggcgaaatggttgcacttcccccagctggccctgaggcggaggctggggcagctgagctgcatgtccagacccgctctgaaactgcgctcctggcccttgaccgtcctctactacctcctgcccttcggcgccctcagaccgctcagccgggtgggatggaggcccgtaagcagggtggctttgtacaagtcagtgccaacgcgcttgctgtcacgggcctggggtcgcctcaatcaggtggagctgccacactggctgcgcaggcccgtctacagcctgtacatctggacgtttggggtgaacatgaaagaggccgctgtggaggacctgcatcactaccgcaacctcagcgagttcttccggcgcaagctgaagccgcaggcccggcctgtctgtggcctgcacagcgtggtgaggcctgaccctttcctcctgcaggaaacaggactttttcctgcctccccagcacagcccccctggtctccagcgtatctggaaggggcaggatgacaaggggaggtgggggctgtctcctggggggaggagaccctgctctccctggcagcaagcctctcctgcccttccagattagcccatcggatggaaggatcctcaactttgggcaggtgaagaactgtgaggtggagcaggtaaagggggtcacctactccctggagtcgttcctgggcccgcgtatgtgcacagaggacctgcccttcccaccagccgcgtcgtgtgactccttcaagaaccagctggtcacccgggaagggaatgagctctatcactgtgtcatctacctggcccctggggactaccactgcttccactcccccaccgactggactgtgtcccaccggcgccacttcccaggctccctgatgtcagtgaaccctggcatggctcgctggatcaaagagctcttctgccataacgagcgggtggtcctgacgggggactggaaacatggcttcttctcactgacagctgtgggggccaccaacgtgggctccattcgcatctactttgaccgggacctgcacacaaacagcccaaggcacagcaagggctcctacaatgacttcagcttcgtgacgcacaccaatagagagggcgtccccatgcgtaagggcgagcacctgggcgagttcaacctgggctccaccatcgtgctcatcttcgaggcccccaaggacttcaatttccagctgaaaacaggacagaaaatccgctttggggaagccctgggctcgctctagagtctctttcctgattatggctgctaagggatcttttccaaacagagtgagggtcttttcaagagggaggcccatgaggccatccaggtaagggcctgcctcagcgtggttgggagtctgaccaggtaggacttgaatgattcggctaccacctgttccagaggtgcagacaagaggtggcgagagcccccatcatgcccctcaacctatcccgttccttctgcctacaaataaaaagtgcaggctggaatgatctcagtcacatttggatctttttaaacactgtatagacggaagagcctgcattcctgaccgaaccttcagttggtctcggttgtcgttttttcttgctgctcctccccccatcacctgagctgttttctgttggccccttttgttttttggccttaacgctcctgctgcacagggtgaggtgcctccttggcacagactgtggatgcctctcccccagcagagccacacagccttcgtgacaactgctttccgttcccacattcacctcatcctgctctttagaaaaagcagtctttgtgcttgtggctgaacgcatcaccctggactctgctagtgtcttctgaggacactgatgacactgattaatgatacagacctttgcaggacctgatgagtgacccttctggagctggccaggtcctctgcagcaggcaagaccaatcaatcactgaacctgcctcatggcaccagagtgaacagggcaggcaggtagtaggcccagctggggaaatgggagagttcctgtccccctccacatatccctacatgaaatatgggaaagttgctgctattgattcagggtctgtcttggaggcagaggacccttggtggatagttggtcagtgcctggaaaacctgtcccagtttatcaggaacgcaggcctggggagcccccagtggcggggacagggccagatttcatgttgaccctggggatgctgtgaatttctcctgcaggagagacatcattgaattttttcaactgtatcagtagcacagtatttttgtatgaaaagtgggagacttctgaacagtaattcatttaattgcaaagcattttgaaataaaaaaaatcaaacttaaaa

SEQ ID NO: 370299 - DNA, 2823 bp, Homo sapiens
ttcatcccccttcatccccccttcctcgcccctccacagacccagggcatttggtggacacttttgcttgcagttaggtcaagtggaggtatggaagaacatggaaatccatggaggaggaccctatctgtcttcttccccctgccgcatcccagggctgtggcttgtcatgtggcacttgcttgggctggatccagccctgaccctctattctgcaccctgtgagccaccgagactgaaccaaacccaggaagcggcgccaccaaccagcctcgcagaggcagaggccctggagcagtgacagcacaggagatctgctggctcgggggaaggggaggaaagaggaaaacaaagggagtgatcgagtgagcctcgccccgccctccctgcgccggcccatgatgtgtcagtcagaggcgcggcaaggaccagagctccgcgcggcgaaatggttgcacttcccccagctggccctgaggcggaggctggggcagctgagctgcatgtccagacccgctctgaaactgcgctcctggcccttgaccgtcctctactacctcctgcccttcggcgccctcagaccgctcagccgggtgggatggaggcccgtaagcagggtggctttgtacaagtcagtgccaacgcgcttgctgtcacgggcctggggtcgcctcaatcaggtggagctgccacactggctgcgcaggcccgtctacagcctgtacatctggacgtttggggtgaacatgaaagaggccgctgtggaggacctgcatcactaccgcaacctcagcgagttcttccggcgcaagctgaagccgcaggcccggcctgtctgtggcctgcacagcgtggtgaggcctgaccctttcctcctgcaggaaacaggactttttcctgcctccccagcacagcccccctggtctccagcgtatctggaaggggcaggatgacaaggggaggtgggggctgtctcctggggggaggagaccctgctctccctggcagcaagcctctcctgcccttccagattagcccatcggatggaaggatcctcaactttgggcaggtgaagaactgtgaggtggagcaggtaaagggggtcacctactccctggagtcgttcctgggcccgcgtatgtgcacagaggacctgcccttcccaccagccgcgtcgtgtgactccttcaagaaccagctggtcacccgggaagggaatgagctctatcactgtgtcatctacctggcccctggggactaccactgcttccactcccccaccgactggactgtgtcccaccggcgccacttcccaggctccctgatgtcagtgaaccctggcatggctcgctggatcaaagagctcttctgccataacgagcgggtggtcctgacgggggactggaaacatggcttcttctcactgacagctgtgggggccaccaacgtgggctccattcgcatctactttgaccgggacctgcacacaaacagcccaaggcacagcaagggctcctacaatgacttcagcttcgtgacgcacaccaatagagagggcgtccccatgcgtaagggcgagcacctgggcgagttcaacctgggctccaccatcgtgctcatcttcgaggcccccaaggacttcaatttccagctgaaaacaggacagaaaatccgctttggggaagccctgggctcgctctagagtctctttcctgattatggctgctaagggatcttttccaaacagagtgagggtcttttcaagagggaggcccatgaggccatccaggtaagggcctgcctcagcgtggttgggagtctgaccaggtaggacttgaatgattcggctaccacctgttccagaggtgcagacaagaggtggcgagagcccccatcatgcccctcaacctatcccgttccttctgcctacaaataaaaagtgcaggctggaatgatctcagtcacatttggatctttttaaacactgtatagacggaagagcctgcattcctgaccgaaccttcagttggtctcggttgtcgttttttcttgctgctcctccccccatcacctgagctgttttctgttggccccttttgttttttggccttaacgctcctgctgcacagggtgaggtgcctccttggcacagactgtggatgcctctcccccagcagagccacacagccttcgtgacaactgctttccgttcccacattcacctcatcctgctctttagaaaaagcagtctttgtgcttgtggctgaacgcatcaccctggactctgctagtgtcttctgaggacactgatgacactgattaatgatacagacctttgcaggacctgatgagtgacccttctggagctggccaggtcctctgcagcaggcaagaccaatcaatcactgaacctgcctcatggcaccagagtgaacagggcaggcaggtagtaggcccagctggggaaatgggagagttcctgtccccctccacatatccctacatgaaatatgggaaagttgctgctattgattcagggtctgtcttggaggcagaggacccttggtggatagttggtcagtgcctggaaaacctgtcccagtttatcaggaacgcaggcctggggagcccccagtggcggggacagggccagatttcatgttgaccctggggatgctgtgaatttctcctgcaggagagacatcattgaattttttcaactgtatcagtagcacagtatttttgtatgaaaagtgggagacttctgaacagtaattcatttaattgcaaagcattttgaaataaaaaaaatcaaacttaaaa

SEQ ID NO: 370300 - DNA, 2872 bp, Homo sapiens
ggctcacccggggcccactgccttccctatgcaggagacatacggaggtcatactcgtggtccagcccgacctagtgggaatccattaatctgcgactgaggaagagctcacgtgcggcccacagctggtgatatggaggcactgacaccctggtctcggcgcttgttttagaagaggcagaacagtgataaagacaaggatctaaatgggcaaggacgccctgccctcactgggctcactggcagccctgaccctctattctgcaccctgtgagccaccgagactgaaccaaacccaggaagcggcgccaccaaccagcctcgcagaggcagaggccctggagcagtgacagcacaggagatctgctggctcgggggaaggggaggaaagaggaaaacaaagggagtgatcgagtgagcctcgccccgccctccctgcgccggcccatgatgtgtcagtcagaggcgcggcaaggaccagagctccgcgcggcgaaatggttgcacttcccccagctggccctgaggcggaggctggggcagctgagctgcatgtccagacccgctctgaaactgcgctcctggcccttgaccgtcctctactacctcctgcccttcggcgccctcagaccgctcagccgggtgggatggaggcccgtaagcagggtggctttgtacaagtcagtgccaacgcgcttgctgtcacgggcctggggtcgcctcaatcaggtggagctgccacactggctgcgcaggcccgtctacagcctgtacatctggacgtttggggtgaacatgaaagaggccgctgtggaggacctgcatcactaccgcaacctcagcgagttcttccggcgcaagctgaagccgcaggcccggcctgtctgtggcctgcacagcgtggtgaggcctgaccctttcctcctgcaggaaacaggactttttcctgcctccccagcacagcccccctggtctccagcgtatctggaaggggcaggatgacaaggggaggtgggggctgtctcctggggggaggagaccctgctctccctggcagcaagcctctcctgcccttccagattagcccatcggatggaaggatcctcaactttgggcaggtgaagaactgtgaggtggagcaggtaaagggggtcacctactccctggagtcgttcctgggcccgcgtatgtgcacagaggacctgcccttcccaccagccgcgtcgtgtgactccttcaagaaccagctggtcacccgggaagggaatgagctctatcactgtgtcatctacctggcccctggggactaccactgcttccactcccccaccgactggactgtgtcccaccggcgccacttcccaggctccctgatgtcagtgaaccctggcatggctcgctggatcaaagagctcttctgccataacgagcgggtggtcctgacgggggactggaaacatggcttcttctcactgacagctgtgggggccaccaacgtgggctccattcgcatctactttgaccgggacctgcacacaaacagcccaaggcacagcaagggctcctacaatgacttcagcttcgtgacgcacaccaatagagagggcgtccccatgcgtaagggcgagcacctgggcgagttcaacctgggctccaccatcgtgctcatcttcgaggcccccaaggacttcaatttccagctgaaaacaggacagaaaatccgctttggggaagccctgggctcgctctagagtctctttcctgattatggctgctaagggatcttttccaaacagagtgagggtcttttcaagagggaggcccatgaggccatccaggtaagggcctgcctcagcgtggttgggagtctgaccaggtaggacttgaatgattcggctaccacctgttccagaggtgcagacaagaggtggcgagagcccccatcatgcccctcaacctatcccgttccttctgcctacaaataaaaagtgcaggctggaatgatctcagtcacatttggatctttttaaacactgtatagacggaagagcctgcattcctgaccgaaccttcagttggtctcggttgtcgttttttcttgctgctcctccccccatcacctgagctgttttctgttggccccttttgttttttggccttaacgctcctgctgcacagggtgaggtgcctccttggcacagactgtggatgcctctcccccagcagagccacacagccttcgtgacaactgctttccgttcccacattcacctcatcctgctctttagaaaaagcagtctttgtgcttgtggctgaacgcatcaccctggactctgctagtgtcttctgaggacactgatgacactgattaatgatacagacctttgcaggacctgatgagtgacccttctggagctggccaggtcctctgcagcaggcaagaccaatcaatcactgaacctgcctcatggcaccagagtgaacagggcaggcaggtagtaggcccagctggggaaatgggagagttcctgtccccctccacatatccctacatgaaatatgggaaagttgctgctattgattcagggtctgtcttggaggcagaggacccttggtggatagttggtcagtgcctggaaaacctgtcccagtttatcaggaacgcaggcctggggagcccccagtggcggggacagggccagatttcatgttgaccctggggatgctgtgaatttctcctgcaggagagacatcattgaattttttcaactgtatcagtagcacagtatttttgtatgaaaagtgggagacttctgaacagtaattcatttaattgcaaagcattttgaaataaaaaaaatcaaacttaaaa

SEQ ID NO: 370301 - DNA, 3144 bp, Homo sapiens
gagtgagcggagccggcgccccggccctgccgggagccccaggtgacttctcagggaggcgccccaccctgcccgctcagagggccagtgccgggtgggggtgcccttctagggccttcggtcgcaggtgggctctcccagctgtgacgacgcggccccggcctgaggagccccgcggacaaggttgagcgagtcgtgggctttttttccgtccccacgtgggcacggcccgggctgcgtgagctcacttcctccacatcttatctcctgccgggcgcgggcgcttcccatcagacagcaggagccagttctcagggtccttggctgaacacacaagctgcaaagctacatatactccggcagagctggctgcgggctgcagactgcagggccggtcactccgcgcaagtttgggttcctgttttagaactgccacctaagcccctcttatttcatctttcctgtggtggaaacccctgcccccaccggagtgtgaggttgactttttggaaagagagccctgaccctctattctgcaccctgtgagccaccgagactgaaccaaacccaggaagcggcgccaccaaccagcctcgcagaggcagaggccctggagcagtgacagcacaggagatctgctggctcgggggaaggggaggaaagaggaaaacaaagggagtgatcgagtgagcctcgccccgccctccctgcgccggcccatgatgtgtcagtcagaggcgcggcaaggaccagagctccgcgcggcgaaatggttgcacttcccccagctggccctgaggcggaggctggggcagctgagctgcatgtccagacccgctctgaaactgcgctcctggcccttgaccgtcctctactacctcctgcccttcggcgccctcagaccgctcagccgggtgggatggaggcccgtaagcagggtggctttgtacaagtcagtgccaacgcgcttgctgtcacgggcctggggtcgcctcaatcaggtggagctgccacactggctgcgcaggcccgtctacagcctgtacatctggacgtttggggtgaacatgaaagaggccgctgtggaggacctgcatcactaccgcaacctcagcgagttcttccggcgcaagctgaagccgcaggcccggcctgtctgtggcctgcacagcgtggtgaggcctgaccctttcctcctgcaggaaacaggactttttcctgcctccccagcacagcccccctggtctccagcgtatctggaaggggcaggatgacaaggggaggtgggggctgtctcctggggggaggagaccctgctctccctggcagcaagcctctcctgcccttccagattagcccatcggatggaaggatcctcaactttgggcaggtgaagaactgtgaggtggagcaggtaaagggggtcacctactccctggagtcgttcctgggcccgcgtatgtgcacagaggacctgcccttcccaccagccgcgtcgtgtgactccttcaagaaccagctggtcacccgggaagggaatgagctctatcactgtgtcatctacctggcccctggggactaccactgcttccactcccccaccgactggactgtgtcccaccggcgccacttcccaggctccctgatgtcagtgaaccctggcatggctcgctggatcaaagagctcttctgccataacgagcgggtggtcctgacgggggactggaaacatggcttcttctcactgacagctgtgggggccaccaacgtgggctccattcgcatctactttgaccgggacctgcacacaaacagcccaaggcacagcaagggctcctacaatgacttcagcttcgtgacgcacaccaatagagagggcgtccccatgcgtaagggcgagcacctgggcgagttcaacctgggctccaccatcgtgctcatcttcgaggcccccaaggacttcaatttccagctgaaaacaggacagaaaatccgctttggggaagccctgggctcgctctagagtctctttcctgattatggctgctaagggatcttttccaaacagagtgagggtcttttcaagagggaggcccatgaggccatccaggtaagggcctgcctcagcgtggttgggagtctgaccaggtaggacttgaatgattcggctaccacctgttccagaggtgcagacaagaggtggcgagagcccccatcatgcccctcaacctatcccgttccttctgcctacaaataaaaagtgcaggctggaatgatctcagtcacatttggatctttttaaacactgtatagacggaagagcctgcattcctgaccgaaccttcagttggtctcggttgtcgttttttcttgctgctcctccccccatcacctgagctgttttctgttggccccttttgttttttggccttaacgctcctgctgcacagggtgaggtgcctccttggcacagactgtggatgcctctcccccagcagagccacacagccttcgtgacaactgctttccgttcccacattcacctcatcctgctctttagaaaaagcagtctttgtgcttgtggctgaacgcatcaccctggactctgctagtgtcttctgaggacactgatgacactgattaatgatacagacctttgcaggacctgatgagtgacccttctggagctggccaggtcctctgcagcaggcaagaccaatcaatcactgaacctgcctcatggcaccagagtgaacagggcaggcaggtagtaggcccagctggggaaatgggagagttcctgtccccctccacatatccctacatgaaatatgggaaagttgctgctattgattcagggtctgtcttggaggcagaggacccttggtggatagttggtcagtgcctggaaaacctgtcccagtttatcaggaacgcaggcctggggagcccccagtggcggggacagggccagatttcatgttgaccctggggatgctgtgaatttctcctgcaggagagacatcattgaattttttcaactgtatcagtagcacagtatttttgtatgaaaagtgggagacttctgaacagtaattcatttaattgcaaagcattttgaaataaaaaaaatcaaacttaaaa

SEQ ID NO: 370302 - DNA, 2284 bp, Homo sapiens
ttcatcccccttcatccccccttcctcgcccctccacagacccagggcatttggtggacacttttgcttgcagttaggtcaagtggaggttgcacttcccccagctggccctgaggcggaggctggggcagctgagctgcatgtccagacccgctctgaaactgcgctcctggcccttgaccgtcctctactacctcctgcccttcggcgccctcagaccgctcagccgggtgggatggaggcccgtaagcagggtggctttgtacaagtcagtgccaacgcgcttgctgtcacgggcctggggtcgcctcaatcaggtggagctgccacactggctgcgcaggcccgtctacagcctgtacatctggacgtttggggtgaacatgaaagaggccgctgtggaggacctgcatcactaccgcaacctcagcgagttcttccggcgcaagctgaagccgcaggcccggcctgtctgtggcctgcacagcgtgattagcccatcggatggaaggatcctcaactttgggcaggtgaagaactgtgaggtggagcaggtaaagggggtcacctactccctggagtcgttcctgggcccgcgtatgtgcacagaggacctgcccttcccaccagccgcgtcgtgtgactccttcaagaaccagctggtcacccgggaagggaatgagctctatcactgtgtcatctacctggcccctggggactaccactgcttccactcccccaccgactggactgtgtcccaccggcgccacttcccaggctccctgatgtcagtgaaccctggcatggctcgctggatcaaagagctcttctgccataacgagcgggtggtcctgacgggggactggaaacatggcttcttctcactgacagctgtgggggccaccaacgtgggctccattcgcatctactttgaccgggacctgcacacaaacagcccaaggcacagcaagggctcctacaatgacttcagcttcgtgacgcacaccaatagagagggcgtccccatgcgtaagggcgagcacctgggcgagttcaacctgggctccaccatcgtgctcatcttcgaggcccccaaggacttcaatttccagctgaaaacaggacagaaaatccgctttggggaagccctgggctcgctctagagtctctttcctgattatggctgctaagggatcttttccaaacagagtgagggtcttttcaagagggaggcccatgaggccatccaggtaagggcctgcctcagcgtggttgggagtctgaccaggtaggacttgaatgattcggctaccacctgttccagaggtgcagacaagaggtggcgagagcccccatcatgcccctcaacctatcccgttccttctgcctacaaataaaaagtgcaggctggaatgatctcagtcacatttggatctttttaaacactgtatagacggaagagcctgcattcctgaccgaaccttcagttggtctcggttgtcgttttttcttgctgctcctccccccatcacctgagctgttttctgttggccccttttgttttttggccttaacgctcctgctgcacagggtgaggtgcctccttggcacagactgtggatgcctctcccccagcagagccacacagccttcgtgacaactgctttccgttcccacattcacctcatcctgctctttagaaaaagcagtctttgtgcttgtggctgaacgcatcaccctggactctgctagtgtcttctgaggacactgatgacactgattaatgatacagacctttgcaggacctgatgagtgacccttctggagctggccaggtcctctgcagcaggcaagaccaatcaatcactgaacctgcctcatggcaccagagtgaacagggcaggcaggtagtaggcccagctggggaaatgggagagttcctgtccccctccacatatccctacatgaaatatgggaaagttgctgctattgattcagggtctgtcttggaggcagaggacccttggtggatagttggtcagtgcctggaaaacctgtcccagtttatcaggaacgcaggcctggggagcccccagtggcggggacagggccagatttcatgttgaccctggggatgctgtgaatttctcctgcaggagagacatcattgaattttttcaactgtatcagtagcacagtatttttgtatgaaaagtgggagacttctgaacagtaattcatttaattgcaaagcattttgaaataaaaaaaatcaaacttaaaa

SEQ ID NO: 370303 - DNA, 1797 bp, Homo sapiens
cggaagctggagccacctgcggccctgaccctctattctgcaccctgtgagccaccgagactgaaccaaacccaggaagcggcgccaccaaccagcctcgcagaggcagaggccctggagcagtgacagcacaggagatctgctggctcgggggaaggggaggaaagaggaaaacaaagggagtgatcgagtgagcctcgccccgccctccctgcgccggcccatgatgtgccatggggtggacacaccgggctctggacggggagtagcggcattccctgcctctgcaggctccctgatgtcagtgaaccctggcatggctcgctggatcaaagagctcttctgccataacgagcgggtggtcctgacgggggactggaaacatggcttcttctcactgacagctgtgggggccaccaacgtgggctccattcgcatctactttgaccgggacctgcacacaaacagcccaaggcacagcaagggctcctacaatgacttcagcttcgtgacgcacaccaatagagagggcgtccccatgcgtaagggcgagcacctgggcgagttcaacctgggctccaccatcgtgctcatcttcgaggcccccaaggacttcaatttccagctgaaaacaggacagaaaatccgctttggggaagccctgggctcgctctagagtctctttcctgattatggctgctaagggatcttttccaaacagagtgagggtcttttcaagagggaggcccatgaggccatccaggtaagggcctgcctcagcgtggttgggagtctgaccaggtaggacttgaatgattcggctaccacctgttccagaggtgcagacaagaggtggcgagagcccccatcatgcccctcaacctatcccgttccttctgcctacaaataaaaagtgcaggctggaatgatctcagtcacatttggatctttttaaacactgtatagacggaagagcctgcattcctgaccgaaccttcagttggtctcggttgtcgttttttcttgctgctcctccccccatcacctgagctgttttctgttggccccttttgttttttggccttaacgctcctgctgcacagggtgaggtgcctccttggcacagactgtggatgcctctcccccagcagagccacacagccttcgtgacaactgctttccgttcccacattcacctcatcctgctctttagaaaaagcagtctttgtgcttgtggctgaacgcatcaccctggactctgctagtgtcttctgaggacactgatgacactgattaatgatacagacctttgcaggacctgatgagtgacccttctggagctggccaggtcctctgcagcaggcaagaccaatcaatcactgaacctgcctcatggcaccagagtgaacagggcaggcaggtagtaggcccagctggggaaatgggagagttcctgtccccctccacatatccctacatgaaatatgggaaagttgctgctattgattcagggtctgtcttggaggcagaggacccttggtggatagttggtcagtgcctggaaaacctgtcccagtttatcaggaacgcaggcctggggagcccccagtggcggggacagggccagatttcatgttgaccctggggatgctgtgaatttctcctgcaggagagacatcattgaattttttcaactgtatcagtagcacagtatttttgtatgaaaagtgggagacttctgaacagtaattcatttaattgcaaagcattttgaaataaaaaaaatcaaacttaaaa

SEQ ID NO: 370304 - DNA, 2627 bp, Homo sapiens
ccagcgtgtgaagggggcgtggcacgctgagaaggagcagacaagatggcgacgtccgtggggcaccgatgtctgggattactgcacggggtcgcgccgtggcggagcagcctccatccctgtgagatcactgccctgagccaatccctacagcccttacggaagctgccttttagagcctttcgcacagatgccagaaaaatccacactgcccctgcccgaaccatgttcctgctgcgtcccctgcccattctgttggtgacaggcggcgggtatgcagggtaccggcagtatgagaagtacagggagcgagagctggagaagctgggattggagattccacccaaacttgctggtcactgggaggtggctttgtacaagtcagtgccaacgcgcttgctgtcacgggcctggggtcgcctcaatcaggtggagctgccacactggctgcgcaggcccgtctacagcctgtacatctggacgtttggggtgaacatgaaagaggccgctgtggaggacctgcatcactaccgcaacctcagcgagttcttccggcgcaagctgaagccgcaggcccggcctgtctgtggcctgcacagcgtggtgaggcctgaccctttcctcctgcaggaaacaggactttttcctgcctccccagcacagcccccctggtctccagcgtatctggaaggggcaggatgacaaggggaggtgggggctgtctcctggggggaggagaccctgctctccctggcagcaagcctctcctgcccttccagattagcccatcggatggaaggatcctcaactttgggcaggtgaagaactgtgaggtggagcaggtaaagggggtcacctactccctggagtcgttcctgggcccgcgtatgtgcacagaggacctgcccttcccaccaggtgggtcactgcacaggcggggctaggcagccctgctgctgtgtggctggaccgggagggaggggaatgctggggaaggaactgaggctggcatgtggggcctccctgagaatccatgtgcagaccacactcgggctccgtgctgggtgctcactgtgttggtggcccccacgtctgctcctactccacagccgcgtcgtgtgactccttcaagaaccagctggtcacccgggaagggaatgagctctatcactgtgtcatctacctggcccctggggactaccactgcttccactcccccaccgactggactgtgtcccaccggcgccacttcccaggctccctgatgtcagtgaaccctggcatggctcgctggatcaaagagctcttctgccataacgagcgggtggtcctgacgggggactggaaacatggcttcttctcactgacagctgtgggggccaccaacgtgggctccattcgcatctactttgaccgggacctgcacacaaacagcccaaggacttcaatttccagctgaaaacaggacagaaaatccgctttggggaagccctgggctcgctctagagtctctttcctgattatggctgctaagggatcttttccaaacagagtgagggtcttttcaagagggaggcccatgaggccatccaggtaagggcctgcctcagcgtggttgggagtctgaccaggtaggacttgaatgattcggctaccacctgttccagaggtgcagacaagaggtggcgagagcccccatcatgcccctcaacctatcccgttccttctgcctacaaataaaaagtgcaggctggaatgatctcagtcacatttggatctttttaaacactgtatagacggaagagcctgcattcctgaccgaaccttcagttggtctcggttgtcgttttttcttgctgctcctccccccatcacctgagctgttttctgttggccccttttgttttttggccttaacgctcctgctgcacagggtgaggtgcctccttggcacagactgtggatgcctctcccccagcagagccacacagccttcgtgacaactgctttccgttcccacattcacctcatcctgctctttagaaaaagcagtctttgtgcttgtggctgaacgcatcaccctggactctgctagtgtcttctgaggacactgatgacactgattaatgatacagacctttgcaggacctgatgagtgacccttctggagctggccaggtcctctgcagcaggcaagaccaatcaatcactgaacctgcctcatggcaccagagtgaacagggcaggcaggtagtaggcccagctggggaaatgggagagttcctgtccccctccacatatccctacatgaaatatgggaaagttgctgctattgattcagggtctgtcttggaggcagaggacccttggtggatagttggtcagtgcctggaaaacctgtcccagtttatcaggaacgcaggcctggggagcccccagtggcggggacagggccagatttcatgttgaccctggggatgctgtgaatttctcctgcaggagagacatcattgaattttttcaactgtatcagtagcacagtatttttgtatgaaaagtgggagacttctgaacagtaattcatttaattgcaaagcattttgaaataaaaaaaatcaaacttaaaa

SEQ ID NO: 370305 - DNA, 1955 bp, Homo sapiens
cagctctggtcaggcctggctctgctgagcagctgtcctgagaatggccgctccacctgccagccagctgaggcttccctccctccttgcactgctggctggaagtggctggaagagatggagggaattaacctccttgcctggcacctggcttctgctaggaaccatggtcaaaggtgagagtgaggagggaacagaaagggagtgttgagctcggggtggctcatgttggttacagcatgaggggtcagcactcgcaggtctgctgcccaccctgcccccaggggctgcctttttgggtgtcagtttgtgaccaacggccttggctcccacgggtgctgctctcccagcaccatgcatggagaccactgggccccactgttccctgtcctccctgggcccagttcacagcaggtgtcaaggctgtgtgtgagatctggctagagcaggcccacctggccctgagatgccatccccacctcccttttggagctgggttgggtggtggtggggacaagcaacagagggagtgggactccaaacacatgtgggggtgacactgtgcacttggtggcctgggccccactgacccccagcctatcaccacaggacctgcacacaaacagcccaaggcacagcaagggctcctacaatgacttcagcttcgtgacgcacaccaatagagagggcgtccccatgcgtaagggcgagcacctgggcgagttcaacctgggctccaccatcgtgctcatcttcgaggcccccaaggacttcaatttccagctgaaaacaggacagaaaatccgctttggggaagccctgggctcgctctagagtctctttcctgattatggctgctaagggatcttttccaaacagagtgagggtcttttcaagagggaggcccatgaggccatccaggtaagggcctgcctcagcgtggttgggagtctgaccaggtaggacttgaatgattcggctaccacctgttccagaggtgcagacaagaggtggcgagagcccccatcatgcccctcaacctatcccgttccttctgcctacaaataaaaagtgcaggctggaatgatctcagtcacatttggatctttttaaacactgtatagacggaagagcctgcattcctgaccgaaccttcagttggtctcggttgtcgttttttcttgctgctcctccccccatcacctgagctgttttctgttggccccttttgttttttggccttaacgctcctgctgcacagggtgaggtgcctccttggcacagactgtggatgcctctcccccagcagagccacacagccttcgtgacaactgctttccgttcccacattcacctcatcctgctctttagaaaaagcagtctttgtgcttgtggctgaacgcatcaccctggactctgctagtgtcttctgaggacactgatgacactgattaatgatacagacctttgcaggacctgatgagtgacccttctggagctggccaggtcctctgcagcaggcaagaccaatcaatcactgaacctgcctcatggcaccagagtgaacagggcaggcaggtagtaggcccagctggggaaatgggagagttcctgtccccctccacatatccctacatgaaatatgggaaagttgctgctattgattcagggtctgtcttggaggcagaggacccttggtggatagttggtcagtgcctggaaaacctgtcccagtttatcaggaacgcaggcctggggagcccccagtggcggggacagggccagatttcatgttgaccctggggatgctgtgaatttctcctgcaggagagacatcattgaattttttcaactgtatcagtagcacagtatttttgtatgaaaagtgggagacttctgaacagtaattcatttaattgcaaagcattttgaaataaaaaaaatcaaacttaaaa

SEQ ID NO: 370306 - DNA, 2451 bp, Homo sapiens
aaggcctgggtggtaatcggccgaggggaagctggagccacctgcggccctgaccctctattctgcaccctgtgagccaccgagactgaaccaaacccaggaagcggcgccaccaaccagcctcgcagaggcagaggccctggagcagtgacagcacaggagatctgctggctcgggggaaggggaggaaagaggaaaacaaagggagtgatcgagtgagcctcgccccgccctccctgcgccggcccatgatgtgtcagtcagaggcgcggcaaggaccagagctccgcgcggcgaaatggttgcacttcccccagctggccctgaggcggaggctggggcagctgagctgcatgtccagacccgctctgaaactgcgctcctggcccttgaccgtcctctactacctcctgcccttcggcgccctcagaccgctcagccgggtgggatggaggcccgtaagcagggtggctttgtacaagtcagtgccaacgcgcttgctgtcacgggcctggggtcgcctcaatcaggtggagctgccacactggctgcgcaggcccgtctacagcctgtacatctggacgtttggggtgaacatgaaagaggccgctgtggaggacctgcatcactaccgcaacctcagcgagttcttccggcgcaagctgaagccgcaggcccggcctgtctgtggcctgcacagcgtgattagcccatcggatggaaggatcctcaactttgggcaggtgaagaactgtgaggtggagcaggtaaagggggtcacctactccctggagtcgttcctgggcccgcgtatgtgcacagaggacctgcccttcccaccagccgcgtcgtgtgactccttcaagaaccagctggtcacccgggaagggaatgagctctatcactgtgtcatctacctggcccctggggactaccactgcttccactcccccaccgactggactgtgtcccaccggcgccacttcccaggctccctgatgtcagtgaaccctggcatggctcgctggatcaaagagctcttctgccataacgagcgggtggtcctgacgggggactggaaacatggcttcttctcactgacagctgtgggggccaccaacgtgggctccattcgcatctactttgaccgggacctgcacacaaacagcccaaggcacagcaagggctcctacaatgacttcagcttcgtgacgcacaccaatagagagggcgtccccatgcgtaagggcgagcacctgggcgagttcaacctgggctccaccatcgtgctcatcttcgaggcccccaaggacttcaatttccagctgaaaacaggacagaaaatccgctttggggaagccctgggctcgctctagagtctctttcctgattatggctgctaagggatcttttccaaacagagtgagggtcttttcaagagggaggcccatgaggccatccaggtaagggcctgcctcagcgtggttgggagtctgaccaggtaggacttgaatgattcggctaccacctgttccagaggtgcagacaagaggtggcgagagcccccatcatgcccctcaacctatcccgttccttctgcctacaaataaaaagtgcaggctggaatgatctcagtcacatttggatctttttaaacactgtatagacggaagagcctgcattcctgaccgaaccttcagttggtctcggttgtcgttttttcttgctgctcctccccccatcacctgagctgttttctgttggccccttttgttttttggccttaacgctcctgctgcacagggtgaggtgcctccttggcacagactgtggatgcctctcccccagcagagccacacagccttcgtgacaactgctttccgttcccacattcacctcatcctgctctttagaaaaagcagtctttgtgcttgtggctgaacgcatcaccctggactctgctagtgtcttctgaggacactgatgacactgattaatgatacagacctgcagcaggcaagaccaatcaatcactgaacctgcctcatggcaccagagtgaacagggcaggcaggtagtaggcccagctggggaaatgggagagttcctgtccccctccacatatccctacatgaaatatgggaaagttgctgctattgattcagggtctgtcttggaggcagaggacccttggtggatagttggtcagtgcctggaaaacctgtcccagtttatcaggaacgcaggcctggggagcccccagtggcggggacagggccagatttcatgttgaccctggggatgctgtgaatttctcctgcaggagagacatcattgaattttttcaactgtatcagtagcacagtatttttgtatgaaaagtgggagacttctgaacagtaattcatttaattgcaaagcattttgaaataaaaaaaatcaaacttaaaa

SEQ ID NO: 370307 - DNA, 2685 bp, Homo sapiens
aaggcctgggtggtaatcggccgaggggaagctggagccacctgcggccctgaccctctattctgcaccctgtgagccaccgagactgaaccaaacccaggaagcggcgccaccaaccagcctcgcagaggcagaggccctggagcagtgacagcacaggagatctgctggctcgggggaaggggaggaaagaggaaaacaaagggagtgatcgagtgagcctcgccccgccctccctgcgccggcccatgatgtgtcagtcagaggcgcggcaaggaccagagctccgcgcggcgaaatggttgcacttcccccagctggccctgaggcggaggctggggcagctgagctgcatgtccagacccgctctgaaactgcgctcctggcccttgaccgtcctctactacctcctgcccttcggcgccctcagaccgctcagccgggtgggatggaggcccgtaagcagggtggctttgtacaagtcagtgccaacgcgcttgctgtcacgggcctggggtcgcctcaatcaggtggagctgccacactggctgcgcaggcccgtctacagcctgtacatctggacgtttggggtgaacatgaaagaggccgctgtggaggacctgcatcactaccgcaacctcagcgagttcttccggcgcaagctgaagccgcaggcccggcctgtctgtggcctgcacagcgtgattagcccatcggatggaaggatcctcaactttgggcaggtgaagaactgtgaggtggagcaggtaaagggggtcacctactccctggagtcgttcctgggcccgcgtatgtgcacagaggacctgcccttcccaccagccgcgtcgtgtgactccttcaagaaccagctggtcacccgggaagggaatgagctctatcactgtgtcatctacctggcccctggggactaccactgcttccactcccccaccgactggactgtgtcccaccggcgccacttcccaggctccctgatgtcagtgaaccctggcatggctcgctggatcaaagagctcttctgccataacgagcgggtggtcctgacgggggactggaaacatggcttcttctcactgacagctgtgggggccaccaacgtgggctccattcgcatctactttgaccgggacctgcacacaaacagcccaaggcacagcaagggctcctacaatgacttcagcttcgtgacgcacaccaatagagagggcgtccccatgcgtaagggcgagcacctgggcgagttcaacctgggctccaccatcgtgctcatcttcgaggcccccaaggacttcaatttccagctgaaaacaggacagaaaatccgctttggggaagccctgggctcgctctagagtctctttcctgattatggctgctaagggatcttttccaaacagagtgagggtcttttcaagagggaggcccatgaggccatccaggtaagggcctgcctcagcgtggttgggagtctgaccaggtaggacttgaatgattcggctaccacctgttccagaggtgcagacaagaggtggcgagagcccccatcatgcccctcaacctatcccgttccttctgcctacaaataaaaagtgcaggctggaatgatctcagtcacatttggatctttttaaacactgtatagacggaagagcctgcattcctgaccgaaccttcagttggtctcggttgtcgttttttcttgctgctcctccccccatcacctgagctgttttctgttggccccttttgttttttggccttaacgctcctgctgcacagggtgaggtgcctccttggcacagactgtggatgcctctcccccagcagagccacacagccttcgtgacaactgctttccgttcccacattcacctcatcctgctctttagaaaaagcagtctttgtgcttgtggctgaacgcatcaccctggactctgctagtgtcttctgaggacactgatgacactgattaatgatacagacctttgcaggacctgatgagtgacccttctggagctggccaggtcctctgcagcaggcaagaccaatcaatcactgaacctgcctcatggcaccagagtgaacagggcaggcaggtagtaggcccagctggggaaatgggagagttcctgtccccctccacatatccctacatgaaatatgggaaagttgctgctattgattcagggtctgtcttggaggcagaggacccttggtggatagttggtcagtgcctggaaaacctgtcccagtttatcaggaacgcaggcctggggagcccccagtggcggggacagggccagatttcatgttgaccctggggatgctgtgaatttctcctgcaggagagacatcattgaattttttcaactgtatcagtagcacagtatttttgtatgaaaagtgggagacttctgaacagtaattcatttaattgcaaagcattttgaaataaaaaaaatcaaacttaaaaaaaagcacaagaaaacccgaaggacactcataagtcaggagtgccgagacaccagagcgtacacgcacatgggcccagggctaatcagcagtgtcctacccaagcttacatgtgatcacagtgggaaatccagccgggaccccaaatagagaagcccaacacaagccgaaagccaggtaaccggatag

SEQ ID NO: 370308 - DNA, 277 bp, Homo sapiens
cgcttcccatcagacagcaggagccagttctcagggtccttggctgaacacacaagctgcaaagctacatatactccggcagagctggctgcgggctgcagactgcaggtgacagtgccatatccctcactgcctgctccgccttgctaaggcttgaaccagaatccactaggagcaggactgtaagtgtatacacgcatacccctacacacacacacccctgcacctacacacaccctcatgcacacaccccctacctacacacaccccctcacct

SEQ ID NO: 370309 - DNA, 2497 bp, Homo sapiens
aaggcctgggtggtaatcggccgaggggaagctggagccacctgcggccctgaccctctattctgcaccctgtgagccaccgagactgaaccaaacccaggaagcggcgccaccaaccagcctcgcagaggcagaggccctggagcagtgacagcacaggagatctgctggctcgggggaaggggaggaaagaggaaaacaaagggagtgatcgagtgagcctcgccccgccctccctgcgccggcccatgatgtgtcagtcagaggcgcggcaaggaccagagctccgcgcggcgaaatggttgcacttcccccagctggccctgaggcggaggctggggcagctgagctgcatgtccagacccgctctgaaactgcgctcctggcccttgaccgtcctctactacctcctgcccttcggcgccctcagaccgctcagccgggtgggatggaggcccgtaagcagggtggctttgtacaagtcagtgccaacgcgcttgctgtcacgggcctggggtcgcctcaatcaggtggagctgccacactggctgcgcaggcccgtctacagcctgtacatctggacgtttggggtgaacatgaaagaggccgctgtggaggacctgcatcactaccgcaacctcagcgagttcttccggcgcaagctgaagccgcaggcccggcctgtctgtggcctgcacagcgtgattagcccatcggatggaaggatcctcaactttgggcaggtgaagaactgtgaggtggagcaggtaaagggggtcacctactccctggagtcgttcctgggcccgcgtatgtgcacagaggacctgcccttcccaccagccgcgtcgtgtgactccttcaagaaccagctggtcacccgggaagggaatgagctctatcactgtgtcatctacctggcccctggggactaccactgcttccactcccccaccgactggactgtgtcccaccggcgccacttcccaggctccctgatgtcagtgaaccctggcatggctcgctggatcaaagagctcttctgccataacgagcgggtggtcctgacgggggactggaaacatggcttcttctcactgacagctgtgggggccaccaacgtgggctccattcgcatctactttgaccgggacctgcacacaaacagcccaaggcacagcaagggctcctacaatgacttcagcttcgtgacgcacaccaatagagagggcgtccccatgcgtaagggcgagcacctgggcgagttcaacctgggctccaccatcgtgctcatcttcgaggcccccaaggacttcaatttccagctgaaaacaggacagaaaatccgctttggggaagccctgggctcgctctagagtctctttcctgattatggctgctaagggatcttttccaaacagagtgagggtcttttcaagagggaggcccatgaggccatccaggtaagggcctgcctcagcgtggttgggagtctgaccaggtaggacttgaatgattcggctaccacctgttccagaggtgcagacaagaggtggcgagagcccccatcatgcccctcaacctatcccgttccttctgcctacaaataaaaagtgcaggctggaatgatctcagtcacatttggatctttttaaacactgtatagacggaagagcctgcattcctgaccgaaccttcagttggtctcggttgtcgttttttcttgctgctcctccccccatcacctgagctgttttctgttggccccttttgttttttggccttaacgctcctgctgcacagggtgaggtgcctccttggcacagactgtggatgcctctcccccagcagagccacacagccttcgtgacaactgctttccgttcccacattcacctcatcctgctctttagaaaaagcagtctttgtgcttgtggctgaacgcatcaccctggactctgctagtgtcttctgaggacactgatgacactgattaatgatacagacctttgcaggacctgatgagtgacccttctggagctggccaggtcctctgcagcaggcaagaccaatcaatcactgaacctgcctcatggcaccagagtgaacagggcaggcaggtagtaggcccagctggggaaatgggagagttcctgtccccctccacatatccctacatgaaatatgggaaagttgctgctattgattcagggtctgtcttggaggcagaggacccttggtggatagttggtcagtgcctggaaaacctgtcccagtttatcaggaacgcaggcctggggagcccccagtggcggggacagggccagatttcatgttgaccctggggatgctgtgaatttctcctgcaggagagacatcattgaattttttcaactgtatcagtagcacagtatttttgtatgaaaagtgggagacttctgaacagtaattcatttaattgcaaagcattttgaaataaaaaaaatcaaacttaaaa

SEQ ID NO: 370310 - DNA, 2572 bp, Homo sapiens
ccagcgtgtgaagggggcgtggcacgctgagaaggagcagacaagatggcgacgtccgtggggcaccgatgtctgggattactgcacggggtcgcgccgtggcggagcagcctccatccctgtgagatcactgccctgagccaatccctacagcccttacggaagctgccttttagagcctttcgcacagatgccagaaaaatccacactgcccctgcccgaaccatgttcctgctgcgtcccctgcccattctgttggtgacaggcggcgggtatgcagggtaccggcagtatgagaagtacagggagcgagagctggagaagctgggattggagattccacccaaacttgctggtcactgggaggtggctttgtacaagtcagtgccaacgcgcttgctgtcacgggcctggggtcgcctcaatcaggtggagctgccacactggctgcgcaggcccgtctacagcctgtacatctggacgtttggggtgaacatgaaagaggccgctgtggaggacctgcatcactaccgcaacctcagcgagttcttccggcgcaagctgaagccgcaggcccggcctgtctgtggcctgcacagcgtggtgaggcctgaccctttcctcctgcaggaaacaggactttttcctgcctccccagcacagcccccctggtctccagcgtatctggaaggggcaggatgacaaggggaggtgggggctgtctcctggggggaggagaccctgctctccctggcagcaagcctctcctgcccttccagattagcccatcggatggaaggatcctcaactttgggcaggtgaagaactgtgaggtggagcaggtaaagggggtcacctactccctggagtcgttcctgggcccgcgtatgtgcacagaggacctgcccttcccaccagccgcgtcgtgtgactccttcaagaaccagctggtcacccgggaagggaatgagctctatcactgtgtcatctacctggcccctggggactaccactgcttccactcccccaccgactggactgtgtcccaccggcgccacttcccaggctccctgatgtcagtgaaccctggcatggctcgctggatcaaagagctcttctgccataacgagcgggtggtcctgacgggggactggaaacatggcttcttctcactgacagctgtgggggccaccaacgtgggctccattcgcatctactttgaccgggacctgcacacaaacagcccaaggcacagcaagggctcctacaatgacttcagcttcgtgacgcacaccaatagagagggcgtccccatgcgtaagggcgagcacctgggcgagttcaacctgggctccaccatcgtgctcatcttcgaggcccccaaggacttcaatttccagctgaaaacaggacagaaaatccgctttggggaagccctgggctcgctctagagtctctttcctgattatggctgctaagggatcttttccaaacagagtgagggtcttttcaagagggaggcccatgaggccatccaggtaagggcctgcctcagcgtggttgggagtctgaccaggtaggacttgaatgattcggctaccacctgttccagaggtgcagacaagaggtggcgagagcccccatcatgcccctcaacctatcccgttccttctgcctacaaataaaaagtgcaggctggaatgatctcagtcacatttggatctttttaaacactgtatagacggaagagcctgcattcctgaccgaaccttcagttggtctcggttgtcgttttttcttgctgctcctccccccatcacctgagctgttttctgttggccccttttgttttttggccttaacgctcctgctgcacagggtgaggtgcctccttggcacagactgtggatgcctctcccccagcagagccacacagccttcgtgacaactgctttccgttcccacattcacctcatcctgctctttagaaaaagcagtctttgtgcttgtggctgaacgcatcaccctggactctgctagtgtcttctgaggacactgatgacactgattaatgatacagacctttgcaggacctgatgagtgacccttctggagctggccaggtcctctgcagcaggcaagaccaatcaatcactgaacctgcctcatggcaccagagtgaacagggcaggcaggtagtaggcccagctggggaaatgggagagttcctgtccccctccacatatccctacatgaaatatgggaaagttgctgctattgattcagggtctgtcttggaggcagaggacccttggtggatagttggtcagtgcctggaaaacctgtcccagtttatcaggaacgcaggcctggggagcccccagtggcggggacagggccagatttcatgttgaccctggggatgctgtgaatttctcctgcaggagagacatcattgaattttttcaactgtatcagtagcacagtatttttgtatgaaaagtgggagacttctgaacagtaattcatttaattgcaaagcattttgaaataaaaaaaatcaaacttaaaa

SEQ ID NO: 370311 - DNA, 722 bp, Homo sapiens
agccaagtggggcctgaaagccctggcagcagtggctggtcccctccctgtcatggcttactggaccgggcagccctagggccttgccccctactgcctccccaggccagctgaggaagaggatgagcagtgcaggctggctcagccctgggtagcagggacagagcaggtggccaggactggggacagtgggctttagtgcaggggcttttgcactggactgcaagccctgagcaggtgacctgagcaggtgtgtgaccagtgcctgtctgtctgcaatagccctgaccctctattctgcaccctgtgagccaccgagactgaaccaaacccaggaagcggcgccaccaaccagcctcgcagaggcagaggccctggagcagtgacagcacaggagatctgctggctcgggggaaggggaggaaagaggaaaacaaagggagtgatcgagtgagcctcgccccgccctccctgcgccggcccatgatgtgtcagtcagaggcgcggcaaggaccagagctccgcgcggcgaaatggttgcacttcccccagctggccctgaggcggaggctggggcagctgagctgcatgtccagacccgctctgaaactgcgctcctggcccttgaccgtcctctactacctcctgcccttcggcgccctcagaccgctcagccgggtgggatggaggcccgtaagcagggggtaagtgtgcacaggccc

SEQ ID NO: 370312 - DNA, 2763 bp, Homo sapiens
ccagcgtgtgaagggggcgtggcacgctgagaaggagcagacaagatggcgacgtccgtggggcaccgatgtctgggattactgcacggggtcgcgccgtggcggagcagcctccatccctgtgagatcactgccctgagccaatccctacagcccttacggaagctgccttttagagcctttcgcacagatgccagaaaaatccacactgcccctgcccgaaccatgttcctgctgcgtcccctgcccattctgttggtgacaggcggcgggtatgcagggtaccggcagtatgagaagtacagggagcgagagctggagaagctgggattggagattccacccaaacttgctggtcactgggaggtggctttgtacaagtcagtgccaacgcgcttgctgtcacgggcctggggtcgcctcaatcaggtggagctgccacactggctgcgcaggcccgtctacagcctgtacatctggacgtttggggtgaacatgaaagaggccgctgtggaggacctgcatcactaccgcaacctcagcgagttcttccggcgcaagctgaagccgcaggcccggcctgtctgtggcctgcacagcgtggtgaggcctgaccctttcctcctgcaggaaacaggactttttcctgcctccccagcacagcccccctggtctccagcgtatctggaaggggcaggatgacaaggggaggtgggggctgtctcctggggggaggagaccctgctctccctggcagcaagcctctcctgcccttccagattagcccatcggatggaaggatcctcaactttgggcaggtgaagaactgtgaggtggagcaggtaaagggggtcacctactccctggagtcgttcctgggcccgcgtatgtgcacagaggacctgcccttcccaccaggtgggtcactgcacaggcggggctaggcagccctgctgctgtgtggctggaccgggagggaggggaatgctggggaaggaactgaggctggcatgtggggcctccctgagaatccatgtgcagaccacactcgggctccgtgctgggtgctcactgtgttggtggcccccacgtctgctcctactccacagccgcgtcgtgtgactccttcaagaaccagctggtcacccgggaagggaatgagctctatcactgtgtcatctacctggcccctggggactaccactgcttccactcccccaccgactggactgtgtcccaccggcgccacttcccaggctccctgatgtcagtgaaccctggcatggctcgctggatcaaagagctcttctgccataacgagcgggtggtcctgacgggggactggaaacatggcttcttctcactgacagctgtgggggccaccaacgtgggctccattcgcatctactttgaccgggacctgcacacaaacagcccaaggcacagcaagggctcctacaatgacttcagcttcgtgacgcacaccaatagagagggcgtccccatgcgtaagggcgagcacctgggcgagttcaacctgggctccaccatcgtgctcatcttcgaggcccccaaggacttcaatttccagctgaaaacaggacagaaaatccgctttggggaagccctgggctcgctctagagtctctttcctgattatggctgctaagggatcttttccaaacagagtgagggtcttttcaagagggaggcccatgaggccatccaggtaagggcctgcctcagcgtggttgggagtctgaccaggtaggacttgaatgattcggctaccacctgttccagaggtgcagacaagaggtggcgagagcccccatcatgcccctcaacctatcccgttccttctgcctacaaataaaaagtgcaggctggaatgatctcagtcacatttggatctttttaaacactgtatagacggaagagcctgcattcctgaccgaaccttcagttggtctcggttgtcgttttttcttgctgctcctccccccatcacctgagctgttttctgttggccccttttgttttttggccttaacgctcctgctgcacagggtgaggtgcctccttggcacagactgtggatgcctctcccccagcagagccacacagccttcgtgacaactgctttccgttcccacattcacctcatcctgctctttagaaaaagcagtctttgtgcttgtggctgaacgcatcaccctggactctgctagtgtcttctgaggacactgatgacactgattaatgatacagacctttgcaggacctgatgagtgacccttctggagctggccaggtcctctgcagcaggcaagaccaatcaatcactgaacctgcctcatggcaccagagtgaacagggcaggcaggtagtaggcccagctggggaaatgggagagttcctgtccccctccacatatccctacatgaaatatgggaaagttgctgctattgattcagggtctgtcttggaggcagaggacccttggtggatagttggtcagtgcctggaaaacctgtcccagtttatcaggaacgcaggcctggggagcccccagtggcggggacagggccagatttcatgttgaccctggggatgctgtgaatttctcctgcaggagagacatcattgaattttttcaactgtatcagtagcacagtatttttgtatgaaaagtgggagacttctgaacagtaattcatttaattgcaaagcattttgaaataaaaaaaatcaaacttaaaa

SEQ ID NO: 370313 - DNA, 3367 bp, Homo sapiens
ggggtggccaggaggaatttcctttcccattttccagatgtacaaaccaagacttagagactacctgtgacttgccaatgcctttccctgctctcagggcagaggtagaggaaggcagccaggattgcagtgaccaggttgtcatcagccacaaagccctctgagttctcatgttgcaggtgactggcccttaggccatgtagtgacattaaagtcctattggtcacaaccctaaactcctctccacagaatgtctttgagacttagaagggagggaaggtgtcagtgcttcctccattctgatacccttcttgcaagctcctcatccagggcctgaggctcccacctcgtgtcacctcaagacagccagagaggatgaaatctttggcttgggcttccagggctgtcataggcagagggcaagccaggatttgaaatagggaggccagaaacactgctggccaaggaagtggcttggccttgggaagcaagaaggcagcaacctctaggcgccccttctctccatcctgcagctctgagagggacagacggtgctcagcctgtgtcctggggcaaagctggattcattttcctccctggcgatcttctggggcccacagctggtgatatggaggcactgacaccctggtctcggcgcttgttttagaagaggcagaacagtgataaagacaaggatctaaatgggcaaggacgccctgccctcactgggctcactggcagccctgaccctctattctgcaccctgtgagccaccgagactgaaccaaacccaggaagcggcgccaccaaccagcctcgcagaggcagaggccctggagcagtgacagcacaggagatctgctggctcgggggaaggggaggaaagaggaaaacaaagggagtgatcgagtgagcctcgccccgccctccctgcgccggcccatgatgtgtcagtcagaggcgcggcaaggaccagagctccgcgcggcgaaatggttgcacttcccccagctggccctgaggcggaggctggggcagctgagctgcatgtccagacccgctctgaaactgcgctcctggcccttgaccgtcctctactacctcctgcccttcggcgccctcagaccgctcagccgggtgggatggaggcccgtaagcagggtggctttgtacaagtcagtgccaacgcgcttgctgtcacgggcctggggtcgcctcaatcaggtggagctgccacactggctgcgcaggcccgtctacagcctgtacatctggacgtttggggtgaacatgaaagaggccgctgtggaggacctgcatcactaccgcaacctcagcgagttcttccggcgcaagctgaagccgcaggcccggcctgtctgtggcctgcacagcgtggtgaggcctgaccctttcctcctgcaggaaacaggactttttcctgcctccccagcacagcccccctggtctccagcgtatctggaaggggcaggatgacaaggggaggtgggggctgtctcctggggggaggagaccctgctctccctggcagcaagcctctcctgcccttccagattagcccatcggatggaaggatcctcaactttgggcaggtgaagaactgtgaggtggagcaggtaaagggggtcacctactccctggagtcgttcctgggcccgcgtatgtgcacagaggacctgcccttcccaccagccgcgtcgtgtgactccttcaagaaccagctggtcacccgggaagggaatgagctctatcactgtgtcatctacctggcccctggggactaccactgcttccactcccccaccgactggactgtgtcccaccggcgccacttcccaggctccctgatgtcagtgaaccctggcatggctcgctggatcaaagagctcttctgccataacgagcgggtggtcctgacgggggactggaaacatggcttcttctcactgacagctgtgggggccaccaacgtgggctccattcgcatctactttgaccgggacctgcacacaaacagcccaaggcacagcaagggctcctacaatgacttcagcttcgtgacgcacaccaatagagagggcgtccccatgcgtaagggcgagcacctgggcgagttcaacctgggctccaccatcgtgctcatcttcgaggcccccaaggacttcaatttccagctgaaaacaggacagaaaatccgctttggggaagccctgggctcgctctagagtctctttcctgattatggctgctaagggatcttttccaaacagagtgagggtcttttcaagagggaggcccatgaggccatccaggtaagggcctgcctcagcgtggttgggagtctgaccaggtaggacttgaatgattcggctaccacctgttccagaggtgcagacaagaggtggcgagagcccccatcatgcccctcaacctatcccgttccttctgcctacaaataaaaagtgcaggctggaatgatctcagtcacatttggatctttttaaacactgtatagacggaagagcctgcattcctgaccgaaccttcagttggtctcggttgtcgttttttcttgctgctcctccccccatcacctgagctgttttctgttggccccttttgttttttggccttaacgctcctgctgcacagggtgaggtgcctccttggcacagactgtggatgcctctcccccagcagagccacacagccttcgtgacaactgctttccgttcccacattcacctcatcctgctctttagaaaaagcagtctttgtgcttgtggctgaacgcatcaccctggactctgctagtgtcttctgaggacactgatgacactgattaatgatacagacctttgcaggacctgatgagtgacccttctggagctggccaggtcctctgcagcaggcaagaccaatcaatcactgaacctgcctcatggcaccagagtgaacagggcaggcaggtagtaggcccagctggggaaatgggagagttcctgtccccctccacatatccctacatgaaatatgggaaagttgctgctattgattcagggtctgtcttggaggcagaggacccttggtggatagttggtcagtgcctggaaaacctgtcccagtttatcaggaacgcaggcctggggagcccccagtggcggggacagggccagatttcatgttgaccctggggatgctgtgaatttctcctgcaggagagacatcattgaattttttcaactgtatcagtagcacagtatttttgtatgaaaagtgggagacttctgaacagtaattcatttaattgcaaagcattttgaaataaaaaaaatcaaacttaaaa

SEQ ID NO: 370314 - DNA, 1224 bp, Homo sapiens
ccagcgtgtgaagggggcgtggcacgctgagaaggagcagacaagatggcgacgtccgtggggcaccgatgtctgggattactgcacggggtcgcgccgtggcggagcagcctccatccctgtgagatcactgccctgagccaatccctacagcccttacggaagctgccttttagagcctttcgcacagatgccagaaaaatccacactgcccctgcccgaaccatgttcctgctgcgtcccctgcccattctgttggtgacaggcggcgggtatgcagggtaccggcagtatgagaagtacagggagcgagagctggagaagctgggattggagattccacccaaacttgctggtcactgggaggtggctttgtacaagtcagtgccaacgcgcttgctgtcacgggcctggggtcgcctcaatcaggtggagctgccacactggctgcgcaggcccgtctacagcctgtacatctggacgtttggggtgaacatgaaagaggccgctgtggaggacctgcatcactaccgcaacctcagcgagttcttccggcgcaagctgaagccgcaggcccggcctgtctgtggcctgcacagcgtgattagcccatcggatggaaggatcctcaactttgggcaggtgaagaactgtgaggtggagcaggtaaagggggtcacctactccctggagtcgttcctgggcccgcgtatgtgcacagaggacctgcccttcccaccagccgcgtcgtgtgactccttcaagaaccagctggtcacccgggaagggaatgagctctatcactgtgtcatctacctggcccctggggactaccactgcttccactcccccaccgactggactgtgtcccaccggcgccacttcccaggctccctgatgtcagtgaaccctggcatggctcgctggatcaaagagctcttctgccataacgagcgggtggtcctgacgggggactggaaacatggcttcttctcactgacagctgtgggggccacgtgggcttcctcgttattttgccggctggccaacggcaggcgggggtctaaaggagtcgttctggcgccccatagggggtcccttggtgggggccgggggtaccctggtcccagggtcttggccacggttatccgaaagagagcacgtggggccggggcgactcctttggggaggtcccagggtggagggcgcagagcgcttggtgtg

SEQ ID NO: 370315 - DNA, 820 bp, Homo sapiens
ccagcgtgtgaagggggcgtggcacgctgagaaggagcagacaagatggcgacgtccgtggggcaccgatgtctgggattactgcacggggtcgcgccgtggcggagcagcctccatccctgtgagatcactgccctgagccaatccctacagcccttacggaagctgccttttagagcctttcgcacagatgccagaaaaatccacactgcccctgcccgaaccatgttcctgctgcgtcccctgcccattctgttggtgacaggcggcgggtatgcagggtaccggcagtatgagaagtacagggagcgagagctggagaagctgggattggagattccacccaaacttgctggtcactgggaggtaggaatgaggtggaactgccttgggttctcgtccagcaaactttgtctgtcacttttccagttgttccaaagttgaaatgtttgaacaagtcaaatatgctttcttggaactcatgtctccagtaggttttggccagatacaggagttataactttggtgtcaagtcaagcttgtcttctgttgccagaccttaccctggtctccccaagggttctgagtagaaatttcttgctgttgaagtctcagagtgtatgtcttgaattggtgctgacatcctggctgttctgctattcttgcccttgttagtcagaagagggctgaaactattgagcttttgtgatgtggattagttctcaccaggaaccagacagaaataatcaaattcctttgtcattattgctcaaaatgcttccttccatcatagtcacacgataggggcagcctgcattgt

SEQ ID NO: 370316 - DNA, 318 bp, Homo sapiens
tccctcatttaaagctctttttcccctaccttactttactcgatcatatctgaagtagggattgtgtgttccaccctccttgagggttgtgtggatttctcagcccacttcctgcccatggaagttttaagtttcaaatagtcacaatctttttaaagacccagcccatggccaggggcggtgctcatgcctgtagttccagcgacttgaggctgaggcgggagaatctcttgagtccaggaggttgaggtcacagtgagctatgattgcgccactgcactccagcctgggtgacagagcaagaccctttctctaaaa

SEQ ID NO: 370317 - DNA, 221 bp, Homo sapiens
ataggtgacgtatctttcctgcctcgtgaccccaggtggctcataatgctaagtttgatcacttgtttaaggtgatcttccagatctctccactgtggttattttgctgggtgtggtggctcacacttgtaatcccagcactttggaaggccgagatgggcaaatcacttgagtccagttttagaccagcctgaacaacaaggtgaaaccctgtctctact

SEQ ID NO: 370318 - DNA, 1094 bp, Homo sapiens
aaaattctatcaatggatttgccaaatagcaaaactgctttagagactgctgtataaaggaagtacaggtagtctcttcttacccacatgtgatgcatttctgaaaacatggaaaaactactgcatctgagagaaagctgagaaatgaacagaagtctgatggtgccaggtcagagaggtctgtgtcatttctcagctcattggttaattcacacaggattgatcaggtacctcatgcatggggccttacccaatgtattgtaaaaatgaaatgtcaaagggaggctgccgcgggtactcaatgcaagtccaggttagggaagaactaaaggaagcacttcatagccagcatttcatatcgctgtccgtctgatggttgtttttaggtgataggggtgtcctggtggatataatgtataaggcttggttggaaggcaatctcagattaaaattcccatcagtagtagccatattgaattttctggggattcaaaggtgaactagtaagagtactttccagaatctagtgagcatatttttctgtttgtcagttggacaaaatagcgccttttgttttgcttctctctgttaaggggaaagaagtaaagctgtaattgtcatataattgctgagcctccactgctttaaggatcccctctgctctgattatgtcttcttttggttttcaacagccaagcaggttgagtatctggtcaatgaaaagcacatctacctgctgccaagtggtcgaatcaacgtgagtggcttaaccaccaaaaatctagattacgtggccacctccatccatgaagcagtcaccaaaatccagtgaagaaacaccacccgtccagtaccaccaaagtagttctctgtcatgtgtgttccctgcctgcacaaacctacatgtacataccatggattagagacacttgcaggactgaaaggctgctctggtgaggcagcctctgtttaaaccggccccacatgaagagaacatcccttgagacgaatttggagactgggattagagcctttggaggtcaaagcaaattaagatttttatttaagaataaaagagtactttgatcatgaga

SEQ ID NO: 370319 - DNA, 2624 bp, Homo sapiens
ggcagccagaatctaaacctagatagtccggtcccggagataggtttttaaccacaaaggcattttctaaaattgtgaaagtacagaagcacaggaaagagacattttggccagataagggttaagggaaggcttcatggatgaagtggcattcgctctgggtcttgaaggtcagcagatggagagggctcctggggaggaaggactctaacggggaaggaacagcctgacgaagaggaactttgggtaccagccagctgacgacagcaagatctggtccggtgcgcgcgggaggaagctgggaagggacgtcgcgcccagatcccgaggtccttgaggaccaggccctctctgcaaggaatcggggaggaaaatctcaaactattaatagaagagcggcaaaaaggaattcgtgcgcacccctctctgttggaaggaccttccctgccagagaccaaggctggcaggacaggtatacttccctcagggggaaacagccgacaaaggtggtcaaggtcgcccgcgcaggctccggagctgcacgtcctggacgaacactcccgtcccgagcacagacgctgggtatttggctgccagcccgggcccgccaggccgggcctggcaccgccaacacctgctcggcgggaacaggaagacctgtgttcgggaactccctccggccacctccccgtatcctcctggccctcgaaggtcgaaaggtggcctctcagggacacccgccgctcgctcggctcctcccctcagccgggagacccaaggaataacagcctctgcgataggagcacgctctaccaatcaaccgtagtcttcgcccacgcctcagccggaggaaattgcattggttgcatcattctcggcagccgataaattgttttcttggattggctaatagcgttccttctcccctgtgccttcgtcgtcagaagctggcgattggttaatcgcgttgccaagctttggacgcggctcgaccattggaggccgcgggcccgcccccgccggctaggtgaaggtgagtgtctcctccagtcgcaacggccagacctgacctgccagctccgggcgtggggtgaaatctcttgattcctagtctctcgatatggcacctccgtcagtctttgccgaggttccgcaggcccagcctgtcctggtcttcaagctcactgccgacttcagggaggatccggacccccgcaaggtcaacctgggagtgggagcatatcgcacggatgactgccatccctgggttttgccagtagtgaagaaagtggagcagaagattgctaatgacaatagcctaaatcacgagtatctgccaatcctgggcctggctgagttccggagctgtgcttctcgtcttgcccttggggatgacagcccagcactcaaggagaagcgggtaggaggtgtgcaatctttggggggaacaggtgcacttcgaattggagctgatttcttagcgcgttggtacaatggaacaaacaacaagaacacacctgtctatgtgtcctcaccaacctgggagaatcacaatgctgtgttttccgctgctggttttaaagacattcggtcctatcgctactgggatgcagagaagagaggattggacctccagggcttcctgaatgatctggagaatgctcctgagttctccattgttgtcctccacgcctgtgcacacaacccaactgggattgacccaactccggagcagtggaagcagattgcttctgtcatgaagcaccggtttctgttccccttctttgactcagcctatcagggcttcgcatctggaaacctggagagagatgcctgggccattcgctattttgtgtctgaaggcttcgagttcttctgtgcccagtccttctccaagaacttcgggctctacaatgagagagtcgggaatctgactgtggttggaaaagaacctgagagcatcctgcaagtcctttcccagatggagaagatcgtgcggattacttggtccaatccccccgcccagggagcacgaattgtggccagcaccctctctaaccctgagctctttgaggaatggacaggtaatgtgaagacaatggctgaccggattctgaccatgagatctgaactcagggcacgactagaagccctcaaaacccctgggacctggaaccacatcactgatcaaattggcatgttcagcttcactgggttgaaccccaagcaggttgagtatctggtcaatgaaaagcacatctacctgctgccaagtggtcgaatcaacgtgagtggcttaaccaccaaaaatctagattacgtggccacctccatccatgaagcagtcaccaaaatccagtgaagaaacaccacccgtccagtaccaccaaagtagttctctgtcatgtgtgttccctgcctgcacaaacctacatgtacataccatggattagagacacttgcaggactgaaaggctgctctggtgaggcagcctctgtttaaaccggccccacatgaagagaacatcccttgagacgaatttggagactgggattagagcctttggaggtcaaagcaaattaagatttttatttaagaataaaagagtactttgatcatgaga

SEQ ID NO: 370320 - DNA, 3281 bp, Homo sapiens
ggcagccagaatctaaacctagatagtccggtcccggagataggtttttaaccacaaaggcattttctaaaattgtgaaagtacagaagcacaggaaagagacattttggccagataagggttaagggaaggcttcatggatgaagtggcattcgctctgggtcttgaaggtcagcagatggagagggctcctggggaggaaggactctaacggggaaggaacagcctgacgaagaggaactttgggtaccagccagctgacgacagcaagatctggtccggtgcgcgcgggaggaagctgggaagggacgtcgcgcccagatcccgaggtccttgaggaccaggccctctctgcaaggaatcggggaggaaaatctcaaactattaatagaagagcggcaaaaaggaattcgtgcgcacccctctctgttggaaggaccttccctgccagagaccaaggctggcaggacaggtatacttccctcagggggaaacagccgacaaaggtggtcaaggtcgcccgcgcaggctccggagctgcacgtcctggacgaacactcccgtcccgagcacagacgctgggtatttggctgccagcccgggcccgccaggccgggcctggcaccgccaacacctgctcggcgggaacaggaagacctgtgttcgggaactccctccggccacctccccgtatcctcctggccctcgaaggtcgaaaggtggcctctcagggacacccgccgctcgctcggctcctcccctcagccgggagacccaaggaataacagcctctgcgataggagcacgctctaccaatcaaccgtagtcttcgcccacgcctcagccggaggaaattgcattggttgcatcattctcggcagccgataaattgttttcttggattggctaatagcgttccttctcccctgtgccttcgtcgtcagaagctggcgattggttaatcgcgttgccaagctttggacgcggctcgaccattggaggccgcgggcccgcccccgccggctaggtgaaggtgagtgtctcctccagtcgcaacggccagacctgacctgccagctccgggcgtggggtgaaatctcttgattcctagtctctcgatatggcacctccgtcagtctttgccgaggttccgcaggcccagcctgtcctggtcttcaagctcactgccgacttcagggaggatccggacccccgcaaggtcaacctgggagtgggagcatatcgcacggatgactgccatccctgggttttgccagtagtgaagaaagtggagcagaagattgctaatgacaatagcctaaatcacgagtatctgccaatcctgggcctggctgagttccggagctgtgcttctcgtcttgcccttggggatgacagcccagcactcaaggagaagcgggtaggaggtgtgcaatctttggggggaacaggtgcacttcgaattggagctgatttcttagcgcgttggtacaatggaacaaacaacaagaacacacctgtctatgtgtcctcaccaacctgggagaatcacaatgctgtgttttccgctgctggttttaaagacattcggtcctatcgctactgggatgcagagaagagaggattggacctccagggcttcctgaatgatctggagaatgctcctgagttctccattgttgtcctccacgcctgtgcacacaacccaactgggattgacccaactccggagcagtggaagcagattgcttctgtcatgaagcaccggtttctgttccccttctttgactcagcctatcagggcttcgcatctggaaacctggagagagatgcctgggccattcgctattttgtgtctgaaggcttcgagttcttctgtgcccagtccttctccaagaacttcgggctctacaatgagagagtcgggaatctgactgtggttggaaaagaacctgagagcatcctgcaagtcctttcccagatggagaagatcgtgcggattacttggtccaatccccccgcccagggagcacgaattgtggccagcaccctctctaaccctgagctctttgaggaatggacaggtaatgtgaagacaatggctgaccggattctgaccatgagatctgaactcagggcacgactagaagccctcaaaacccctgggacctggaaccacatcactgatcaaattggcatgttcagcttcactgggttgaaccccaagcaggttgagtatctggtcaatgaaaagcacatctacctgctgccaagtggtcgaatcaacgtgagtggcttaaccaccaaaaatctagattacgtggccacctccatccatgaagcagtcaccaaaatccagtgaagaaacaccacccgtccagtaccaccaaagtagttctctgtcatgtgtgttccctgcctgcacaaacctacatgtacataccatggattagagacacttgcaggactgaaaggctgctctggtgaggcagcctctgtttaaaccggccccacatgaagagaacatcccttgagacgaatttggagactgggattagagcctttggaggtcaaagcaaattaagatttttatttaagaataaaagagtactttgatcatgagacataggtatcttgtccctctcactaaaaaggagtgttgtgtgtggcggccacgtgcttctatgtggtgtttgactctgtacaaattctagtcccaaagatcaagttgtctgaaggagccaaagtgtgaatgtgggtgtcggctgcggcattaaattcatcatctcaacccagagtgtctggtctccctgctctttctgcatggttgtgtccctagtcctaagctttggttctttagggtgactgtggtaagaaggatatttaatcatgacatgcacggacacgtacatatttaactgaaacaagttttaccaaacagtatttactcgtgatgtgcgtagtgcattctgatatttttgagccattctattgtgttctacttcacctaaaaaaataaaataaaaatgttgatcaagaaaaaaaaaaaaaaactcgagtttttttttttttttttttttttttttgagacagagtcttgctctgtcggccaggctggaatgcagaggcacaatctcggctcactgcaacctccacctcaagggagattttcaaagcaacattgcctctatcataggtagtcttcaatgtaatactggcaccaacaagagaaccgagctaaattaaaactaccctcaaaatgtcatcacagctgatgtgca

SEQ ID NO: 370321 - DNA, 3456 bp, Homo sapiens
ggcagccagaatctaaacctagatagtccggtcccggagataggtttttaaccacaaaggcattttctaaaattgtgaaagtacagaagcacaggaaagagacattttggccagataagggttaagggaaggcttcatggatgaagtggcattcgctctgggtcttgaaggtcagcagatggagagggctcctggggaggaaggactctaacggggaaggaacagcctgacgaagaggaactttgggtaccagccagctgacgacagcaagatctggtccggtgcgcgcgggaggaagctgggaagggacgtcgcgcccagatcccgaggtccttgaggaccaggccctctctgcaaggaatcggggaggaaaatctcaaactattaatagaagagcggcaaaaaggaattcgtgcgcacccctctctgttggaaggaccttccctgccagagaccaaggctggcaggacaggtatacttccctcagggggaaacagccgacaaaggtggtcaaggtcgcccgcgcaggctccggagctgcacgtcctggacgaacactcccgtcccgagcacagacgctgggtatttggctgccagcccgggcccgccaggccgggcctggcaccgccaacacctgctcggcgggaacaggaagacctgtgttcgggaactccctccggccacctccccgtatcctcctggccctcgaaggtcgaaaggtggcctctcagggacacccgccgctcgctcggctcctcccctcagccgggagacccaaggaataacagcctctgcgataggagcacgctctaccaatcaaccgtagtcttcgcccacgcctcagccggaggaaattgcattggttgcatcattctcggcagccgataaattgttttcttggattggctaatagcgttccttctcccctgtgccttcgtcgtcagaagctggcgattggttaatcgcgttgccaagctttggacgcggctcgaccattggaggccgcgggcccgcccccgccggctaggtgaaggtgagtgtctcctccagtcgcaacggccagacctgacctgccagctccgggcgtggggtgaaatctcttgattcctagtctctcgatatggcacctccgtcagtctttgccgaggttccgcaggcccagcctgtcctggtcttcaagctcactgccgacttcagggaggatccggacccccgcaaggtcaacctgggagtgggagcatatcgcacggatgactgccatccctgggttttgccagtagtgaagaaagtggagcagaagattgctaatgacaatagcctaaatcacgagtatctgccaatcctgggcctggctgagttccggagctgtgcttctcgtcttgcccttggggatgacagcccagcactcaaggagaagcgggtaggaggtgtgcaatctttggggggaacaggtgcacttcgaattggagctgatttcttagcgcgttggtacaatggaacaaacaacaagaacacacctgtctatgtgtcctcaccaacctgggagaatcacaatgctgtgttttccgctgctggttttaaagacattcggtcctatcgctactgggatgcagagaagagaggattggacctccagggcttcctgaatgatctggagaatgctcctgagttctccattgttgtcctccacgcctgtgcacacaacccaactgggattgacccaactccggagcagtggaagcagattgcttctgtcatgaagcaccggtttctgttccccttctttgactcagcctatcagggcttcgcatctggaaacctggagagagatgcctgggccattcgctattttgtgtctgaaggcttcgagttcttctgtgcccagtccttctccaagaacttcgggctctacaatgagagagtcgggaatctgactgtggttggaaaagaacctgagagcatcctgcaagtcctttcccagatggagaagatcgtgcggattacttggtccaatccccccgcccagggagcacgaattgtggccagcaccctctctaaccctgagctctttgaggaatggacaggtaatgtgaagacaatggctgaccggattctgaccatgagatctgaactcagggcacgactagaagccctcaaaacccctgggacctggaaccacatcactgatcaaattggcatgttcagcttcactgggttgaaccccaagcaggttgagtatctggtcaatgaaaagcacatctacctgctgccaagtggtcgaatcaacgtgagtggcttaaccaccaaaaatctagattacgtggccacctccatccatgaagcagtcaccaaaatccagtgaagaaacaccacccgtccagtaccaccaaagtagttctctgtcatgtgtgttccctgcctgcacaaacctacatgtacataccatggattagagacacttgcaggactgaaaggctgctctggtgaggcagcctctgtttaaaccggccccacatgaagagaacatcccttgagacgaatttggagactgggattagagcctttggaggtcaaagcaaattaagatttttatttaagaataaaagagtactttgatcatgagacataggtatcttgtccctctcactaaaaaggagtgttgtgtgtggcggccacgtgcttctatgtggtgtttgactctgtacaaattctagtcccaaagatcaagttgtctgaaggagccaaagtgtgaatgtgggtgtcggctgcggcattaaattcatcatctcaacccagagtgtctggtctccctgctctttctgcatggttgtgtccctagtcctaagctttggttctttagggtgactgtggtaagaaggatatttaatcatgacatgcacggacacgtacatatttaactgaaacaagttttaccaaacagtatttactcgtgatgtgcgtagtgcattctgatatttttgagccattctattgtgttctacttcacctaaaaaaataaaataaaaatgttgatcaagaaaacaaaaaaaaacaaaaaaaacaaaaaaaaaaaaaaacaaaacaaaaaaaacaaacaaaaaaaaacaaaaaaaaaaaaaacatcaaagaccaaaacaccacaaatacaaacaaataacaaaacacaacaacaaacgcacgaaaaacaaaatcacacacacaggggctagcggagaacaaggcagaagaggagcgggcggatgcgcgcagaccaagcaggtcgggaaagaagcagaagggagaggaggcgcgcaggaaggaggagaaggtgctcgggcagggcggggaggagagagaggagagggggacaaccaaggagagaaggaagaaaggggaaggaggggggagaggtgagcagaacacagtggcgggggcacgacggccagcgggtagatacagagacggggcaggaagagc

SEQ ID NO: 370322 - DNA, 2985 bp, Homo sapiens
ggcagccagaatctaaacctagatagtccggtcccggagataggtttttaaccacaaaggcattttctaaaattgtgaaagtacagaagcacaggaaagagacattttggccagataagggttaagggaaggcttcatggatgaagtggcattcgctctgggtcttgaaggtcagcagatggagagggctcctggggaggaaggactctaacggggaaggaacagcctgacgaagaggaactttgggtaccagccagctgacgacagcaagatctggtccggtgcgcgcgggaggaagctgggaagggacgtcgcgcccagatcccgaggtccttgaggaccaggccctctctgcaaggaatcggggaggaaaatctcaaactattaatagaagagcggcaaaaaggaattcgtgcgcacccctctctgttggaaggaccttccctgccagagaccaaggctggcaggacaggtatacttccctcagggggaaacagccgacaaaggtggtcaaggtcgcccgcgcaggctccggagctgcacgtcctggacgaacactcccgtcccgagcacagacgctgggtatttggctgccagcccgggcccgccaggccgggcctggcaccgccaacacctgctcggcgggaacaggaagacctgtgttcgggaactccctccggccacctccccgtatcctcctggccctcgaaggtcgaaaggtggcctctcagggacacccgccgctcgctcggctcctcccctcagccgggagacccaaggaataacagcctctgcgataggagcacgctctaccaatcaaccgtagtcttcgcccacgcctcagccggaggaaattgcattggttgcatcattctcggcagccgataaattgttttcttggattggctaatagcgttccttctcccctgtgccttcgtcgtcagaagctggcgattggttaatcgcgttgccaagctttggacgcggctcgaccattggaggccgcgggcccgcccccgccggctaggtgaaggtgagtgtctcctccagtcgcaacggccagacctgacctgccagctccgggcgtggggtgaaatctcttgattcctagtctctcgatatggcacctccgtcagtctttgccgaggttccgcaggcccagcctgtcctggtcttcaagctcactgccgacttcagggaggatccggacccccgcaaggtcaacctgggagtgggagcatatcgcacggatgactgccatccctgggttttgccagtagtgaagaaagtggagcagaagattgctaatgacaatagcctaaatcacgagtatctgccaatcctgggcctggctgagttccggagctgtgcttctcgtcttgcccttggggatgacagcccagcactcaaggagaagcgggtaggaggtgtgcaatctttggggggaacaggtgcacttcgaattggagctgatttcttagcgcgttggtacaatggaacaaacaacaagaacacacctgtctatgtgtcctcaccaacctgggagaatcacaatgctgtgttttccgctgctggttttaaagacattcggtcctatcgctactgggatgcagagaagagaggattggacctccagggcttcctgaatgatctggagaatgctcctgagttctccattgttgtcctccacgcctgtgcacacaacccaactgggattgacccaactccggagcagtggaagcagattgcttctgtcatgaagcaccggtttctgttccccttctttgactcagcctatcagggcttcgcatctggaaacctggagagagatgcctgggccattcgctattttgtgtctgaaggcttcgagttcttctgtgcccagtccttctccaagaacttcgggctctacaatgagagagtcgggaatctgactgtggttggaaaagaacctgagagcatcctgcaagtcctttcccagatggagaagatcgtgcggattacttggtccaatccccccgcccagggagcacgaattgtggccagcaccctctctaaccctgagctctttgaggaatggacaggtaatgtgaagacaatggctgaccggattctgaccatgagatctgaactcagggcacgactagaagccctcaaaacccctgggacctggaaccacatcactgatcaaattggcatgttcagcttcactgggttgaaccccaagcaggttgagtatctggtcaatgaaaagcacatctacctgctgccaagtggtcgaatcaacgtgagtggcttaaccaccaaaaatctagattacgtggccacctccatccatgaagcagtcaccatgtgtgttccctgcctgcacaaacctacatgtacataccatggattagagacacttgcaggactgaaaggctgctctggtgaggcagcctctgtttaaaccggccccacatgaagagaacatcccttgagacgaatttggagactgggattagagcctttggaggtcaaagcaaattaagatttttatttaagaataaaagagtactttgatcatgagacataggtatcttgtccctctcactaaaaaggagtgttgtgtgtggcggccacgtgcttctatgtggtgtttgactctgtacaaattctagtcccaaagatcaagttgtctgaaggagccaaagtgtgaatgtgggtgtcggctgcggcattaaattcatcatctcaacccagagtgtctggtctccctgctctttctgcatggttgtgtccctagtcctaagctttggttctttagggtgactgtggtaagaaggatatttaatcatgacatgcacggacacgtacatatttaactgaaacaagttttaccaaacagtatttactcgtgatgtgcgtagtgcattctgatatttttgagccattctattgtgttctacttcacctaaaaaaataaaataaaaatgttgatcaaga

SEQ ID NO: 370323 - DNA, 2984 bp, Homo sapiens
ggcagccagaatctaaacctagatagtccggtcccggagataggtttttaaccacaaaggcattttctaaaattgtgaaagtacagaagcacaggaaagagacattttggccagataagggttaagggaaggcttcatggatgaagtggcattcgctctgggtcttgaaggtcagcagatggagagggctcctggggaggaaggactctaacggggaaggaacagcctgacgaagaggaactttgggtaccagccagctgacgacagcaagatctggtccggtgcgcgcgggaggaagctgggaagggacgtcgcgcccagatcccgaggtccttgaggaccaggccctctctgcaaggaatcggggaggaaaatctcaaactattaatagaagagcggcaaaaaggaattcgtgcgcacccctctctgttggaaggaccttccctgccagagaccaaggctggcaggacaggtatacttccctcagggggaaacagccgacaaaggtggtcaaggtcgcccgcgcaggctccggagctgcacgtcctggacgaacactcccgtcccgagcacagacgctgggtatttggctgccagcccgggcccgccaggccgggcctggcaccgccaacacctgctcggcgggaacaggaagacctgtgttcgggaactccctccggccacctccccgtatcctcctggccctcgaaggtcgaaaggtggcctctcagggacacccgccgctcgctcggctcctcccctcagccgggagacccaaggaataacagcctctgcgataggagcacgctctaccaatcaaccgtagtcttcgcccacgcctcagccggaggaaattgcattggttgcatcattctcggcagccgataaattgttttcttggattggctaatagcgttccttctcccctgtgccttcgtcgtcagaagctggcgattggttaatcgcgttgccaagctttggacgcggctcgaccattggaggccgcgggcccgcccccgccggctaggtgaaggtgagtgtctcctccagtcgcaacggccagacctgacctgccagctccgggcgtggggtgaaatctcttgattcctagtctctcgatatggcacctccgtcagtctttgccgaggttccgcaggcccagcctgtcctggtcttcaagctcactgccgacttcagggaggatccggacccccgcaaggtcaacctgggagtgggagcatatcgcacggatgactgccatccctgggttttgccagtagtgaagaaagtggagcagaagattgctaatgacaatagcctaaatcacgagtatctgccaatcctgggcctggctgagttccggagctgtgcttctcgtcttgcccttggggatgacagcccagcactcaaggagaagcgggtaggaggtgtgcaatctttggggggaacaggtgcacttcgaattggagctgatttcttagcgcgttggtacaatggaacaaacaacaagaacacacctgtctatgtgtcctcaccaacctgggagaatcacaatgctgtgttttccgctgctggttttaaagacattcggtcctatcgctactgggatgcagagaagagaggattggacctccagggcttcctgaatgatctggagaatgctcctgagttctccattgttgtcctccacgcctgtgcacacaacccaactgggattgacccaactccggagcagtggaagcagattgcttctgtcatgaagcaccggtttctgttccccttctttgactcagcctatcagggcttcgcatctggaaacctggagagagatgcctgggccattcgctattttgtgtctgaaggcttcgagttcttctgtgcccagtccttctccaagaacttcgggctctacaatgagagagtcgggaatctgactgtggttggaaaagaacctgagagcatcctgcaagtcctttcccagatggagaagatcgtgcggattacttggtccaatccccccgcccagggagcacgaattgtggccagcaccctctctaaccctgagctctttgaggaatggacaggtaatgtgaagacaatggctgaccggattctgaccatgagatctgaactcagggcacgactagaagccctcaaaacccctgggacctggaaccacatcactgatcaaattggcatgttcagcttcactgggttgaaccccaagcaggttgagtatctggtcaatgaaaagcacatctacctgctgccaagtggtcgaatcaacgtgagtggcttaaccaccaaaaatctagattacgtggccacctccatccatgaagcagtcaccaaaatccagtgaagaaacaccacccgtccagtaccaccaaagtagttctctgtcatgtgtgttccctgcctgcacaaacctacatgtacataccatggattagagacacttgcaggactgatcccttgagacgaatttggagactgggattagagcctttggaggtcaaagcaaattaagatttttatttaagaataaaagagtactttgatcatgagacataggtatcttgtccctctcactaaaaaggagtgttgtgtgtggcggccacgtgcttctatgtggtgtttgactctgtacaaattctagtcccaaagatcaagttgtctgaaggagccaaagtgtgaatgtgggtgtcggctgcggcattaaattcatcatctcaacccagagtgtctggtctccctgctctttctgcatggttgtgtccctagtcctaagctttggttctttagggtgactgtggtaagaaggatatttaatcatgacatgcacggacacgtacatatttaactgaaacaagttttaccaaacagtatttactcgtgatgtgcgtagtgcattctgatatttttgagccattctattgtgttctacttcacctaaaaaaataaaataaaaatgttgatcaaga

SEQ ID NO: 370324 - DNA, 1354 bp, Homo sapiens
agctggggaaggaaggccggtgtctgaggttggtgccagaaggatttcctgccctgactcactttgcttccccgcagcaccggtttctgttccccttctttgactcagcctatcagggcttcgcatctggaaacctggagagagatgcctgggccattcgctattttgtgtctgaaggcttcgagttcttctgtgcccagtccttctccaagaacttcgggctctacaatgagagagtcgggaatctgactgtggttggaaaagaacctgagagcatcctgcaagtcctttcccagatggagaagatcgtgcggattacttggtccaatccccccgcccagggagcacgaattgtggccagcaccctctctaaccctgagctctttgaggaatggacaggtaatgtgaagacaatggctgaccggattctgaccatgagatctgaactcagggcacgactagaagccctcaaaacccctgggacctggaaccacatcactgatcaaattggcatgttcagcttcactgggttgaaccccaagcaggttgagtatctggtcaatgaaaagcacatctacctgctgccaagtggtcgaatcaacgtgagtggcttaaccaccaaaaatctagattacgtggccacctccatccatgaagcagtcaccaaaatccagtgaagaaacaccacccgtccagtaccaccaaagtagttctctgtcatgtgtgttccctgcctgcacaaacctacatgtacataccatggattagagacacttgcaggactgaaaggctgctctggtgaggcagcctctgtttaaaccggccccacatgaagagaacatcccttgagacgaatttggagactgggattagagcctttggaggtcaaagcaaattaagatttttatttaagaataaaagagtactttgatcatgagacataggtatcttgtccctctcactaaaaaggagtgttgtgtgtggcggccacgtgcttctatgtggtgtttgactctgtacaaattctagtcccaaagatcaagttgtctgaaggagccaaagtgtgaatgtgggtgtcggctgcggcattaaattcatcatctcaacccagagtgtctggtctccctgctctttctgcatggttgtgtccctagtcctaagctttggttctttagggtgactgtggtaagaaggatatttaatcatgacatgcacggacacgtacatatttaactgaaacaagttttaccaaacagtatttactcgtgatgtgcgtagtgcattctgatatttttgagccattctattgtgttctacttcacctaaaaaaataaaataaaaatgttgatcaaga

SEQ ID NO: 370325 - DNA, 1509 bp, Homo sapiens
aaaattctatcaatggatttgccaaatagcaaaactgctttagagactgctgtataaaggaagtacaggtagtctcttcttacccacatgtgatgcatttctgaaaacatggaaaaactactgcatctgagagaaagctgagaaatgaacagaagtctgatggtgccaggtcagagaggtctgtgtcatttctcagctcattggttaattcacacaggattgatcaggtacctcatgcatggggccttacccaatgtattgtaaaaatgaaatgtcaaagggaggctgccgcgggtactcaatgcaagtccaggttagggaagaactaaaggaagcacttcatagccagcatttcatatcgctgtccgtctgatggttgtttttaggtgataggggtgtcctggtggatataatgtataaggcttggttggaaggcaatctcagattaaaattcccatcagtagtagccatattgaattttctggggattcaaaggtgaactagtaagagtactttccagaatctagtgagcatatttttctgtttgtcagttggacaaaatagcgccttttgttttgcttctctctgttaaggggaaagaagtaaagctgtaattgtcatataattgctgagcctccactgctttaaggatcccctctgctctgattatgtcttcttttggttttcaacagccaagcaggttgagtatctggtcaatgaaaagcacatctacctgctgccaagtggtcgaatcaacgtgagtggcttaaccaccaaaaatctagattacgtggccacctccatccatgaagcagtcaccaaaatccagtgaagaaacaccacccgtccagtaccaccaaagtagttctctgtcatgtgtgttccctgcctgcacaaacctacatgtacataccatggattagagacacttgcaggactgaaaggctgctctggtgaggcagcctctgtttaaaccggccccacatgaagagaacatcccttgagacgaatttggagactgggattagagcctttggaggtcaaagcaaattaagatttttatttaagaataaaagagtactttgatcatgagacataggtatcttgtccctctcactaaaaaggagtgttgtgtgtggcggccacgtgcttctatgtggtgtttgactctgtacaaattctagtcccaaagatcaagttgtctgaaggagccaaagtgtgaatgtgggtgtcggctgcggcattaaattcatcatctcaacccagagtgtctggtctccctgctctttctgcatggttgtgtccctagtcctaagctttggttctttagggtgactgtggtaagaaggatatttaatcatgacatgcacggacacgtacatatttaactgaaacaagttttaccaaacagtatttactcgtgatgtgcgtagtgcattctgatatttttgagccattctattgtgttctacttcacctaaaaaaataaaataaaaatgttgatcaaga

SEQ ID NO: 370326 - DNA, 566 bp, Homo sapiens
ggccacgtgcttctatgtggtgtttgactctgtacaaagtactcttttattcttcccttgagacgaatttggagactgggattagagcctttggaggtcaaagcaaattaagatttttatttaagaataaaagagtactttgatcatgagacataggtatcttgtccctctcactaaaaaggagtgttgtgtgtggcggccacgtgcttctatgtggtgtttgactctgtacaaattctagtcccaaagatcaagttgtctgaaggagccaaagtgtgaatgtgggtgtcggctgcggcattaaattcatcatctcaacccagagtgtctggtctccctgctctttctgcatggttgtgtccctagtcctaagctttggttctttagggtgactgtggtaagaaggatatttaatcatgacatgcacggacacgtacatatttaactgaaacaagttttaccaaacagtatttactcgtgatgtgcgtagtgcattctgatatttttgagccattctattgtgttctacttcacctaaaaaaataaaataaaaatgttgatcaaga

SEQ ID NO: 370327 - DNA, 1744 bp, Homo sapiens
ggcagccagaatctaaacctagatagtccggtcccggagataggtttttaaccacaaaggcattttctaaaattgtgaaagtacagaagcacaggaaagagacattttggccagataagggttaagggaaggcttcatggatgaagtggcattcgctctgggtcttgaaggtcagcagatggagagggctcctggggaggaaggactctaacggggaaggaacagcctgacgaagaggaactttgggtaccagccagctgacgacagcaagatctggtccggtgcgcgcgggaggaagctgggaagggacgtcgcgcccagatcccgaggtccttgaggaccaggccctctctgcaaggaatcggggaggaaaatctcaaactattaatagaagagcggcaaaaaggaattcgtgcgcacccctctctgttggaaggaccttccctgccagagaccaaggctggcaggacaggtatacttccctcagggggaaacagccgacaaaggtggtcaaggtcgcccgcgcaggctccggagctgcacgtcctggacgaacactcccgtcccgagcacagacgctgggtatttggctgccagcccgggcccgccaggccgggcctggcaccgccaacacctgctcggcgggaacaggaagacctgtgttcgggaactccctccggccacctccccgtatcctcctggccctcgaaggtcgaaaggtggcctctcagggacacccgccgctcgctcggctcctcccctcagccgggagacccaaggaataacagcctctgcgataggagcacgctctaccaatcaaccgtagtcttcgcccacgcctcagccggaggaaattgcattggttgcatcattctcggcagccgataaattgttttcttggattggctaatagcgttccttctcccctgtgccttcgtcgtcagaagctggcgattggttaatcgcgttgccaagctttggacgcggctcgaccattggaggccgcgggcccgcccccgccggctaggtgaaggtgagtgtctcctccagtcgcaacggccagacctgacctgccagctccgggcgtggggtgaaatctcttgattcctagtctctcgatatggcacctccgtcagtctttgccgaggttccgcaggcccagcctgtcctggtcttcaagctcactgccgacttcagggaggatccggacccccgcaaggtcaacctgggagtgggagcatatcgcacggatgactgccatccctgggttttgccagtagtgaagaaagtggagcagaagattgctaatgacaatagcctaaatcacgagtatctgccaatcctgggcctggctgagttccggagctgtgcttctcgtcttgcccttggggatgacagcccagcactcaaggagaagcgggtaagttttgggtaaggatgtattttctctttagaaactgaaagtaaaaagatgttgagaatacagtttgtttaaaatattaggcgttatgtctattgaactgccaatgaataagtgtttctgtagcgcgagttcaggaacctgatagcgcaaataatgtggccatgtacaaagcacggctttttcacttgttcagttttgcccagtagatcatcagattttagctactgcatttgaagcagtcagtggagatgccaagtagaaagaatttaatggagtgataaagacaccagggttctagatccaactctgccactacttttg

SEQ ID NO: 370328 - DNA, 1786 bp, Homo sapiens
ggcagccagaatctaaacctagatagtccggtcccggagataggtttttaaccacaaaggcattttctaaaattgtgaaagtacagaagcacaggaaagagacattttggccagataagggttaagggaaggcttcatggatgaagtggcattcgctctgggtcttgaaggtcagcagatggagagggctcctggggaggaaggactctaacggggaaggaacagcctgacgaagaggaactttgggtaccagccagctgacgacagcaagatctggtccggtgcgcgcgggaggaagctgggaagggacgtcgcgcccagatcccgaggtccttgaggaccaggccctctctgcaaggaatcggggaggaaaatctcaaactattaatagaagagcggcaaaaaggaattcgtgcgcacccctctctgttggaaggaccttccctgccagagaccaaggctggcaggacaggtatacttccctcagggggaaacagccgacaaaggtggtcaaggtcgcccgcgcaggctccggagctgcacgtcctggacgaacactcccgtcccgagcacagacgctgggtatttggctgccagcccgggcccgccaggccgggcctggcaccgccaacacctgctcggcgggaacaggaagacctgtgttcgggaactccctccggccacctccccgtatcctcctggccctcgaaggtcgaaaggtggcctctcagggacacccgccgctcgctcggctcctcccctcagccgggagacccaaggaataacagcctctgcgataggagcacgctctaccaatcaaccgtagtcttcgcccacgcctcagccggaggaaattgcattggttgcatcattctcggcagccgataaattgttttcttggattggctaatagcgttccttctcccctgtgccttcgtcgtcagaagctggcgattggttaatcgcgttgccaagctttggacgcggctcgaccattggaggccgcgggcccgcccccgccggctaggtgaaggtgagtgtctcctccagtcgcaacggccagacctgacctgccagctccgggcgtggggtgaaatctcttgattcctagtctctcgatatggcacctccgtcagtctttgccgaggttccgcaggcccagcctgtcctggtcttcaagctcactgccgacttcagggaggatccggacccccgcaaggtcaacctgggagtgggagcatatcgcacggatgactgccatccctgcgatatgctcccacccccgcaaggtcaacctgggagtgggagcatatcgcacggatgactgccatacctgggagtggggagcatatcccaaggcctgtcctccaaacaaaaaaaaacaaaaaaaacaaaaaaaaaaaaaaacaaaacaaaaaaaacaaacaaaaaaaaacaaaaaaaaaaaaaacatcaaagaccaaaacaccacaaatacaaacaaataacaaaacacaacaacaaacgcacgaaaaacaaaatcacacacacaggggctagcggagaacaaggcagaagaggagcgggcggatgcgcgcagaccaagcaggtcgggaaagaagcagaagggagaggaggcgcgcaggaaggaggagaaggtgctcgggcagggcggggaggagagagaggagagggggacaaccaaggagagaaggaagaaaggggaaggaggggggagaggtgagcagaacacagtggcgggggcacgacggccagcgggtagatacagagacggggcaggaagagc

SEQ ID NO: 370329 - DNA, 797 bp, Homo sapiens
cacccggttcagaaatcaccagatagtagtttctcgtgtccgtgtgtgtgcctctgcctgctcggaacctacatgtacatacctactggaattagagacagtttgctggacatgaaaggcgttgcatctgtgttgagcgcagtccttctgatataaatccgttccctcatgatagagtaacatcaccacttaaaaagcgcaatattggacggactgtggattgtgatgccgtataggtcgcgtcaagacggcaaattgagattgaaagttccgggaacgtaccatatagatattttgatcactgatgactctaggtatcttgtcgctctcacctaaaattgggacgtgtgtgttctgctgggtcgtgccaccgttgctgtctattggtgggctggtgttggtactgcctgttagcgggtcttactaaggtgtgcctccaatacggatcataggtctgttcgtgacatggcatgctcgcaccgtcggtgcatcttgtttgagtgttgtcgcgcgtcggcggcaatttaactttcatgcgattctcacaccccattagtgtctggtctccctgctctttctgcatggttgtgtccctagtcctaagctttggttctttagggtgactgtggtaagaaggatatttaatcatgacatgcacggacacgtacatatttaactgaaacaagttttaccaaacagtatttactcgtgatgtgcgtagtgcattctgatatttttgagccattctattgtgttctacttcacctaaaaaaataaaataaaaatgttgatcaaga

SEQ ID NO: 370330 - DNA, 3039 bp, Homo sapiens
ggcagccagaatctaaacctagatagtccggtcccggagataggtttttaaccacaaaggcattttctaaaattgtgaaagtacagaagcacaggaaagagacattttggccagataagggttaagggaaggcttcatggatgaagtggcattcgctctgggtcttgaaggtcagcagatggagagggctcctggggaggaaggactctaacggggaaggaacagcctgacgaagaggaactttgggtaccagccagctgacgacagcaagatctggtccggtgcgcgcgggaggaagctgggaagggacgtcgcgcccagatcccgaggtccttgaggaccaggccctctctgcaaggaatcggggaggaaaatctcaaactattaatagaagagcggcaaaaaggaattcgtgcgcacccctctctgttggaaggaccttccctgccagagaccaaggctggcaggacaggtatacttccctcagggggaaacagccgacaaaggtggtcaaggtcgcccgcgcaggctccggagctgcacgtcctggacgaacactcccgtcccgagcacagacgctgggtatttggctgccagcccgggcccgccaggccgggcctggcaccgccaacacctgctcggcgggaacaggaagacctgtgttcgggaactccctccggccacctccccgtatcctcctggccctcgaaggtcgaaaggtggcctctcagggacacccgccgctcgctcggctcctcccctcagccgggagacccaaggaataacagcctctgcgataggagcacgctctaccaatcaaccgtagtcttcgcccacgcctcagccggaggaaattgcattggttgcatcattctcggcagccgataaattgttttcttggattggctaatagcgttccttctcccctgtgccttcgtcgtcagaagctggcgattggttaatcgcgttgccaagctttggacgcggctcgaccattggaggccgcgggcccgcccccgccggctaggtgaaggtgagtgtctcctccagtcgcaacggccagacctgacctgccagctccgggcgtggggtgaaatctcttgattcctagtctctcgatatggcacctccgtcagtctttgccgaggttccgcaggcccagcctgtcctggtcttcaagctcactgccgacttcagggaggatccggacccccgcaaggtcaacctgggagtgggagcatatcgcacggatgactgccatccctgggttttgccagtagtgaagaaagtggagcagaagattgctaatgacaatagcctaaatcacgagtatctgccaatcctgggcctggctgagttccggagctgtgcttctcgtcttgcccttggggatgacagcccagcactcaaggagaagcgggtaggaggtgtgcaatctttggggggaacaggtgcacttcgaattggagctgatttcttagcgcgttggtacaatggaacaaacaacaagaacacacctgtctatgtgtcctcaccaacctgggagaatcacaatgctgtgttttccgctgctggttttaaagacattcggtcctatcgctactgggatgcagagaagagaggattggacctccagggcttcctgaatgatctggagaatgctcctgagttctccattgttgtcctccacgcctgtgcacacaacccaactgggattgacccaactccggagcagtggaagcagattgcttctgtcatgaagcaccggtttctgttccccttctttgactcagcctatcagggcttcgcatctggaaacctggagagagatgcctgggccattcgctattttgtgtctgaaggcttcgagttcttctgtgcccagtccttctccaagaacttcgggctctacaatgagagagtcgggaatctgactgtggttggaaaagaacctgagagcatcctgcaagtcctttcccagatggagaagatcgtgcggattacttggtccaatccccccgcccagggagcacgaattgtggccagcaccctctctaaccctgagctctttgaggaatggacaggtaatgtgaagacaatggctgaccggattctgaccatgagatctgaactcagggcacgactagaagccctcaaaacccctgggacctggaaccacatcactgatcaaattggcatgttcagcttcactgggttgaaccccaagcaggttgagtatctggtcaatgaaaagcacatctacctgctgccaagtggtcgaatcaacgtgagtggcttaaccaccaaaaatctagattacgtggccacctccatccatgaagcagtcaccaaaatccagtgaagaaacaccacccgtccagtaccaccaaagtagttctctgtcatgtgtgttccctgcctgcacaaacctacatgtacataccatggattagagacacttgcaggactgaaaggctgctctggtgaggcagcctctgtttaaaccggccccacatgaagagaacatcccttgagacgaatttggagactgggattagagcctttggaggtcaaagcaaattaagatttttatttaagaataaaagagtactttgatcatgagacataggtatcttgtccctctcactaaaaaggagtgttgtgtgtggcggccacgtgcttctatgtggtgtttgactctgtacaaattctagtcccaaagatcaagttgtctgaaggagccaaagtgtgaatgtgggtgtcggctgcggcattaaattcatcatctcaacccagagtgtctggtctccctgctctttctgcatggttgtgtccctagtcctaagctttggttctttagggtgactgtggtaagaaggatatttaatcatgacatgcacggacacgtacatatttaactgaaacaagttttaccaaacagtatttactcgtgatgtgcgtagtgcattctgatatttttgagccattctattgtgttctacttcacctaaaaaaataaaataaaaatgttgatcaaga

SEQ ID NO: 370331 - DNA, 3156 bp, Homo sapiens
ggcagccagaatctaaacctagatagtccggtcccggagataggtttttaaccacaaaggcattttctaaaattgtgaaagtacagaagcacaggaaagagacattttggccagataagggttaagggaaggcttcatggatgaagtggcattcgctctgggtcttgaaggtcagcagatggagagggctcctggggaggaaggactctaacggggaaggaacagcctgacgaagaggaactttgggtaccagccagctgacgacagcaagatctggtccggtgcgcgcgggaggaagctgggaagggacgtcgcgcccagatcccgaggtccttgaggaccaggccctctctgcaaggaatcggggaggaaaatctcaaactattaatagaagagcggcaaaaaggaattcgtgcgcacccctctctgttggaaggaccttccctgccagagaccaaggctggcaggacaggtatacttccctcagggggaaacagccgacaaaggtggtcaaggtcgcccgcgcaggctccggagctgcacgtcctggacgaacactcccgtcccgagcacagacgctgggtatttggctgccagcccgggcccgccaggccgggcctggcaccgccaacacctgctcggcgggaacaggaagacctgtgttcgggaactccctccggccacctccccgtatcctcctggccctcgaaggtcgaaaggtggcctctcagggacacccgccgctcgctcggctcctcccctcagccgggagacccaaggaataacagcctctgcgataggagcacgctctaccaatcaaccgtagtcttcgcccacgcctcagccggaggaaattgcattggttgcatcattctcggcagccgataaattgttttcttggattggctaatagcgttccttctcccctgtgccttcgtcgtcagaagctggcgattggttaatcgcgttgccaagctttggacgcggctcgaccattggaggccgcgggcccgcccccgccggctaggtgaaggtgagtgtctcctccagtcgcaacggccagacctgacctgccagctccgggcgtggggtgaaatctcttgattcctagtctctcgatatggcacctccgtcagtctttgccgaggttccgcaggcccagcctgtcctggtcttcaagctcactgccgacttcagggaggatccggacccccgcaaggtcaacctgggagtgggagcatatcgcacggatgactgccatccctgggttttgccagtagtgaagaaagtggagcagaagattgctaatgacaatagcctaaatcacgagtatctgccaatcctgggcctggctgagttccggagctgtgcttctcgtcttgcccttggggatgacagcccagcactcaaggagaagcgggtaggaggtgtgcaatctttggggggaacaggtgcacttcgaattggagctgatttcttagcgcgttggtacaatggaacaaacaacaagaacacacctgtctatgtgtcctcaccaacctgggagaatcacaatgctgtgttttccgctgctggttttaaagacattcggtcctatcgctactgggatgcagagaagagaggattggacctccagggcttcctgaatgatctggagaatgctcctgagttctccattgttgtcctccacgcctgtgcacacaacccaactgggattgacccaactccggagcagtggaagcagattgcttctgtcatgaagcaccggtttctgttccccttctttgactcagcctatcagggcttcgcatctggaaacctggagagagatgcctgggccattcgctattttgtgtctgaaggcttcgagttcttctgtgcccagtccttctccaagaacttcgggctctacaatgagagagtcgggaatctgactgtggttggaaaagaacctgagagcatcctgcaagtcctttcccagatggagaagatcgtgcggattacttggtccaatccccccgcccagggagcacgaattgtggccagcaccctctctaaccctgagctctttgaggaatggacaggtaatgtgaagacaatggctgaccggattctgaccatgagatctgaactcagggcacgactagaagccctcaaaacccctgggacctggaaccacatcactgatcaaattggcatgttcagcttcactgggttgaaccccaagcaggttgagtatctggtcaatgaaaagcacatctacctgctgccaagtggtcgaatcaacgtgagtggcttaaccaccaaaaatctagattacgtggccacctccatccatgaagcagtcaccaaaatccagtgaagaaacaccacccgtccagtaccaccaaagtagttctctgtcatgtgtgttccctgcctgcacaaacctacatgtacataccatggattagagacacttgcaggactgaaaggctgctctggtgaggcagcctctgtttaaaccggccccacatgaagagaacatcccttgagacgaatttggagactgggattagagcctttggaggtcaaagcaaattaagatttttatttaagaataaaagagtactttgatcatgagacataggtatcttgtccctctcactaaaaaggagtgttgtgtgtggcggccacgtgcttctatgtggtgtttgactctgtacaaattctagtcccaaagatcaagttgtctgaaggagccaaagtgtgaatgtgggtgtcggctgcggcattaaattcatcatctcaacccagagtgtctggtctccctgctctttctgcatggttgtgtccctagtcctaagctttggttctttagggtgactgtggtaagaaggatatttaatcatgacatgcacggacacgtacatatttaactgaaacaagttttaccaaacagtatttactcgtgatgtgcgtagtgcattctgatatttttgagccattctattgtgttctacttcacctaaaaaaataaaataaaaatgttgatcaagatgagggaagagtaagtagggaggggtagattattgtaaaaataaagagaaaattaaatttggggggggggagtaaagacaaatattcccccggggggggggccgggacccaattccg

SEQ ID NO: 370332 - DNA, 3128 bp, Homo sapiens
ggcagccagaatctaaacctagatagtccggtcccggagataggtttttaaccacaaaggcattttctaaaattgtgaaagtacagaagcacaggaaagagacattttggccagataagggttaagggaaggcttcatggatgaagtggcattcgctctgggtcttgaaggtcagcagatggagagggctcctggggaggaaggactctaacggggaaggaacagcctgacgaagaggaactttgggtaccagccagctgacgacagcaagatctggtccggtgcgcgcgggaggaagctgggaagggacgtcgcgcccagatcccgaggtccttgaggaccaggccctctctgcaaggaatcggggaggaaaatctcaaactattaatagaagagcggcaaaaaggaattcgtgcgcacccctctctgttggaaggaccttccctgccagagaccaaggctggcaggacaggtatacttccctcagggggaaacagccgacaaaggtggtcaaggtcgcccgcgcaggctccggagctgcacgtcctggacgaacactcccgtcccgagcacagacgctgggtatttggctgccagcccgggcccgccaggccgggcctggcaccgccaacacctgctcggcgggaacaggaagacctgtgttcgggaactccctccggccacctccccgtatcctcctggccctcgaaggtcgaaaggtggcctctcagggacacccgccgctcgctcggctcctcccctcagccgggagacccaaggaataacagcctctgcgataggagcacgctctaccaatcaaccgtagtcttcgcccacgcctcagccggaggaaattgcattggttgcatcattctcggcagccgataaattgttttcttggattggctaatagcgttccttctcccctgtgccttcgtcgtcagaagctggcgattggttaatcgcgttgccaagctttggacgcggctcgaccattggaggccgcgggcccgcccccgccggctaggtgaaggtgagtgtctcctccagtcgcaacggccagacctgacctgccagctccgggcgtggggtgaaatctcttgattcctagtctctcgatatggcacctccgtcagtctttgccgaggttccgcaggcccagcctgtcctggtcttcaagctcactgccgacttcagggaggatccggacccccgcaaggtcaacctgggagtgggagcatatcgcacggatgactgccatccctgggttttgccagtagtgaagaaagtggagcagaagattgctaatgacaatagcctaaatcacgagtatctgccaatcctgggcctggctgagttccggagctgtgcttctcgtcttgcccttggggatgacagcccagcactcaaggagaagcgggtaggaggtgtgcaatctttggggggaacaggtgcacttcgaattggagctgatttcttagcgcgttggtacaatggaacaaacaacaagaacacacctgtctatgtgtcctcaccaacctgggagaatcacaatgctgtgttttccgctgctggttttaaagacattcggtcctatcgctactgggatgcagagaagagaggattggacctccagggcttcctgaatgatctggagaatgctcctgagttctccattgttgtcctccacgcctgtgcacacaacccaactgggattgacccaactccggagcagtggaagcagattgcttctgtcatgaagcaccggtttctgttccccttctttgactcagcctatcagggcttcgcatctggaaacctggagagagatgcctgggccattcgctattttgtgtctgaaggcttcgagttcttctgtgcccagtccttctccaagaacttcgggctctacagtgagtgctctcctgaggagttacagccccacctcctcgcatcactccctgcttcagcagccacagctgattctggtccctctctttagatgagagagtcgggaatctgactgtggttggaaaagaacctgagagcatcctgcaagtcctttcccagatggagaagatcgtgcggattacttggtccaatccccccgcccagggagcacgaattgtggccagcaccctctctaaccctgagctctttgaggaatggacaggtaatgtgaagacaatggctgaccggattctgaccatgagatctgaactcagggcacgactagaagccctcaaaacccctgggacctggaaccacatcactgatcaaattggcatgttcagcttcactgggttgaaccccaagcaggttgagtatctggtcaatgaaaagcacatctacctgctgccaagtggtcgaatcaacgtgagtggcttaaccaccaaaaatctagattacgtggccacctccatccatgaagcagtcaccaaaatccagtgaagaaacaccacccgtccagtaccaccaaagtagttctctgtcatgtgtgttccctgcctgcacaaacctacatgtacataccatggattagagacacttgcaggactgaaaggctgctctggtgaggcagcctctgtttaaaccggccccacatgaagagaacatcccttgagacgaatttggagactgggattagagcctttggaggtcaaagcaaattaagatttttatttaagaataaaagagtactttgatcatgagacataggtatcttgtccctctcactaaaaaggagtgttgtgtgtggcggccacgtgcttctatgtggtgtttgactctgtacaaattctagtcccaaagatcaagttgtctgaaggagccaaagtgtgaatgtgggtgtcggctgcggcattaaattcatcatctcaacccagagtgtctggtctccctgctctttctgcatggttgtgtccctagtcctaagctttggttctttagggtgactgtggtaagaaggatatttaatcatgacatgcacggacacgtacatatttaactgaaacaagttttaccaaacagtatttactcgtgatgtgcgtagtgcattctgatatttttgagccattctattgtgttctacttcacctaaaaaaataaaataaaaatgttgatcaaga

SEQ ID NO: 370333 - DNA, 2888 bp, Homo sapiens
ggcagccagaatctaaacctagatagtccggtcccggagataggtttttaaccacaaaggcattttctaaaattgtgaaagtacagaagcacaggaaagagacattttggccagataagggttaagggaaggcttcatggatgaagtggcattcgctctgggtcttgaaggtcagcagatggagagggctcctggggaggaaggactctaacggggaaggaacagcctgacgaagaggaactttgggtaccagccagctgacgacagcaagatctggtccggtgcgcgcgggaggaagctgggaagggacgtcgcgcccagatcccgaggtccttgaggaccaggccctctctgcaaggaatcggggaggaaaatctcaaactattaatagaagagcggcaaaaaggaattcgtgcgcacccctctctgttggaaggaccttccctgccagagaccaaggctggcaggacaggtatacttccctcagggggaaacagccgacaaaggtggtcaaggtcgcccgcgcaggctccggagctgcacgtcctggacgaacactcccgtcccgagcacagacgctgggtatttggctgccagcccgggcccgccaggccgggcctggcaccgccaacacctgctcggcgggaacaggaagacctgtgttcgggaactccctccggccacctccccgtatcctcctggccctcgaaggtcgaaaggtggcctctcagggacacccgccgctcgctcggctcctcccctcagccgggagacccaaggaataacagcctctgcgataggagcacgctctaccaatcaaccgtagtcttcgcccacgcctcagccggaggaaattgcattggttgcatcattctcggcagccgataaattgttttcttggattggctaatagcgttccttctcccctgtgccttcgtcgtcagaagctggcgattggttaatcgcgttgccaagctttggacgcggctcgaccattggaggccgcgggcccgcccccgccggctaggtgaaggtgagtgtctcctccagtcgcaacggccagacctgacctgccagctccgggcgtggggtgaaatctcttgattcctagtctctcgatatggcacctccgtcagtctttgccgaggttccgcaggcccagcctgtcctggtcttcaagctcactgccgacttcagggaggatccggacccccgcaaggtcaacctgggagtgggagcatatcgcacggatgactgccatccctgggttttgccagtagtgaagaaagtggagcagaagattgctaatgacaatagcctaaatcacgagtatctgccaatcctgggcctggctgagttccggagctgtgcttctcgtcttgcccttggggatgacagcccagcactcaaggagaagcgggtaggaggtgtgcaatctttggggggaacaggtgcacttcgaattggagctgatttcttagcgcgttggtacaatggaacaaacaacaagaacacacctgtctatgtgtcctcaccaacctgggagaatcacaatgctgtgttttccgctgctggttttaaagacattcggtcctatcgctactgggatgcagagaagagaggattggacctccagggcttcctgaatgatctggagaatgctcctgagttctccattgttgtcctccacgcctgtgcacacaacccaactgggattgacccaactccggagcagtggaagcagattgcttctgtcatgaagatgagagagtcgggaatctgactgtggttggaaaagaacctgagagcatcctgcaagtcctttcccagatggagaagatcgtgcggattacttggtccaatccccccgcccagggagcacgaattgtggccagcaccctctctaaccctgagctctttgaggaatggacaggtaatgtgaagacaatggctgaccggattctgaccatgagatctgaactcagggcacgactagaagccctcaaaacccctgggacctggaaccacatcactgatcaaattggcatgttcagcttcactgggttgaaccccaagcaggttgagtatctggtcaatgaaaagcacatctacctgctgccaagtggtcgaatcaacgtgagtggcttaaccaccaaaaatctagattacgtggccacctccatccatgaagcagtcaccaaaatccagtgaagaaacaccacccgtccagtaccaccaaagtagttctctgtcatgtgtgttccctgcctgcacaaacctacatgtacataccatggattagagacacttgcaggactgaaaggctgctctggtgaggcagcctctgtttaaaccggccccacatgaagagaacatcccttgagacgaatttggagactgggattagagcctttggaggtcaaagcaaattaagatttttatttaagaataaaagagtactttgatcatgagacataggtatcttgtccctctcactaaaaaggagtgttgtgtgtggcggccacgtgcttctatgtggtgtttgactctgtacaaattctagtcccaaagatcaagttgtctgaaggagccaaagtgtgaatgtgggtgtcggctgcggcattaaattcatcatctcaacccagagtgtctggtctccctgctctttctgcatggttgtgtccctagtcctaagctttggttctttagggtgactgtggtaagaaggatatttaatcatgacatgcacggacacgtacatatttaactgaaacaagttttaccaaacagtatttactcgtgatgtgcgtagtgcattctgatatttttgagccattctattgtgttctacttcacctaaaaaaataaaataaaaatgttgatcaaga

SEQ ID NO: 370334 - DNA, 2834 bp, Homo sapiens
ggcagccagaatctaaacctagatagtccggtcccggagataggtttttaaccacaaaggcattttctaaaattgtgaaagtacagaagcacaggaaagagacattttggccagataagggttaagggaaggcttcatggatgaagtggcattcgctctgggtcttgaaggtcagcagatggagagggctcctggggaggaaggactctaacggggaaggaacagcctgacgaagaggaactttgggtaccagccagctgacgacagcaagatctggtccggtgcgcgcgggaggaagctgggaagggacgtcgcgcccagatcccgaggtccttgaggaccaggccctctctgcaaggaatcggggaggaaaatctcaaactattaatagaagagcggcaaaaaggaattcgtgcgcacccctctctgttggaaggaccttccctgccagagaccaaggctggcaggacaggtatacttccctcagggggaaacagccgacaaaggtggtcaaggtcgcccgcgcaggctccggagctgcacgtcctggacgaacactcccgtcccgagcacagacgctgggtatttggctgccagcccgggcccgccaggccgggcctggcaccgccaacacctgctcggcgggaacaggaagacctgtgttcgggaactccctccggccacctccccgtatcctcctggccctcgaaggtcgaaaggtggcctctcagggacacccgccgctcgctcggctcctcccctcagccgggagacccaaggaataacagcctctgcgataggagcacgctctaccaatcaaccgtagtcttcgcccacgcctcagccggaggaaattgcattggttgcatcattctcggcagccgataaattgttttcttggattggctaatagcgttccttctcccctgtgccttcgtcgtcagaagctggcgattggttaatcgcgttgccaagctttggacgcggctcgaccattggaggccgcgggcccgcccccgccggctaggtgaagcatatcgcacggatgactgccatccctgggttttgccagtagtgaagaaagtggagcagaagattgctaatgacaatagcctaaatcacgagtatctgccaatcctgggcctggctgagttccggagctgtgcttctcgtcttgcccttggggatgacagcccagcactcaaggagaagcgggtaggaggtgtgcaatctttggggggaacaggtgcacttcgaattggagctgatttcttagcgcgttggtacaatggaacaaacaacaagaacacacctgtctatgtgtcctcaccaacctgggagaatcacaatgctgtgttttccgctgctggttttaaagacattcggtcctatcgctactgggatgcagagaagagaggattggacctccagggcttcctgaatgatctggagaatgctcctgagttctccattgttgtcctccacgcctgtgcacacaacccaactgggattgacccaactccggagcagtggaagcagattgcttctgtcatgaagcaccggtttctgttccccttctttgactcagcctatcagggcttcgcatctggaaacctggagagagatgcctgggccattcgctattttgtgtctgaaggcttcgagttcttctgtgcccagtccttctccaagaacttcgggctctacaatgagagagtcgggaatctgactgtggttggaaaagaacctgagagcatcctgcaagtcctttcccagatggagaagatcgtgcggattacttggtccaatccccccgcccagggagcacgaattgtggccagcaccctctctaaccctgagctctttgaggaatggacaggtaatgtgaagacaatggctgaccggattctgaccatgagatctgaactcagggcacgactagaagccctcaaaacccctgggacctggaaccacatcactgatcaaattggcatgttcagcttcactgggttgaaccccaagcaggttgagtatctggtcaatgaaaagcacatctacctgctgccaagtggtcgaatcaacgtgagtggcttaaccaccaaaaatctagattacgtggccacctccatccatgaagcagtcaccaaaatccagtgaagaaacaccacccgtccagtaccaccaaagtagttctctgtcatgtgtgttccctgcctgcacaaacctacatgtacataccatggattagagacacttgcaggactgaaaggctgctctggtgaggcagcctctgtttaaaccggccccacatgaagagaacatcccttgagacgaatttggagactgggattagagcctttggaggtcaaagcaaattaagatttttatttaagaataaaagagtactttgatcatgagacataggtatcttgtccctctcactaaaaaggagtgttgtgtgtggcggccacgtgcttctatgtggtgtttgactctgtacaaattctagtcccaaagatcaagttgtctgaaggagccaaagtgtgaatgtgggtgtcggctgcggcattaaattcatcatctcaacccagagtgtctggtctccctgctctttctgcatggttgtgtccctagtcctaagctttggttctttagggtgactgtggtaagaaggatatttaatcatgacatgcacggacacgtacatatttaactgaaacaagttttaccaaacagtatttactcgtgatgtgcgtagtgcattctgatatttttgagccattctattgtgttctacttcacctaaaaaaataaaataaaaatgttgatcaaga

SEQ ID NO: 370335 - DNA, 1443 bp, Homo sapiens
agctggggaaggaaggccggtgtctgaggttggtgccagaaggatttcctgccctgactcactttgcttccccgcagcaccggtttctgttccccttctttgactcagcctatcagggcttcgcatctggaaacctggagagagatgcctgggccattcgctattttgtgtctgaaggcttcgagttcttctgtgcccagtccttctccaagaacttcgggctctacagtgagtgctctcctgaggagttacagccccacctcctcgcatcactccctgcttcagcagccacagctgattctggtccctctctttagatgagagagtcgggaatctgactgtggttggaaaagaacctgagagcatcctgcaagtcctttcccagatggagaagatcgtgcggattacttggtccaatccccccgcccagggagcacgaattgtggccagcaccctctctaaccctgagctctttgaggaatggacaggtaatgtgaagacaatggctgaccggattctgaccatgagatctgaactcagggcacgactagaagccctcaaaacccctgggacctggaaccacatcactgatcaaattggcatgttcagcttcactgggttgaaccccaagcaggttgagtatctggtcaatgaaaagcacatctacctgctgccaagtggtcgaatcaacgtgagtggcttaaccaccaaaaatctagattacgtggccacctccatccatgaagcagtcaccaaaatccagtgaagaaacaccacccgtccagtaccaccaaagtagttctctgtcatgtgtgttccctgcctgcacaaacctacatgtacataccatggattagagacacttgcaggactgaaaggctgctctggtgaggcagcctctgtttaaaccggccccacatgaagagaacatcccttgagacgaatttggagactgggattagagcctttggaggtcaaagcaaattaagatttttatttaagaataaaagagtactttgatcatgagacataggtatcttgtccctctcactaaaaaggagtgttgtgtgtggcggccacgtgcttctatgtggtgtttgactctgtacaaattctagtcccaaagatcaagttgtctgaaggagccaaagtgtgaatgtgggtgtcggctgcggcattaaattcatcatctcaacccagagtgtctggtctccctgctctttctgcatggttgtgtccctagtcctaagctttggttctttagggtgactgtggtaagaaggatatttaatcatgacatgcacggacacgtacatatttaactgaaacaagttttaccaaacagtatttactcgtgatgtgcgtagtgcattctgatatttttgagccattctattgtgttctacttcacctaaaaaaataaaataaaaatgttgatcaaga

SEQ ID NO: 370336 - DNA, 227 bp, Homo sapiens
tcttgattcctagtctctcgatatggcacctccgtcagtctttgccgaggttccgcaggcccagcctgtcctggtcttcaagctcactgccgacttcagggaggatccggacccccgcaaggtcaacctgggagtgggaggtaaggatgtagtgctctggagtgtgagcagctcggggagtggagcggacccaacccaggtcgtggagactgtgggagaagccgagg

SEQ ID NO: 370337 - DNA, 294 bp, Homo sapiens
aatggttctaacgtgtaagtattagcagtcatactgtagcataagaaaataccgtctgctgaaagaggaacaataaagattatctacatggtcatcatttaaaagctaccagatataggaagaaggggccataaaatgataacgttatgatgattaattttgatgcttaggtcagagtccattctaggatatctgctgcccaaaaacagcagagactcatttctttggaatcacaggacgctgagtgagaggaaagaaaaagaaaagaaatatttaagtcacatatgtgatttc

SEQ ID NO: 370338 - DNA, 2086 bp, Homo sapiens
atatctgtagttttgcgtctggcttctctatttaattcttaaaggggggtgggaactaaacagatcacaagggagctgcccacagaggtaaagacaaggtcagataggctgagagacgcaggaaagcgggtcaatgtgtagggctggagggcaggggcgggccctgggcctgggctgggggtcctgccccggggcgcacccagggcgagggctgcccggaggagccgaggctggcggacagcttggccctgagcttgaggggaaggcagcgatgggacaaaggacggaggtctaggaagagggtctgcagagcagaaagcacgggtaggggcggcctgacgctcggaagacaacggatgggagccgtgtgcacgtcgggagctcggagtgagcgcaccatgactcctgtgaggatgcagcactccctggcaggtcagacctatgccgtgcccctcatccagccagacctgcggcgagaggaggccgtccagcagatggcggatgccctgcagtacctgcagaaggtctctggagacatcttcagcaggatctcccagcgggtagagcagagccggagccaggtgcaggccattggagagaaggtctccttggcccaggccaagattgagaagatcaagggcagcaagaaggccatcaaggtgttctccagtgccaagtaccctgctccagagcgcctgcaggaatatggctccatcttcacgggcgcccaggaccctggcctgcagagacgcccccgccacaggatccagagcaagcaccgccccctggacgagcgggccctgcaggagaagctgaaggactttcctgtgtgcgtgagcaccaagccggagcccgaggacgatgcagaagagggacttgggggtcttcccagcaacatcagctctgtcagctccttgctgctcttcaacaccaccgagaacctgtacaagaagtatgtcttcctggaccccctggctggtgctgtaacaaagacccatgtgatgctgggggcagagacagaggagaagctgtttgatgcccccttgtccatcagcaagagagagcagctggaacagcaggtcccagagaactacttctatgtgccagacctgggccaggtgcctgagattgatgttccatcctacctgcctgacctgcccggcattgccaacgacctcatgtacattgccgacctgggccccggcattgccccctctgcccctggcaccattccagaactgcccaccttccacactgaggtagccgagcctctcaagacctacaagatggggtactaacaccacccccaccgcccccaccaccacccccagctcctgaggtgctggccagtgcacccccactcccaccctcaaccgcggcccctgtaggccaaggcgccaggcaggacgacagcagcagcagcgcgtctccttcagtccagggagctcccagggaagtggtcgacccctccggtggccgggccactctgctagagtccatccgccaagctgggggcatcggcaaggccaagctgcgcagcatgaaggagcgaaagctggagaagaagaagcagaaggagcaggagcaagtgagagccacgagccaaggtgggcacttgatgtcggatctcttcaacaagctggtcatgaggcgcaagggcatctctgggaaaggacctggggctggtgaggggcccggaggagcctttgcccgcgtgtcagactccatccctcctctgccgccaccgcagcagccacaggcagaggaggacgaggacgactgggaatcctagggggctccatgacaccttcccccccagacccagacttgggccgttgctctgacatggacacagccaggacaagctgctcagacctgcttccctgggagggggtgacggaaccagcactgtgtggagaccagcttcaaggagcggaaggctggcttgaggccacacagctggggcggggacttctgtctgcctgtacttcatggggggacggctccacccagcctgcgccactgtgttcttctcttaagaggcttccagagaaaacggcacaccaatcaataaagaactgagcag

SEQ ID NO: 370339 - DNA, 1702 bp, Homo sapiens
gcggcggcgggagcttccgggagggcggctcgcaggcaccatgactcctgtgaggatgcagcactccctggcaggtcagacctatgccgtgcccctcatccagccagacctgcggcgagaggaggccgtccagcagatggcggatgccctgcagtacctgcagaaggtctctggagacatcttcagcaggatctcccagcgggtagagcagagccggagccaggtgcaggccattggagagaaggtctccttggcccaggccaagattgagaagatcaagggcagcaagaaggccatcaaggtgttctccagtgccaagtaccctgctccagagcgcctgcaggaatatggctccatcttcacgggcgcccaggaccctggcctgcagagacgcccccgccacaggatccagagcaagcaccgccccctggacgagcgggccctgcaggagaagctgaaggactttcctgtgtgcgtgagcaccaagccggagcccgaggacgatgcagaagagggacttgggggtcttcccagcaacatcagctctgtcagctccttgctgctcttcaacaccaccgagaacctgtacaagaagtatgtcttcctggaccccctggctggtgctgtaacaaagacccatgtgatgctgggggcagagacagaggagaagctgtttgatgcccccttgtccatcagtcccagagaactacttctatgtgccagacctgggccaggtgcctgagattgatgttccatcctacctgcctgacctgcccggcattgccaacgacctcatgtacattgccgacctgggccccggcattgccccctctgcccctggcaccattccagaactgcccaccttccacactgaggtagccgagcctctcaagacctacaagatggggtactaacaccacccccaccgcccccaccaccacccccagctcctgaggtgctggccagtgcacccccactcccaccctcaaccgcggcccctgtaggccaaggcgccaggcaggacgacagcagcagcagcgcgtctccttcagtccagggagctcccagggaagtggtcgacccctccggtggccgggccactctgctagagtccatccgccaagctgggggcatcggcaaggccaagctgcgcagcatgaaggagcgaaagctggagaagaagaagcagaaggagcaggagcaagtgagagccacgagccaaggtgggcacttgatgtcggatctcttcaacaagctggtcatgaggcgcaagggcatctctgggaaaggacctggggctggtgaggggcccggaggagcctttgcccgcgtgtcagactccatccctcctctgccgccaccgcagcagccacaggcagaggaggacgaggacgactgggaatcctagggggctccatgacaccttcccccccagacccagacttgggccgttgctctgacatggacacagccaggacaagctgctcagacctgcttccctgggagggggtgacggaaccagcactgtgtggagaccagcttcaaggagcggaaggctggcttgaggccacacagctggggcggggacttctgtctgcctgtacttcatggggggacggctccacccagcctgcgccactgtgttcttctcttaagaggcttccagagaaaacggcacaccaatcaataaagaactgagcag

SEQ ID NO: 370340 - DNA, 2327 bp, Homo sapiens
atatctgtagttttgcgtctggcttctctatttaattcttaaaggggggtgggaactaaacagatcacaagggagctgcccacagaggtaaagacaaggtcagataggctgagagacgcaggaaagcgggtcaatgtgtagggctggagggcaggggcgggccctgggcctgggctgggggtcctgccccggggcgcacccagggcgagggctgcccggaggagccgaggctggcggacagcttggccctgagcttgaggggaaggcagcgatgggacaaaggacggaggtctaggaagagggtctgcagagcagaaagcacgggtaggggcggcctgacgctcggaagacaacggatgggagccgtgtgcacgtcgggagctcggagtgagcgcaccatgactcctgtgaggatgcagcactccctggcaggtcagacctatgccgtgcccctcatccagccagacctgcggcgagaggaggccgtccagcagatggcggatgccctgcagtacctgcagaaggtctctggagacatcttcagcaggatctcccagcgggtagagcagagccggagccaggtgcaggccattggagagaaggtctccttggcccaggccaagattgagaagatcaagggcagcaagaaggccatcaaggtgttctccagtgccaagtaccctgctccagagcgcctgcaggaatatggctccatcttcacgggcgcccaggaccctggcctgcagagacgcccccgccacaggatccagagcaagcaccgccccctggacgagcgggccctgcaggagaagctgaaggactttcctgtgtgcgtgagcaccaagccggagcccgaggacgatgcagaagagggacttgggggtcttcccagcaacatcagctctgtcagctccttgctgctcttcaacaccaccgagaacctcctgtatggccagaaggcagggccgaggggtgtgggcgggaggcccggcctggcttagtggggacccagggcatcagacacaggtacagcacatgggccaggagccagggggtgactggggtggctcggctcgggaggcttgggaccccaagtgcacgctgtgcccctgatgatgtgggagaggaacatgggctcaggacagcgggtgtcagcttgcctgacccccatgtcacctctgtaggtacaagaagtatgtcttcctggaccccctggctggtgctgtaacaaagacccatgtgatgctgggggcagagacagaggagaagctgtttgatgcccccttgtccatcagcaagagagagcagctggaacagcaggtcccagagaactacttctatgtgccagacctgggccaggtgcctgagattgatgttccatcctacctgcctgacctgcccggcattgccaacgacctcatgtacattgccgacctgggccccggcattgccccctctgcccctggcaccattccagaactgcccaccttccacactgaggtagccgagcctctcaagacctacaagatggggtactaacaccacccccaccgcccccaccaccacccccagctcctgaggtgctggccagtgcacccccactcccaccctcaaccgcggcccctgtaggccaaggcgccaggcaggacgacagcagcagcagcgcgtctccttcagtccagggagctcccagggaagtggtcgacccctccggtggccgggccactctgctagagtccatccgccaagctgggggcatcggcaaggccaagctgcgcagcatgaaggagcgaaagctggagaagaagaagcagaaggagcaggagcaagtgagagccacgagccaaggtgggcacttgatgtcggatctcttcaacaagctggtcatgaggcgcaagggcatctctgggaaaggacctggggctggtgaggggcccggaggagcctttgcccgcgtgtcagactccatccctcctctgccgccaccgcagcagccacaggcagaggaggacgaggacgactgggaatcctagggggctccatgacaccttcccccccagacccagacttgggccgttgctctgacatggacacagccaggacaagctgctcagacctgcttccctgggagggggtgacggaaccagcactgtgtggagaccagcttcaaggagcggaaggctggcttgaggccacacagctggggcggggacttctgtctgcctgtacttcatggggggacggctccacccagcctgcgccactgtgttcttctcttaagaggcttccagagaaaacggcacaccaatcaataaagaactgagcag

SEQ ID NO: 370341 - DNA, 1969 bp, Homo sapiens
gcggcggcgggagcttccgggagggcggctcgcaggcaccatgactcctgtgaggatgcagcactccctggcaggtcagacctatgccgtgcccctcatccagccagacctgcggcgagaggaggccgtccagcagatggcggatgccctgcagtacctgcagaaggtctctggagacatcttcagcaggatctcccagcgggtagagcagagccggagccaggtgcaggccattggagagaaggtctccttggcccaggccaagattgagaagatcaagggcagcaagaaggccatcaaggtgttctccagtgccaagtaccctgctccagagcgcctgcaggaatatggctccatcttcacgggcgcccaggaccctggcctgcagagacgcccccgccacaggatccagagcaagcaccgccccctggacgagcgggccctgcaggagaagctgaaggactttcctgtgtgcgtgagcaccaagccggagcccgaggacgatgcagaagagggacttgggggtcttcccagcaacatcagctctgtcagctccttgctgctcttcaacaccaccgagaacctcctgtatggccagaaggcagggccgaggggtgtgggcgggaggcccggcctggcttagtggggacccagggcatcagacacaggtacagcacatgggccaggagccagggggtgactggggtggctcggctcgggaggcttgggaccccaagtgcacgctgtgcccctgatgatgtgggagaggaacatgggctcaggacagcgggtgtcagcttgcctgacccccatgtcacctctgtaggtacaagaagtatgtcttcctggaccccctggctggtgctgtaacaaagacccatgtgatgctgggggcagagacagaggagaagctgtttgatgcccccttgtccatcagcaagagagagcagctggaacagcaggtcccagagaactacttctatgtgccagacctgggccaggtgcctgagattgatgttccatcctacctgcctgacctgcccggcattgccaacgacctcatgtacattgccgacctgggccccggcattgccccctctgcccctggcaccattccagaactgcccaccttccacactgaggtagccgagcctctcaagacctacaagatggggtactaacaccacccccaccgcccccaccaccacccccagctcctgaggtgctggccagtgcacccccactcccaccctcaaccgcggcccctgtaggccaaggcgccaggcaggacgacagcagcagcagcgcgtctccttcagtccagggagctcccagggaagtggtcgacccctccggtggccgggccactctgctagagtccatccgccaagctgggggcatcggcaaggccaagctgcgcagcatgaaggagcgaaagctggagaagaagaagcagaaggagcaggagcaagtgagagccacgagccaaggtgggcacttgatgtcggatctcttcaacaagctggtcatgaggcgcaagggcatctctgggaaaggacctggggctggtgaggggcccggaggagcctttgcccgcgtgtcagactccatccctcctctgccgccaccgcagcagccacaggcagaggaggacgaggacgactgggaatcctagggggctccatgacaccttcccccccagacccagacttgggccgttgctctgacatggacacagccaggacaagctgctcagacctgcttccctgggagggggtgacggaaccagcactgtgtggagaccagcttcaaggagcggaaggctggcttgaggccacacagctggggcggggacttctgtctgcctgtacttcatggggggacggctccacccagcctgcgccactgtgttcttctcttaagaggcttccagagaaaacggcacaccaatcaataaagaactgagcag

SEQ ID NO: 370342 - DNA, 2487 bp, Homo sapiens
gcggcggcgggagcttccgggagggcggctcgcaggcaccatgactcctgtgaggatgcagcactccctggcaggtcagacctatgccgtgcccctcatccagccagacctgcggcgagaggaggccgtccagcagatggcggatgccctgcagtacctgcagaaggtctctggagacatcttcagcaggatctcccagcgggtagagcagagccggagccaggtgcaggccattggagagaaggtctccttggcccaggccaagattgagaagatcaagggcagcaagaaggccatcaaggtgttctccagtgccaagtaccctgctccagagcgcctgcaggaatatggctccatcttcacgggcgcccaggaccctggcctgcagagacgcccccgccacaggatccagagcaagcaccgccccctggacgagcgggccctgcaggagaagctgaaggactttcctgtgtgcgtgagcaccaagccggagcccgaggacgatgcagaagagggacttgggggtcttcccagcaacatcagctctgtcagctccttgctgctcttcaacaccaccgagaacctgtacaagaagtatgtcttcctggaccccctggctggtgctgtaacaaagacccatgtgatgctgggggcagagacagaggagaagctgtttgatgcccccttgtccatcagcaagagagagcagctggaacagcaggtcccagagaactacttctatgtgccagacctgggccaggtgcctgagattgatgttccatcctacctgcctgacctgcccggcattgccaacgacctcatgtacattgccgacctgggccccggcattgccccctctgcccctggcaccattccagaactgcccaccttccacactgaggtagccgagcctctcaagacctacaagatggggtactaacaccacccccaccgcccccaccaccacccccagctcctgaggtgctggccagtgcacccccactcccaccctcaaccgcggcccctgtaggccaaggcgccaggcaggacgacagcagcagcagcgcgtctccttcagtccagggagctcccagggaagtggtcgacccctccggtggccgggccactctgctagagtccatccgccaagctgggggcatcggcaaggccaagctgcgcagcatgaaggagcgaaagctggagaagaagaagcagaaggagcaggagcaaggtgagcgggccctggagcctgcggtcggagggccttgggcaagatcgcctcctcccctccagccctgagtccaccgggtgctttctgcccaacccctgctcttgccagctggcccctgcttcccctagggcacatgctggaagccctgggctgccaccagaggtcctcagccctcctgcctgggctatggctccttcctggtttgggagccatagtggagctttcctctctaagctcacccagctcaaactgtgacaggagaatcttcttcgactgccaagagcggtccaaggcaatggtcagccactgcagcctcctgagatatttttagagactggacctgaggcctctggaggctactgatgatgcctgctgtgaacgcagacactggtgtgatgcgatgcctgcgcctgcagcggcagtgccctgggcactatggttttgagcttgtacccagcgctgcttttgccttgctctgtgaccccaggcaagctgcctcacctctctgggccagtttccccatcgtacagtggtgctgcacaccctggccctgtccccgaggtggctgggaggtggctcctcaaacagccgctttctcatcagtgcccagtgctgggtcagggatcgactgaggctctgagctaactgggaaacacagtggccttggagggctggggagtgtcatgggggtggggacagggagccaccggtcgcatgtgactgaactcttcaccccagtctgtgactttcccgttgcagtgagagccacgagccaaggtgggcacttgatgtcggatctcttcaacaagctggtcatgaggcgcaagggcatctctgggaaaggacctggggctggtgaggggcccggaggagcctttgcccgcgtgtcagactccatccctcctctgccgccaccgcagcagccacaggcagaggaggacgaggacgactgggaatcctagggggctccatgacaccttcccccccagacccagacttgggccgttgctctgacatggacacagccaggacaagctgctcagacctgcttccctgggagggggtgacggaaccagcactgtgtggagaccagcttcaaggagcggaaggctggcttgaggccacacagctggggcggggacttctgtctgcctgtacttcatggggggacggctccacccagcctgcgccactgtgttcttctcttaagaggcttccagagaaaacggcacaccaatcaataaagaactgagcag

SEQ ID NO: 370343 - DNA, 1728 bp, Homo sapiens
atatctgtagttttgcgtctggcttctctatttaattcttaaaggggggtgggaactaaacagatcacaagggagctgcccacagaggtaaagacaaggtcagataggctgagagacgcaggaaagcgggtcaatgtgtagggctggagggcaggggcgggccctgggcctgggctgggggtcctgccccggggcgcacccagggcgagggctgcccggaggagccgaggctggcggacagcttggccctgagcttgaggggaaggcagcgatgggacaaaggacggaggtctaggaagagggtctgcagagcagaaagcacgggtaggggcggcctgacgctcggaagacaacggatgggagccgtgtgcacgtcgggagctcggagtgagcgcaccatgactcctgtgaggatgcagcactccctggcaggtcagacctatgccgtgcccctcatccagccagacctgcggcgagaggaggccgtccagcagatggcggatgccctgcagtacctgcagaaggtctctggagacatcttcagcaggatctcccagcgggtagagcagagccggagccaggtgcaggccattggagagaaggtctccttggcccaggccaagattgagaagatcaagggcagcaagaaggccatcaaggtgttctccagtgccaagtaccctgctccagagcgcctgcaggaatatggctccatcttcacgggcgcccaggaccctggcctgcagagacgcccccgccacaggatccagagcaagcaccgccccctggacgagcgggccctgcaggagaagctgaaggactttcctgtgtgcgtgagcaccaagccggagcccgaggacgatgcagaagagggacttgggggtcttcccagcaacatcagctctgtcagctccttgctgctcttcaacaccaccgagaacctcacccccaccgcccccaccaccacccccagctcctgaggtgctggccagtgcacccccactcccaccctcaaccgcggcccctgtaggccaaggcgccaggcaggacgacagcagcagcagcgcgtctccttcagtccagggagctcccagggaagtggtcgacccctccggtggccgggccactctgctagagtccatccgccaagctgggggcatcggcaaggccaagctgcgcagcatgaaggagcgaaagctggagaagaagaagcagaaggagcaggagcaagtgagagccacgagccaaggtgggcacttgatgtcggatctcttcaacaagctggtcatgaggcgcaagggcatctctgggaaaggacctggggctggtgaggggcccggaggagcctttgcccgcgtgtcagactccatccctcctctgccgccaccgcagcagccacaggcagaggaggacgaggacgactgggaatcctagggggctccatgacaccttcccccccagacccagacttgggccgttgctctgacatggacacagccaggacaagctgctcagacctgcttccctgggagggggtgacggaaccagcactgtgtggagaccagcttcaaggagcggaaggctggcttgaggccacacagctggggcggggacttctgtctgcctgtacttcatggggggacggctccacccagcctgcgccactgtgttcttctcttaagaggcttccagagaaaacggcacaccaatcaataaagaactgagcag

SEQ ID NO: 370344 - DNA, 1497 bp, Homo sapiens
gcggcggcgggagcttccgggagggcggctcgcaggcaccatgactcctgtgaggatgcagcactccctggcaggtcagacctatgccgtgcccctcatccagccagacctgcggcgagaggaggccgtccagcagatggcggatgccctgcagtacctgcagaaggtctctggagacatcttcagcaggatctcccagcgggtagagcagagccggagccaggtgcaggccattggagagaaggtctccttggcccaggccaagattgagaagatcaagggcagcaagaaggccatcaaggtgttctccagtgccaagtaccctgctccagagcgcctgcaggaatatggctccatcttcacgggcgcccaggaccctggcctgcagagacgcccccgccacaggatccagagcaagcaccgccccctggacgagcgggccctgcaggagaagctgaaggactttcctgtgtgcgtgagcaccaagccggagcccgaggacgatgcagaagagggacttgggggtcttcccagcaacatcagctctgtcagctccttgctgctcttcaacaccaccgagaacctgtacaagaagtatgtcttcctggaccccctggctggtgctgtaacaaagacccatgtgatgctgggggcagagacagaggagaagctgtttgatgcccccttgtccatcagtcccagagaactacttctatgtgccagacctgggccaggtgcctgagattgatgttccatcctacctgcctgacctgcccggcattgccaacgacctcatgtacattgccgacctgggccccggcattgccccctctgcccctggcaccattccagaactgcccaccttccacactgaggtagccgagcctctcaagcactctgctagagtccatccgccaagctgggggcatcggcaaggccaagctgcgcagcatgaaggagcgaaagctggagaagaagaagcagaaggagcaggagcaagtgagagccacgagccaaggtgggcacttgatgtcggatctcttcaacaagctggtcatgaggcgcaagggcatctctgggaaaggacctggggctggtgaggggcccggaggagcctttgcccgcgtgtcagactccatccctcctctgccgccaccgcagcagccacaggcagaggaggacgaggacgactgggaatcctagggggctccatgacaccttcccccccagacccagacttgggccgttgctctgacatggacacagccaggacaagctgctcagacctgcttccctgggagggggtgacggaaccagcactgtgtggagaccagcttcaaggagcggaaggctggcttgaggccacacagctggggcggggacttctgtctgcctgtacttcatggggggacggctccacccagcctgcgccactgtgttcttctcttaagaggcttccagagaaaacggcacaccaatcaataaagaactgagcag

SEQ ID NO: 370345 - DNA, 1243 bp, Homo sapiens
gcggcggcgggagcttccgggagggcggctcgcaggcaccatgactcctgtgaggatgcagcactccctggcaggtcagacctatgccgtgcccctcatccagccagacctgcggcgagaggaggccgtccagcagatggcggatgccctgcagtacctgcagaaggtctctggagacatcttcagcaggatctcccagcgggtagagcagagccggagccaggtgcaggccattggagagaaggtctccttggcccaggccaagattgagaagatcaagggcagcaagaaggccatcaaggtgttctccagtgccaagtaccctgctccagagcgcctgcaggaatatggctccatcttcacgggcgcccaggaccctggcctgcagagacgcccccgccacaggatccagagcaagcaccgccccctggacgagcgggccctgcaggagaagctgaaggactttcctgtgtgcgtgagcaccaagccggagcccgaggacgatgcagaagagggacttgggggtcttcccagcaacatcagctctgtcagctccttgctgctcttcaacaccaccgagaacctgtacaagaagtatgtcttcctggaccccctggctggtgctgtaacaaagacccatgtgatgctgggggcagagacagaggagaagctgtttgatgcccccttgtccatcagcaagagagagcagctggaacagcaggtcccagagaactacttctatgtgccagacctgggccaggtgcctgagattgatgttccatcctacctgcctgacctgcccggcattgccaacgacctcatgtacattgccgacctgggccccggcattgccccctctgcccctggcaccattccagaactgcccaccttccacactgaggtagccgagcctctcaagacctacaagatggggtactaacaccacccccaccgcccccaccaccacccccagctcctgaggtgctggccagtgcacccccactcccaccctcaaccgcggcccctgtaggccaaggcgccaggcaggacgacagcagcagcagcgcgtctccttcaggtgggagcagctctttgaggccacctgatttctggcgtgctcagtgcactcgggtggattttctgtgggtttgttaagtggtcagaaattctcaattttttgaatagtttccatttcaaatatcttgttctacttggttcataaaatagtggctttcaaactgta

SEQ ID NO: 370346 - DNA, 1604 bp, Homo sapiens
atatctgtagttttgcgtctggcttctctatttaattcttaaaggggggtgggaactaaacagatcacaagggagctgcccacagaggtaaagacaaggtcagataggctgagagacgcaggaaagcgggtcaatgtgtagggctggagggcaggggcgggccctgggcctgggctgggggtcctgccccggggcgcacccagggcgagggctgcccggaggagccgaggctggcggacagcttggccctgagcttgaggggaaggcagcgatgggacaaaggacggaggtctaggaagagggtctgcagagcagaaagcacgggtaggggcggcctgacgctcggaagacaacggatgggagccgtgtgcacgtcgggagctcggagtgagcgcaccatgactcctgtgaggatgcagcactccctggcaggtcagacctatgccgtgcccctcatccagccagacctgcggcgagaggaggccgtccagcagatggcggatgccctgcagtacctgcagaaggtctctggagacatcttcagcaggatctcccagcgggtagagcagagccggagccaggtgcaggccattggagagaaggtctccttggcccaggccaagattgagaagatcaagggcagcaagaaggccatcaaggtgttctccagtgccaagtaccctgctccagagcgcctgcaggaatatggctccatcttcacgggcgcccaggaccctggcctgcagagacgcccccgccacaggatccagagcaagcaccgccccctggacgagcgggccctgcaggagaagctgaaggactttcctgtgtgcgtgagcaccaagccggagcccgaggacgatgcagaagagggacttgggggtcttcccagcaacatcagctctgtcagctccttgctgctcttcaacaccaccgagaacctgtacaagaagtatgtcttcctggaccccctggctggtgctgtaacaaagacccatgtgatgctgggggcagagacagaggagaagctgtttgatgcccccttgtccatcagcagcatgaaggagcgaaagctggagaagaagaagcagaaggagcaggagcaagtgagagccacgagccaaggtgggcacttgatgtcggatctcttcaacaagctggtcatgaggcgcaagggcatctctgggaaaggacctggggctggtgaggggcccggaggagcctttgcccgcgtgtcagactccatccctcctctgccgccaccgcagcagccacaggcagaggaggacgaggacgactgggaatcctagggggctccatgacaccttcccccccagacccagacttgggccgttgctctgacatggacacagccaggacaagctgctcagacctgcttccctgggagggggtgacggaaccagcactgtgtggagaccagcttcaaggagcggaaggctggcttgaggccacacagctggggcggggacttctgtctgcctgtacttcatggggggacggctccacccagcctgcgccactgtgttcttctcttaagaggcttccagagaaaacggcacaccaatcaataaagaactgagcag

SEQ ID NO: 370347 - DNA, 1660 bp, Homo sapiens
aatggttctaacgtgtaagtattagcagtcatactgtagcataagaaaataccgtctgctgaaagaggaacaataaagattatctacatggtcatcatttaaaagctaccagatataggaagaaggggccataaaatgataacgttatgatgattaattttgatgcttaggtcagagtccattctaggatatctgctgcccaaaaacagcagagactcatttctttggaatcacaggacgctgagtgagaggaaagaaaaagaaaagaaatatgcaccatgactcctgtgaggatgcagcactccctggcaggtcagacctatgccgtgcccctcatccagccagacctgcggcgagaggaggccgtccagcagatggcggatgccctgcagtacctgcagaaggtctctggagacatcttcagcagcctcctcttctgtcaccaactgggaacccacctcttcctgaaagtcctcccccactgactcaccggcttgccccaagcttgtcaagaatgtcccagtaaccaggtggcacacactgaagtgactgaggggttaccttggagttgatgccttggctcagatccagctcccctgttttcttcctctgtaaccttgggcaacccaacccctctaagcctcggtgttctcatttgtgaagttgtggtaataatggtagcttcctggtagaattattgtaaatattaaattaatcaaaacatgcaaaggaatggaacagtgcctggcacctaggaagccttcaggaaatgctatctcttccctgttgataatcttgacccgtacactgcctttggttgccattcatgaacctgccaccaatagtaacaaagtgctggatgcaccttttgtgcttatctttgtgctaaatgtgcccgagggacgcctagggaagaggatgcaggtctttaagagccatcagctccagattatggccaccccatgtccagcacttagaatggaggccaaaaccattccctcggaaattgtgtttccttgccaagatggggactgcgtggttgcccttctctgagggcagcgctggatttttggcgtctttcctttcctgtcctggtacttggcaccttgtagacagttgcatgtcccctgcccagggatgggatgaggagagggcaggaaggcatttcctgggtagtggagtgctgcgttcattgagtgtgggttctccaagctgctggcacagcgcagggagggccagatgcctctcaggagccttgggcctgagtcctggctccctcactcctgggttccaggtcactgcatctgtctctccaccatgtgctccacctcgtgctggaccttaagagataccaattatgtggctgccactgtgtcctagaggctggaatgggaacacatagggcgagattgattgttaattgctagcatgaaccgcgtgggcttctcagggtctagagtggagagaaatcggtaagaattggtggcacgcctgtcagaactccccagaccaagctaagcagaaattaaccaatcagtagagcagccttcggagtaagggctaaaatgatgtcctcagggcctggttttgctttccttccatgtcagtttgcttctttgggtctggctgcattcccagacaggccatgctgtcgtggtag

SEQ ID NO: 370348 - DNA, 1588 bp, Homo sapiens
gaggcgagctggagggctgcagcttcttgtattggcagtgctgacctcgcacagtccttgggctccagtgacttcactcagtgtttatctaacatgagtgagtgaatggtgtttgctgtttttttggcaaaggtcccaggggttgtcgggtacacaggtcctgtctttggccataagcaaactgaaatgaggcttggtctccttcccaggattccacaccatgcctcacatggtagaccccagcgggaagtatgtgactgcctgactcaggtgcctctcgtggtccaagccatccctgccctgtcccttccctggttgttgccagacctggagcccctgctccttcgctttgcagcctcctcttctgtcaccaactgggaacccacctcttcctgaaagtcctcccccactgactcaccggcttgccccaagcttgtcaagaatgtcccagtaaccaggtggcacacactgaagtgactgaggggttaccttggagttgatgccttggctcagatccagctcccctgttttcttcctctgtaaccttgggcaacccaacccctctaagcctcggtgttctcatttgtgaagttgtggtaataatggtagcttcctggtagaattattgtaaatattaaattaatcaaaacatgcaaaggaatggaacagtgcctggcacctaggaagccttcaggaaatgctatctcttccctgttgataatcttgacccgtacactgcctttggttgccattcatgaacctgccaccaatagtaacaaagtgctggatgcaccttttgtgcttatctttgtgctaaatgtgcccgagggacgcctagggaagaggatgcaggtctttaagagccatcagctccagattatggccaccccatgtccagcacttagaatggaggccaaaaccattccctcggaaattgtgtttccttgccaagatggggactgcgtggttgcccttctctgagggcagcgctggatttttggcgtctttcctttcctgtcctggtacttggcaccttgtagacagttgcatgtcccctgcccagggatgggatgaggagagggcaggaaggcatttcctgggtagtggagtgctgcgttcattgagtgtgggttctccaagctgctggcacagcgcagggagggccagatgcctctcaggagccttgggcctgagtcctggctccctcactcctgggttccaggtcactgcatctgtctctccaccatgtgctccacctcgtgctggaccttaagagataccaattatgtggctgccactgtgtcctagaggctggaatgggaacacatagggcgagattgattgttaattgctagcatgaaccgcgtgggcttctcagggtctagagtggagagaaatcggtaagaattggtggcacgcctgtcagaactccccagaccaagctaagcagaaattaaccaatcagtagagcagccttcggagtaagggctaaaatgatgtcctcagggcctggttttgctttccttccatgtcagtttgcttctttgggtctggctgcattcccagacaggccatgctgtcgtggtag

SEQ ID NO: 370349 - DNA, 1728 bp, Homo sapiens
gcggcggcgggagcttccgggagggcggctcgcaggcaccatgactcctgtgaggatgcagcactccctggcaggtcagacctatgccgtgcccctcatccagccagacctgcggcgagaggaggccgtccagcagatggcggatgccctgcagtacctgcagaaggtctctggagacatcttcagcaggatctcccagcgggtagagcagagccggagccaggtgcaggccattggagagaaggtctccttggcccaggccaagattgagaagatcaagggcagcaagaaggccatcaaggtgttctccagtgccaagtaccctgctccagagcgcctgcaggaatatggctccatcttcacgggcgcccaggaccctggcctgcagagacgcccccgccacaggatccagagcaagcaccgccccctggacgagcgggccctgcaggagaagctgaaggactttcctgtgtgcgtgagcaccaagccggagcccgaggacgatgcagaagagggacttgggggtcttcccagcaacatcagctctgtcagctccttgctgctcttcaacaccaccgagaacctgtacaagaagtatgtcttcctggaccccctggctggtgctgtaacaaagacccatgtgatgctgggggcagagacagaggagaagctgtttgatgcccccttgtccatcagcaagagagagcagctggaacagcaggtcccagagaactacttctatgtgccagacctgggccaggtgcctgagattgatgttccatcctacctgcctgacctgcccggcattgccaacgacctcatgtacattgccgacctgggccccggcattgccccctctgcccctggcaccattccagaactgcccaccttccacactgaggtagccgagcctctcaagacctacaagatggggtactaacaccacccccaccgcccccaccaccacccccagctcctgaggtgctggccagtgcacccccactcccaccctcaaccgcggcccctgtaggccaaggcgccaggcaggacgacagcagcagcagcgcgtctccttcagtccagggagctcccagggaagtggtcgacccctccggtggccgggccactctgctagagtccatccgccaagctgggggcatcggcaaggccaagctgcgcagcatgaaggagcgaaagctggagaagaagaagcagaaggagcaggagcaagtgagagccacgagccaaggtgggcacttgatgtcggatctcttcaacaagctggtcatgaggcgcaagggcatctctgggaaaggacctggggctggtgaggggcccggaggagcctttgcccgcgtgtcagactccatccctcctctgccgccaccgcagcagccacaggcagaggaggacgaggacgactgggaatcctagggggctccatgacaccttcccccccagacccagacttgggccgttgctctgacatggacacagccaggacaagctgctcagacctgcttccctgggagggggtgacggaaccagcactgtgtggagaccagcttcaaggagcggaaggctggcttgaggccacacagctggggcggggacttctgtctgcctgtacttcatggggggacggctccacccagcctgcgccactgtgttcttctcttaagaggcttccagagaaaacggcacaccaatcaataaagaactgagcag

SEQ ID NO: 370350 - DNA, 1880 bp, Homo sapiens
agcagagtcccatctatgcgctcctggcctctcagcaaatgctctgtcccctactcccctatctgtgcaggctgaagctatgtgcatagttgggatgagggctgtgttgtctcaacaccacgctgccctgtggtgggggcgtgccggtggtcgtgggtggctctgatgctccggctccgacccacaggcaccatgactcctgtgaggatgcagcactccctggcaggtcagacctatgccgtgcccctcatccagccagacctgcggcgagaggaggccgtccagcagatggcggatgccctgcagtacctgcagaaggtctctggagacatcttcagcaggatctcccagcgggtagagcagagccggagccaggtgcaggccattggagagaaggtctccttggcccaggccaagattgagaagatcaagggcagcaagaaggccatcaaggtgttctccagtgccaagtaccctgctccagagcgcctgcaggaatatggctccatcttcacgggcgcccaggaccctggcctgcagagacgcccccgccacaggatccagagcaagcaccgccccctggacgagcgggccctgcaggagaagctgaaggactttcctgtgtgcgtgagcaccaagccggagcccgaggacgatgcagaagagggacttgggggtcttcccagcaacatcagctctgtcagctccttgctgctcttcaacaccaccgagaacctgtacaagaagtatgtcttcctggaccccctggctggtgctgtaacaaagacccatgtgatgctgggggcagagacagaggagaagctgtttgatgcccccttgtccatcagcaagagagagcagctggaacagcaggtcccagagaactacttctatgtgccagacctgggccaggtgcctgagattgatgttccatcctacctgcctgacctgcccggcattgccaacgacctcatgtacattgccgacctgggccccggcattgccccctctgcccctggcaccattccagaactgcccaccttccacactgaggtagccgagcctctcaagacctacaagatggggtactaacaccacccccaccgcccccaccaccacccccagctcctgaggtgctggccagtgcacccccactcccaccctcaaccgcggcccctgtaggccaaggcgccaggcaggacgacagcagcagcagcgcgtctccttcagtccagggagctcccagggaagtggtcgacccctccggtggccgggccactctgctagagtccatccgccaagctgggggcatcggcaaggccaagctgcgcagcatgaaggagcgaaagctggagaagaagaagcagaaggagcaggagcaagtgagagccacgagccaaggtgggcacttgatgtcggatctcttcaacaagctggtcatgaggcgcaagggcatctctgggaaaggacctggggctggtgaggggcccggaggagcctttgcccgcgtgtcagactccatccctcctctgccgccaccgcagcagccacaggcagaggaggacgaggacgactgggaatcctagggggctccatgacaccttcccccccagacccagacttgggccgttgctctgacatggacacagccaggacaagctgctcagacctgcttccctgggagggggtgacggaaccagcactgtgtggagaccagcttcaaggagcggaaggctggcttgaggccacacagctggggcggggacttctgtctgcctgtacttcatggggggacggctccacccagcctgcgccactgtgttcttctcttaagaggcttccagagaaaacggcacaccaatcaataaagaactgagcag

SEQ ID NO: 370351 - DNA, 1966 bp, Homo sapiens
aatggttctaacgtgtaagtattagcagtcatactgtagcataagaaaataccgtctgctgaaagaggaacaataaagattatctacatggtcatcatttaaaagctaccagatataggaagaaggggccataaaatgataacgttatgatgattaattttgatgcttaggtcagagtccattctaggatatctgctgcccaaaaacagcagagactcatttctttggaatcacaggacgctgagtgagaggaaagaaaaagaaaagaaatatgcaccatgactcctgtgaggatgcagcactccctggcaggtcagacctatgccgtgcccctcatccagccagacctgcggcgagaggaggccgtccagcagatggcggatgccctgcagtacctgcagaaggtctctggagacatcttcagcaggatctcccagcgggtagagcagagccggagccaggtgcaggccattggagagaaggtctccttggcccaggccaagattgagaagatcaagggcagcaagaaggccatcaaggtgttctccagtgccaagtaccctgctccagagcgcctgcaggaatatggctccatcttcacgggcgcccaggaccctggcctgcagagacgcccccgccacaggatccagagcaagcaccgccccctggacgagcgggccctgcaggagaagctgaaggactttcctgtgtgcgtgagcaccaagccggagcccgaggacgatgcagaagagggacttgggggtcttcccagcaacatcagctctgtcagctccttgctgctcttcaacaccaccgagaacctgtacaagaagtatgtcttcctggaccccctggctggtgctgtaacaaagacccatgtgatgctgggggcagagacagaggagaagctgtttgatgcccccttgtccatcagcaagagagagcagctggaacagcaggtcccagagaactacttctatgtgccagacctgggccaggtgcctgagattgatgttccatcctacctgcctgacctgcccggcattgccaacgacctcatgtacattgccgacctgggccccggcattgccccctctgcccctggcaccattccagaactgcccaccttccacactgaggtagccgagcctctcaagacctacaagatggggtactaacaccacccccaccgcccccaccaccacccccagctcctgaggtgctggccagtgcacccccactcccaccctcaaccgcggcccctgtaggccaaggcgccaggcaggacgacagcagcagcagcgcgtctccttcagtccagggagctcccagggaagtggtcgacccctccggtggccgggccactctgctagagtccatccgccaagctgggggcatcggcaaggccaagctgcgcagcatgaaggagcgaaagctggagaagaagaagcagaaggagcaggagcaagtgagagccacgagccaaggtgggcacttgatgtcggatctcttcaacaagctggtcatgaggcgcaagggcatctctgggaaaggacctggggctggtgaggggcccggaggagcctttgcccgcgtgtcagactccatccctcctctgccgccaccgcagcagccacaggcagaggaggacgaggacgactgggaatcctagggggctccatgacaccttcccccccagacccagacttgggccgttgctctgacatggacacagccaggacaagctgctcagacctgcttccctgggagggggtgacggaaccagcactgtgtggagaccagcttcaaggagcggaaggctggcttgaggccacacagctggggcggggacttctgtctgcctgtacttcatggggggacggctccacccagcctgcgccactgtgttcttctcttaagaggcttccagagaaaacggcacaccaatcaataaagaactgagcag

SEQ ID NO: 370352 - DNA, 2420 bp, Homo sapiens
gcacatggagtgtggccctgtgggcaagggctgggctcttggaggtaggggagctacaggggcgactgggaggaggatgtcgtgttacacacgcatcagagttaactttgcagtgagagcggccttgctgcggccaaagaacatggaaaagcatgagtggggtgatgtgtgccttaaagcatcagacacttgggcctcgggcatcaggagccagccacagggatgtctggggaaatggcgttccatgagatgcaagcacacaagaatgcacttggcacatctggggaacagcaggcagctgatatcactgggcccaccctgcaccagggaggatggaagcaggtgaggagctagaccacactgaggcggtggtcgggactcagggtttgctcagtgagccgttcactatgtgcaggggcagttccccgtctgaatttaggtgacgacactcaggtccagccttgccagtctcagcctccggtctccgttccccctctgcagaggccactttgtctgctgcacgtgatcatgaggggctgtgaagtgcttgccccatcagtagccatgtgtgcatgtgtaaataccatcctctgtgtgccctggaggctgtccttcagatagcatgtacaggtggcagcatagggcctgtccctactgagagtgcagggaactcagcaccgtcaactcctcgaccctgcaggtcagattatccttgtagaggccccctggatggcaccaagatcggccctggcaagcaggtgaccctgacttcagagcccttgcctgagggctggcctggcagctctgctgttagaagcaggaggtgtgcagggggtggggagcagcccagcctctgtgatcttctccatggcaggatctccgatctcccagcgggtagagcagagccggagccaggtgcaggccattggagagaaggtctccttggcccaggccaagattgagaagatcaagggcagcaagaaggccatcaaggtgttctccagtgccaagtaccctgctccagagcgcctgcaggaatatggctccatcttcacgggcgcccaggaccctggcctgcagagacgcccccgccacaggatccagagcaagcaccgccccctggacgagcgggccctgcaggagaagctgaaggactttcctgtgtgcgtgagcaccaagccggagcccgaggacgatgcagaagagggacttgggggtcttcccagcaacatcagctctgtcagctccttgctgctcttcaacaccaccgagaacctgtacaagaagtatgtcttcctggaccccctggctggtgctgtaacaaagacccatgtgatgctgggggcagagacagaggagaagctgtttgatgcccccttgtccatcagcaagagagagcagctggaacagcaggtcccagagaactacttctatgtgccagacctgggccaggtgcctgagattgatgttccatcctacctgcctgacctgcccggcattgccaacgacctcatgtacattgccgacctgggccccggcattgccccctctgcccctggcaccattccagaactgcccaccttccacactgaggtagccgagcctctcaagacctacaagatggggtactaacaccacccccaccgcccccaccaccacccccagctcctgaggtgctggccagtgcacccccactcccaccctcaaccgcggcccctgtaggccaaggcgccaggcaggacgacagcagcagcagcgcgtctccttcagtccagggagctcccagggaagtggtcgacccctccggtggccgggccactctgctagagtccatccgccaagctgggggcatcggcaaggccaagctgcgcagcatgaaggagcgaaagctggagaagaagaagcagaaggagcaggagcaagtgagagccacgagccaaggtgggcacttgatgtcggatctcttcaacaagctggtcatgaggcgcaagggcatctctgggaaaggacctggggctggtgaggggcccggaggagcctttgcccgcgtgtcagactccatccctcctctgccgccaccgcagcagccacaggcagaggaggacgaggacgactgggaatcctagggggctccatgacaccttcccccccagacccagacttgggccgttgctctgacatggacacagccaggacaagctgctcagacctgcttccctgggagggggtgacggaaccagcactgtgtggagaccagcttcaaggagcggaaggctggcttgaggccacacagctggggcggggacttctgtctgcctgtacttcatggggggacggctccacccagcctgcgccactgtgttcttctcttaagaggcttccagagaaaacggcacaccaatcaataaagaactgagcag

SEQ ID NO: 370353 - DNA, 1443 bp, Homo sapiens
cagaaagagaagaaaacaacggcaggggccggggtatcggacgagggagctccgggagggcggtcgcaggtgttctccagtgccaagtaccctgctccagagcgcctgcaggaatatggctccatcttcacgggcgcccaggaccctggcctgcagagacgcccccgccacaggatccagagcaagcaccgccccctggacgagcgggccctgcaggagaagctgaaggactttcctgtgtgcgtgagcaccaagccggagcccgaggacgatgcagaagagggacttgggggtcttcccagcaacatcagctctgtcagctccttgctgctcttcaacaccaccgagaacctcctgtatggccagaaggcagggccgaggggtgtgggcgggaggcccggcctggcttagtggggacccagggcatcagacacaggtcccagagaactacttctatgtgccagacctgggccaggtgcctgagattgatgttccatcctacctgcctgacctgcccggcattgccaacgacctcatgtacattgccgacctgggccccggcattgccccctctgcccctggcaccattccagaactgcccaccttccacactgaggtagccgagcctctcaagacctacaagatggggtactaacaccacccccaccgcccccaccaccacccccagctcctgaggtgctggccagtgcacccccactcccaccctcaaccgcggcccctgtaggccaaggcgccaggcaggacgacagcagcagcagcgcgtctccttcagtccagggagctcccagggaagtggtcgacccctccggtggccgggccactctgctagagtccatccgccaagctgggggcatcggcaaggccaagctgcgcagcatgaaggagcgaaagctggagaagaagaagcagaaggagcaggagcaagtgagagccacgagccaaggtgggcacttgatgtcggatctcttcaacaagctggtcatgaggcgcaagggcatctctgggaaaggacctggggctggtgaggggcccggaggagcctttgcccgcgtgtcagactccatccctcctctgccgccaccgcagcagccacaggcagaggaggacgaggacgactgggaatcctagggggctccatgacaccttcccccccagacccagacttgggccgttgctctgacatggacacagccaggacaagctgctcagacctgcttccctgggagggggtgacggaaccagcactgtgtggagaccagcttcaaggagcggaaggctggcttgaggccacacagctggggcggggacttctgtctgcctgtacttcatggggggacggctccacccagcctgcgccactgtgttcttctcttaagaggcttccagagaaaacggcacaccaatcaataaagaactgagcag

SEQ ID NO: 370354 - DNA, 807 bp, Homo sapiens
  misc_feature (15)..(15): n is a, c, g, or t
  misc_feature (51)..(51): n is a, c, g, or t
gaagtatggcttttnatgcatccttcatcgagggcattgaagttgcatggnctgataaaagttgatgcaaaacaagaaagaaacaaaccctcaaccgcggcccctgtaggccaaggcgccaggcaggacgacagcagcagcagcgcgtctccttcagtccagggagctcccagggaagtggtcgacccctccggtggccgggccactctgctagagtccatccgccaagctgggggcatcggcaaggccaagctgcgcagcatgaaggagcgaaagctggagaagaagaagcagaaggagcaggagcaagtgagagccacgagccaaggtgggcacttgatgtcggatctcttcaacaagctggtcatgaggcgcaagggcatctctgggaaaggacctggggctggtgaggggcccggaggagcctttgcccgcgtgtcagactccatccctcctctgccgccaccgcagcagccacaggcagaggaggacgaggacgactgggaatcctagggggctccatgacaccttcccccccagacccagacttgggccgttgctctgacatggacacagccaggacaagctgctcagacctgcttccctgggagggggtgacggaaccagcactgtgtggagaccagcttcaaggagcggaaggctggcttgaggccacacagctggggcggggacttctgtctgcctgtacttcatggggggacggctccacccagcctgcgccactgtgttcttctcttaagaggcttccagagaaaacggcacaccaatcaataaagaactgagcag

SEQ ID NO: 370355 - DNA, 947 bp, Homo sapiens
aatggttctaacgtgtaagtattagcagtcatactgtagcataagaaaataccgtctgctgaaagaggaacaataaagattatctacatggtcatcatttaaaagctaccagatataggaagaaggggccataaaatgataacgttatgatgattaattttgatgcttaggtcagagtccattctaggatatctgctgcccaaaaacagcagagactcatttctttggaatcacaggacgctgagtgagaggaaagaaaaagaaaagaaatatgcaccatgactcctgtgaggatgcagcactccctggcaggtcagacctatgccgtgcccctcatccagccagacctgcggcgagaggaggccgtccagcagatggcggatgccctgcagtacctgcagaaggtctctggagacatcttcagcaggtgggtgctgccactcacccccacctgatgagagggccatccctgtcctgggcaatcccagcaacacaccctctgggagcagcccccttggggaatcccggtcctggggaacccatctggcttccctgtgtgggaggggctgaagtgagagcccaacttggaagcttttactcctgggagtccgagagctcactcccttccaccccacttagcctcctggtttcctgtggtggctctgctctcacaactcatgcttttcctcccattggagggcctattccttcacgttttcctgcagccaacaaatatttacccagtagtgctcgtgtgcaaggcagtgtgggaatctctatatatccagccacggataaggcaacatacctctccacctggagcgcacattctggcaggagagaaagacctaaataagcaatagatgattagttcttcaataacagttgtgacaaggtctattgataatattttgtaatcactaatattcatataaaccgtgcaccac

SEQ ID NO: 370356 - DNA, 409 bp, Homo sapiens
actagagctaagagaatgtgaaagaaaatttctagccttgagtgttgctgccacctacatggtgggaagactacaaacaaaatctaacacctttcagacaggcatcagctgcagtatgttttctatgaaaatgtactttagaaatccccaaatttgtttatttacttcactatcctgaaggcatgttagtatttgttagtttcgcctcattttctatctcaaatacttgcagacattggagtaaatggttttgcttagactggtgtgaatacactgattatttgaaatagaagccgattcaaagaattcttccttattataaaaaaatcccaagtgcaacttgatccccatagctatgtcttagggaaaggatgaaggttcttaatctcactgtactagaggtcctccc

SEQ ID NO: 370357 - DNA, 4360 bp, Homo sapiens
cctgccgggtcccgggtcctttgcggcgctagggtgggcgaacccagagcgacgctccgggacgatgtggggcagcgatcgcctggcgggtgctgggggaggcggggcggcagtgactgtggccttcaccaacgctcgcgactgcttcctccacctgccgcggcgtctcgtggcccagctgcatctgctgcagaatcaagctatagaagtggtctggagtcaccagcctgcattcttgagctgggtggaaggcaggcattttagtgatcaaggtgaaaatgtggctgaaattaacagacaagttggtcaaaaacttggactctcaaatgggggacaggtatttctcaagccatgttcccatgtggtatcttgtcaacaagttgaggtggaacccctctcagcagatgattgggagatactggagctgcatgctgtttcccttgaacaacatcttctagatcaaattcgaatagtttttccaaaagccatttttcctgtttgggttgatcaacaaacgtacatatttatccaaattgttgcactaataccagctgcctcttatggaaggctggaaactgacaccaaactccttattcagccaaagacacgccgagccaaagagaatacattttcaaaagctgatgctgaatataaaaaacttcatagttatggaagagaccagaaaggaatgatgaaagaacttcaaaccaagcaacttcagtcaaatactgtgggaatcactgaatctaatgaaaacgagtcagagattccagttgactcatcatcagtagcaagtttatggactatgataggaagcattttttcctttcaatctgagaagaaacaagagacatcttggggtttaactgaaatcaatgcattcaaaaatatgcagtcaaaggttgttcctctagacaatattttcagagtatgcaaatctcaacctcctagtatatataacgcgtcagcaacctctgtttttcataaacactgtgccattcatgtatttccatgggaccaggaatattttgatgtagagcccagctttactgtgacatatggaaagctagttaagctactttctccaaagcaacagcaaagtaaaacaaaacaaaatgtgttatcacctgaaaaagagaagcagatgtcagagccactagatcaaaaaaaaattaggtcagatcataatgaagaagatgagaaggcctgtgtgctacaagtagtctggaatggacttgaagaattgaacaatgccatcaaatataccaaaaatgtagaagttctccatcttgggaaagtctggattccagatgacctgaggaagagactaaatatagaaatgcatgccgtagtcaggataactccagtggaagttacccctaaaattccaagatctctaaagttacaacctagagagaatttacctaaagacataagtgaagaagacataaaaactgtattttattcatggctacagcagtctactaccaccatgcttcctttggtaatatcagaggaagaatttattaagctggaaactaaagatggactgaaggaattttctctgagtatagttcattcttgggaaaaagaaaaagataaaaatatttttctgttgagtcccaatttgctgcagaagactacaatacaagtccttctagatcctatggtaaaagaagaaaacagtgaggaaattgactttattcttccttttttaaagctgagctctttgggaggagtgaattccttaggcgtatcctccttggagcacatcactcacagcctcctgggacgccctttgtctcggcagctgatgtctcttgttgcaggacttaggaatggagctcttttactcacaggaggaaagggaagtggaaaatcaactttagccaaagcaatctgtaaagaagcatttgacaaactggatgcccatgtggagagagttgactgtaaagctttacgaggaaaaaggcttgaaaacatacaaaaaaccctagaggtggctttctcagaggcagtgtggatgcagccatctgttgtcctgctggatgaccttgacctcattgctggactgcctgctgtcccggaacatgagcacagtcctgatgcggtgcagagccagcggcttgctcatgctttgaatgatatgataaaagagtttatctccatgggaagtttggttgcactgattgccacaagtcagtctcagcaatctctacatcctttacttgtttctgctcaaggagttcacatatttcagtgcgtccaacacattcagcctcctaatcaggaacaaagatgtgaaattctgtgtaatgtaataaaaaataaattggactgtgatataaacaagttcaccgatcttgacctgcagcatgtagctaaagaaactggagggtttgtggctagagattttacagtacttgtggatcgagccatacattctcgactctctcgtcagagtatatccaccagagaaaaattagttttaacaacattggacttccaaaaggctctccgcggatttcttcctgcgtctttgcgaagtgtcaacctgcataaacctagagacctgggttgggacaagattggtgggttacatgaagttaggcagatactcatggatactatccagttacctgccaagtatccagaattatttgcaaacttgcccatacgacaaagaacaggaatactgttgtatggtccgcctggaacaggaaaaaccttactagctggggtaattgcacgagagagtagaatgaattttataagtgtcaaggggccagagttactcagcaaatacattggagcaagtgaacaagctgttcgggatatttttattagagcacaggctgcaaagccctgcattcttttctttgatgaatttgaatccattgctcctcggcggggtcatgataatacaggagttacagaccgagtagttaaccagttgctgactcagttggatggagtagaaggcttacagggtgtttatgtattggctgctactagtcgccctgacttgattgaccctgccctgcttaggcctggtcgactagataaatgtgtatactgtcctcctcctgatcaggtgtcacgtcttgaaattttaaatgtcctcagtgactctctacctctggcagatgatgttgaccttcagcatgtagcatcagtaactgactcctttactggagctgatctgaaagctttactttacaatgcccaattggaggccttacatggaatgctgctctcgagtggactccaggatggaagttccagctctgatagtgacctaagtctgtcttcaatggtctttcttaaccatagcagtggctctgacgattcagctggagatggagaatgtggcttagatcagtcccttgtttctttagagatgtccgagatccttccagatgaatcaaaattcaatatgtaccggctctactttggaagctcttatgaatcagaacttggaaatggaacctcttctgatttgagctcacaatgtctctctgcaccaagctccatgactcaggatttgcctggagttcctgggaaagaccagttgttttcacagcctccagtgttaaggacagcttcacaagagggttgccaagaacttacacaagaacaaagagatcaactgagggcagatatcagtattatcaaaggcagataccggagccaaagtggagaggacgaatccatgaaccaaccaggaccaatcaaaaccagactggctattagtcagtcacatttaatgactgcacttggtcacacaagaccatccattagtgaagatgactggaagaattttgctgagctatatgaaagctttcaaaatccaaagaggagaaaaaatcaaagtggaacaatgtttcgacctggacagaaagtaactttagcataaaatatacttctttttgatttggttctgttaagttttttgatggcttttccatatgttgtaacaggaaaaaaatggtgtctatgaatttcttcttaatttaacaaatttggttaatttataaaatcacagattggtaaatgctataattatgtaatgatcaggattgagattaatactgtagtataaattgggacattataacagattccatattttatttcctaaaatctaaattcagtctttaatgaaataatattagccaaatggtggaactaatttatttcttttgaggaaaagataataaagaatgtaattaaatttaaatttcttggaattcccagttgtatattcatcacctttgtagcatttgacaaattttatgcttagcagcttcttcactgttttgaaataaaatatcctattacctactgataaaaaaaaaaa

SEQ ID NO: 370358 - DNA, 709 bp, Homo sapiens
ggattacaggcgtgagccaccatgcccagccttaagagtgtttgattttcattcattttcctatatatattatttctgttggggaaaaaattccaaggaagataaatagtaggctgttggtacatttctcaacttacttataaagctttttagatatataaggttaatttatgaagaaaatcataagatacacaatttaagataatatttttaattttattttttatttgttaaataaatttttctcctttcaggtgtcacgtcttgaaattttaaatgtcctcagtgactctctacctctggcagatgatgttgaccttcagcatgtagcatcagtaactgactcctttactggagctgatctgaaagctttactttacaatgcccaattggaggccttacatggaatgctgctctcgagtggactccaggcaagttatatgaggaagttgttatgacattttatgagtgataaaagaagtacaatgtcaaaatttccaccttaaaaaatgctattttttaaacaactttggtaaaactgtatagaaacataaatttacctttagttgaatgttccatagttggaatatgggttttgcagagaatttataattatgaagtttgatgtctgtttctttaacattaccttaatattggcaaaaacatgttggtgtttgcaaggatattatttaaattgggataccatgaa

SEQ ID NO: 370359 - DNA, 4362 bp, Homo sapiens
cctgccgggtcccgggtcctttgcggcgctagggtgggcgaacccagagcgacgctccgggacgatgtggggcagcgatcgcctggcgggtgctgggggaggcggggcggcagtgactgtggccttcaccaacgctcgcgactgcttcctccacctgccgcggcgtctcgtggcccagctgcatctgctgcagaatcaagctatagaagtggtctggagtcaccagcctgcattcttgagctgggtggaaggcaggcattttagtgatcaaggtgaaaatgtggctgaaattaacagacaagttggtcaaaaacttggactctcaaatgggggacaggtatttctcaagccatgttcccatgtggtatcttgtcaacaagttgaggtggaacccctctcagcagatgattgggagatactggagctgcatgctgtttcccttgaacaacatcttctagatcaaattcgaatagtttttccaaaagccatttttcctgtttgggttgatcaacaaacgtacatatttatccaaattgttgcactaataccagctgcctcttatggaaggctggaaactgacaccaaactccttattcagccaaagacacgccgagccaaagagaatacattttcaaaagctgatgctgaatataaaaaacttcatagttatggaagagaccagaaaggaatgatgaaagaacttcaaaccaagcaacttcagtcaaatactgtgggaatcactgaatctaatgaaaacgagtcagagattccagttgactcatcatcagtagcaagtttatggactatgataggaagcattttttcctttcaatctgagaagaaacaagagacatcttggggtttaactgaaatcaatgcattcaaaaatatgcagtcaaaggttgttcctctagacaatattttcagagtatgcaaatctcaacctcctagtatatataacgcgtcagcaacctctgtttttcataaacactgtgccattcatgtatttccatgggaccaggaatattttgatgtagagcccagctttactgtgacatatggaaagctagttaagctactttctccaaagcaacagcaaagtaaaacaaaacaaaatgtgttatcacctgaaaaagagaagcagatgtcagagccactagatcaaaaaaaaattaggtcagatcataatgaagaagatgagaaggcctgtgtgctacaagtagtctggaatggacttgaagaattgaacaatgccatcaaatataccaaaaatgtagaagttctccatcttgggaaagtctggattccagatgacctgaggaagagactaaatatagaaatgcatgccgtagtcaggataactccagtggaagttacccctaaaattccaagatctctaaagttacaacctagagagaatttacctaaagacataagtgaagaagacataaaaactgtattttattcatggctacagcagtctactaccaccatgcttcctttggtaatatcagaggaagaatttattaagctggaaactaaagatggactgaaggaattttctctgagtatagttcattcttgggaaaaagaaaaagataaaaatatttttctgttgagtcccaatttgctgcagaagactacaatacaagtccttctagatcctatggtaaaagaagaaaacagtgaggaaattgactttattcttccttttttaaagctgagctctttgggaggagtgaattccttaggcgtatcctccttggagcacatcactcacagcctcctgggacgccctttgtctcggcagctgatgtctcttgttgcaggacttaggaatggagctcttttactcacaggaggaaagggaagtggaaaatcaactttagccaaagcaatctgtaaagaagcatttgacaaactggatgcccatgtggagagagttgactgtaaagctttacgaggaaaaaggcttgaaaacatacaaaaaaccctagaggtggctttctcagaggcagtgtggatgcagccatctgttgtcctgctggatgaccttgacctcattgctggactgcctgctgtcccggaacatgagcacagtcctgatgcggtgcagagccagcggcttgctcatgctttgaatgatatgataaaagagtttatctccatgggaagtttggttgcactgattgccacaagtcagtctcagcaatctctacatcctttacttgtttctgctcaaggagttcacatatttcagtgcgtccaacacattcagcctcctaatcaggaacaaagatgtgaaattctgtgtaatgtaataaaaaataaattggactgtgatataaacaagttcaccgatcttgacctgcagcatgtagctaaagaaactggagggtttgtggctagagattttacagtacttgtggatcgagccatacattctcgactctctcgtcagagtatatccaccagagaaaaattagttttaacaacattggacttccaaaaggctctccgcggatttcttcctgcgtctttgcgaagtgtcaacctgcataaacctagagacctgggttgggacaagattggtgggttacatgaagttaggcagatactcatggatactatccagttacctgccaagtatccagaattatttgcaaacttgcccatacgacaaagaacaggaatactgttgtatggtccgcctggaacaggaaaaaccttactagctggggtaattgcacgagagagtagaatgaattttataagtgtcaaggggccagagttactcagcaaatacattggagcaagtgaacaagctgttcgggatatttttattagagcacaggctgcaaagccctgcattcttttctttgatgaatttgaatccattgctcctcggcggggtcatgataatacaggagttacagaccgagtagttaaccagttgctgactcagttggatggagtagaaggcttacagggtgtttatgtattggctgctactagtcgccctgacttgattgaccctgccctgcttaggcctggtcgactagataaatgtgtatactgtcctcctcctgatcaggtgtcacgtcttgaaattttaaatgtcctcagtgactctctacctctggcagatgatgttgaccttcagcatgtagcatcagtaactgactcctttactggagctgatctgaaagctttactttacaatgcccaattggaggccttacatggaatgctgctctcgagtggactccaggatggaagttccagctctgatagtgacctaagtctgtcttcaatggtctttcttaaccatagcagtggctctgacgattcagctggagatggagaatgtggcttagatcagtcccttgtttctttagagatgtccgagatccttccagatgaatcaaaattcaatatgtaccggctctactttggaagctcttatgaatcagaacttggaaatggaacctcttctgatttgagctcacaatgtctctctgcaccaagctccatgactcaggatttgcctggagttcctgggaaagaccagttgttttcacagcctccagtgttaaggacagcttcacaagagggttgccaagaacttacacaagaacaaagagatcaactgagggcagatatcagtattatcaaaggcagataccggagccaaagtggagaggacgaatccatgaaccaaccaggaccaatcaaaaccagactggctattagtcagtcacatttaatgactgcacttggtcacacaagaccatccattagtgaagatgactggaagaattttgctgagctatatgaaagctttcaaaatccaaagaggagaaaaaatcaaagtggaacaatgtttcgacctggacagaaagtaactttagcataaaatatacttctttttgatttggttctgttaagttttttgatggcttttccatatgttgtaacaggaaaaaaatggtgtctatgaatttcttcttaatttaacaaatttggttaatttataaaatcacagattggtaaatgctataattatgtaatgatcaggattgagattaatactgtagtataaattgggacattataacagattccatattttatttcctaaaatctaaattcagtctttaatgaaataatattagccaaatggtggaactaatttatttcttttgaggaaaagataataaagaatgtaattaaatttaaatttcttggaattcccagttgtatattcatcacctttgtagcattcgccaggttttaagtgtaggaccctacttagggcccccacccccgaccttcgttaataaaaggccctccatatgccca

SEQ ID NO: 370360 - DNA, 4189 bp, Homo sapiens
cctgccgggtcccgggtcctttgcggcgctagggtgggcgaacccagagcgacgctccgggacgatgtggggcagcgatcgcctggcgggtgctgggggaggcggggcggcagtgactgtggccttcaccaacgctcgcgactgcttcctccacctgccgcggcgtctcgtggcccagctgcatctgctgcagaatcaagctatagaagtggtctggagtcaccagcctgcattcttgagctgggtggaaggcaggcattttagtgatcaaggtgaaaatgtggctgaaattaacagacaagttggtcaaaaacttggactctcaaatgggggacaggtatttctcaagccatgttcccatgtggtatcttgtcaacaagttgaggtggaacccctctcagcagatgattgggagatactggagctgcatgctgtttcccttgaacaacatcttctagatcaaattcgaatagtttttccaaaagccatttttcctgtttgggttgatcaacaaacgtacatatttatccaaattgttgcactaataccagctgcctcttatggaaggctggaaactgacaccaaactccttattcagccaaagacacgccgagccaaagagaatacattttcaaaagctgatgctgaatataaaaaacttcatagttatggaagagaccagaaaggaatgatgaaagaacttcaaaccaagcaacttcagtcaaatactgtgggaatcactgaatctaatgaaaacgagtcagagattccagttgactcatcatcagtagcaagtttatggactatgataggaagcattttttcctttcaatctgagaagaaacaagagacatcttggggtttaactgaaatcaatgcattcaaaaatatgcagtcaaaggttgttcctctagacaatattttcagagtatgcaaatctcaacctcctagtatatataacgcgtcagcaacctctgtttttcataaacactgtgccattcatgtatttccatgggaccaggaatattttgatgtagagcccagctttactgtgacatatggaaagctagttaagctactttctccaaagcaacagcaaagtaaaacaaaacaaaatgtgttatcacctgaaaaagagaagcagatgtcagagccactagatcaaaaaaaaattaggtcagatcataatgaagaagatgagaaggcctgtgtgctacaagtagtctggaatggacttgaagaattgaacaatgccatcaaatataccaaaaatgtagaagttctccatcttgggaaagtctggattccagatgacctgaggaagagactaaatatagaaatgcatgccgtagtcaggataactccagtggaagttacccctaaaattccaagatctctaaagttacaacctagagagaatttacctaaagacataagtgaagaagacataaaaactgtattttattcatggctacagcagtctactaccaccatgcttcctttggtaatatcagaggaagaatttattaagctggaaactaaagatggactgaaggaattttctctgagtatagttcattcttgggaaaaagaaaaagataaaaatatttttctgttgagtcccaatttgctgcagaagactacaatacaagtccttctagatcctatggtaaaagaagaaaacagtgaggaaattgactttattcttccttttttaaagctgagctctttgggaggagtgaattccttaggcgtatcctccttggagcacatcactcacagcctcctgggacgccctttgtctcggcagctgatgtctcttgttgcaggacttaggaatggagctcttttactcacaggaggaaagggaagtggaaaatcaactttagccaaagcaatctgtaaagaagcatttgacaaactggatgcccatgtggagagagttgactgtaaagctttacgagctttgaatgatatgataaaagagtttatctccatgggaagtttggttgcactgattgccacaagtcagtctcagcaatctctacatcctttacttgtttctgctcaaggagttcacatatttcagtgcgtccaacacattcagcctcctaatcaggaacaaagatgtgaaattctgtgtaatgtaataaaaaataaattggactgtgatataaacaagttcaccgatcttgacctgcagcatgtagctaaagaaactggagggtttgtggctagagattttacagtacttgtggatcgagccatacattctcgactctctcgtcagagtatatccaccagagaaaaattagttttaacaacattggacttccaaaaggctctccgcggatttcttcctgcgtctttgcgaagtgtcaacctgcataaacctagagacctgggttgggacaagattggtgggttacatgaagttaggcagatactcatggatactatccagttacctgccaagtatccagaattatttgcaaacttgcccatacgacaaagaacaggaatactgttgtatggtccgcctggaacaggaaaaaccttactagctggggtaattgcacgagagagtagaatgaattttataagtgtcaaggggccagagttactcagcaaatacattggagcaagtgaacaagctgttcgggatatttttattagagcacaggctgcaaagccctgcattcttttctttgatgaatttgaatccattgctcctcggcggggtcatgataatacaggagttacagaccgagtagttaaccagttgctgactcagttggatggagtagaaggcttacagggtgtttatgtattggctgctactagtcgccctgacttgattgaccctgccctgcttaggcctggtcgactagataaatgtgtatactgtcctcctcctgatcaggtgtcacgtcttgaaattttaaatgtcctcagtgactctctacctctggcagatgatgttgaccttcagcatgtagcatcagtaactgactcctttactggagctgatctgaaagctttactttacaatgcccaattggaggccttacatggaatgctgctctcgagtggactccaggatggaagttccagctctgatagtgacctaagtctgtcttcaatggtctttcttaaccatagcagtggctctgacgattcagctggagatggagaatgtggcttagatcagtcccttgtttctttagagatgtccgagatccttccagatgaatcaaaattcaatatgtaccggctctactttggaagctcttatgaatcagaacttggaaatggaacctcttctgatttgagctcacaatgtctctctgcaccaagctccatgactcaggatttgcctggagttcctgggaaagaccagttgttttcacagcctccagtgttaaggacagcttcacaagagggttgccaagaacttacacaagaacaaagagatcaactgagggcagatatcagtattatcaaaggcagataccggagccaaagtggagaggacgaatccatgaaccaaccaggaccaatcaaaaccagactggctattagtcagtcacatttaatgactgcacttggtcacacaagaccatccattagtgaagatgactggaagaattttgctgagctatatgaaagctttcaaaatccaaagaggagaaaaaatcaaagtggaacaatgtttcgacctggacagaaagtaactttagcataaaatatacttctttttgatttggttctgttaagttttttgatggcttttccatatgttgtaacaggaaaaaaatggtgtctatgaatttcttcttaatttaacaaatttggttaatttataaaatcacagattggtaaatgctataattatgtaatgatcaggattgagattaatactgtagtataaattgggacattataacagattccatattttatttcctaaaatctaaattcagtctttaatgaaataatattagccaaatggtggaactaatttatttcttttgaggaaaagataataaagaatgtaattaaatttaaatttcttggaattcccagttgtatattcatcacctttgtagcatttgacaaattttatgcttagcagcttcttcactgttttgaaataaaatatcctattacctactgataaaaaaaaaaa

SEQ ID NO: 370361 - DNA, 2896 bp, Homo sapiens
  misc_feature (12)..(12): n is a, c, g, or t
  misc_feature (33)..(33): n is a, c, g, or t
  misc_feature (49)..(49): n is a, c, g, or t
gggctttgcagncctgtgctctaataaaaatancccgaaacagcttgtncacttgctccaatgtatttgctgagtaactctggccccttgacacttataaaattcattctactctctcgtgcaattaccccagctagtaaggttttttctgttgagtcccaatttgctgcagaagactacaatacaagtccttctagatcctatggtaaaagaagaaaacagtgaggaaattgactttattcttccttttttaaagctgagctctttgggaggagtgaattccttaggcgtatcctccttggagcacatcactcacagcctcctgggacgccctttgtctcggcagctgatgtctcttgttgcaggacttaggaatggagctcttttactcacaggaggaaagggaagtggaaaatcaactttagccaaagcaatctgtaaagaagcatttgacaaactggatgcccatgtggagagagttgactgtaaagctttacgaggaaaaaggcttgaaaacatacaaaaaaccctagaggtggctttctcagaggcagtgtggatgcagccatctgttgtcctgctggatgaccttgacctcattgctggactgcctgctgtcccggaacatgagcacagtcctgatgcggtgcagagccagcggcttgctcatgctttgaatgatatgataaaagagtttatctccatgggaagtttggttgcactgattgccacaagtcagtctcagcaatctctacatcctttacttgtttctgctcaaggagttcacatatttcagtgcgtccaacacattcagcctcctaatcaggaacaaagatgtgaaattctgtgtaatgtaataaaaaataaattggactgtgatataaacaagttcaccgatcttgacctgcagcatgtagctaaagaaactggagggtttgtggctagagattttacagtacttgtggatcgagccatacattctcgactctctcgtcagagtatatccaccagagaaaaattagttttaacaacattggacttccaaaaggctctccgcggatttcttcctgcgtctttgcgaagtgtcaacctgcataaacctagagacctgggttgggacaagattggtgggttacatgaagttaggcagatactcatggatactatccagttacctgccaagtatccagaattatttgcaaacttgcccatacgacaaagaacaggaatactgttgtatggtccgcctggaacaggaaaaaccttactagctggggtaattgcacgagagagtagaatgaattttataagtgtcaaggggccagagttactcagcaaatacattggagcaagtgaacaagctgttcgggatatttttattagagcacaggctgcaaagccctgcattcttttctttgatgaatttgaatccattgctcctcggcggggtcatgataatacaggagttacagaccgagtagttaaccagttgctgactcagttggatggagtagaaggcttacagggtgtttatgtattggctgctactagtcgccctgacttgattgaccctgccctgcttaggcctggtcgactagataaatgtgtatactgtcctcctcctgatcaggtgtcacgtcttgaaattttaaatgtcctcagtgactctctacctctggcagatgatgttgaccttcagcatgtagcatcagtaactgactcctttactggagctgatctgaaagctttactttacaatgcccaattggaggccttacatggaatgctgctctcgagtggactccaggatggaagttccagctctgatagtgacctaagtctgtcttcaatggtctttcttaaccatagcagtggctctgacgattcagctggagatggagaatgtggcttagatcagtcccttgtttctttagagatgtccgagatccttccagatgaatcaaaattcaatatgtaccggctctactttggaagctcttatgaatcagaacttggaaatggaacctcttctgatttgagctcacaatgtctctctgcaccaagctccatgactcaggatttgcctggagttcctgggaaagaccagttgttttcacagcctccagtgttaaggacagcttcacaagagggttgccaagaacttacacaagaacaaagagatcaactgagggcagatatcagtattatcaaaggcagataccggagccaaagtggagaggacgaatccatgaaccaaccaggaccaatcaaaaccagactggctattagtcagtcacatttaatgactgcacttggtcacacaagaccatccattagtgaagatgactggaagaattttgctgagctatatgaaagctttcaaaatccaaagaggagaaaaaatcaaagtggaacaatgtttcgacctggacagaaagtaactttagcataaaatatacttctttttgatttggttctgttaagttttttgatggcttttccatatgttgtaacaggaaaaaaatggtgtctatgaatttcttcttaatttaacaaatttggttaatttataaaatcacagattggtaaatgctataattatgtaatgatcaggattgagattaatactgtagtataaattgggacattataacagattccatattttatttcctaaaatctaaattcagtctttaatgaaataatattagccaaatggtggaactaatttatttcttttgaggaaaagataataaagaatgtaattaaatttaaatttcttggaattcccagttgtatattcatcacctttgtagcatttgacaaattttatgcttagcagcttcttcactgttttgaaataaaatatcctattacctactgataaaaaaaaaaa

SEQ ID NO: 370362 - DNA, 3962 bp, Homo sapiens
cctgccgggtcccgggtcctttgcggcgctagggtgggcgaacccagagcgacgctccgggacgatgtggggcagcgatcgcctggcgggtgctgggggaggcggggcggcagtgactgtggccttcaccaacgctcgcgactgcttcctccacctgccgcggcgtctcgtggcccagctgcatctgctgcagaatcaagctatagaagtggtctggagtcaccagcctgcattcttgagctgggtggaaggcaggcattttagtgatcaaggtgaaaatgtggctgaaattaacagacaagttggtcaaaaacttggactctcaaatgggggacaggtatttctcaagccatgttcccatgtggtatcttgtcaacaagttgaggtggaacccctctcagcagatgattgggagatactggagctgcatgctgtttcccttgaacaacatcttctagatcaaattcgaatagtttttccaaaagccatttttcctgtttgggttgatcaacaaacgtacatatttatccaaattgttgcactaataccagctgcctcttatggaaggctggaaactgacaccaaactccttattcagccaaagacacgccgagccaaagagaatacattttcaaaagctgatgctgaatataaaaaacttcatagttatggaagagaccagaaaggaatgatgaaagaacttcaaaccaagcaacttcagtcaaatactgtgggaatcactgaatctaatgaaaacgagtcagagattccagttgactcatcatcagtagcaagtttatggactatgataggaagcattttttcctttcaatctgagaagaaacaagagacatcttggggtttaactgaaatcaatgcattcaaaaatatgcagtcaaaggttgttcctctagacaatattttcagagtatgcaaatctcaacctcctagtatatataacgcgtcagcaacctctgtttttcataaacactgtgccattcatgtatttccatgggaccaggaatattttgatgtagagcccagctttactgtgacatatggaaagctagttaagctactttctccaaagcaacagcaaagtaaaacaaaacaaaatgtgttatcacctgaaaaagagaagcagatgtcagagccactagatcaaaaaaaaattaggtcagatcataatgaagaagatgagaaggcctgtgtgctacaagtagtctggaatggacttgaagaattgaacaatgccatcaaatataccaaaaatgtagaagttctccatcttgggaaagtctggattccagatgacctgaggaagagactaaatatagaaatgcatgccgtagtcaggataactccagtggaagttacccctaaaattccaagatctctaaagttacaacctagagagaatttacctaaagacataagtgaagaagacataaaaactgtattttattcatggctacagcagtctactaccaccatgcttcctttggtaatatcagaggaagaatttattaagctggaaactaaagatggactgaaggaattttctctgagtatagttcattcttgggaaaaagaaaaagataaaaatatttttctgttgagtcccaatttgctgcagaagactacaatacaagtccttctagatcctatggtaaaagaagaaaacagtgaggaaattgactttattcttccttttttaaagctgagctctttgggaggagtgaattccttaggcgtatcctccttggagcacatcactcacagcctcctgggacgccctttgtctcggcagctgatgtctcttgttgcaggacttaggaatggagctcttttactcacaggaggaaagggaagtggaaaatcaactttagccaaagcaatctgtaaagaagcatttgacaaactggatgcccatgtggagagagttgactgtaaagctttacgaggaaaaaggcttgaaaacatacaaaaaaccctagaggtggctttctcagaggcagtgtggatgcagccatctgttgtcctgctggatgaccttgacctcattgctggactgcctgctgtcccggaacatgagcacagtcctgatgcggtgcagagccagcggcttgctcatgctttgaatgatatgataaaagagtttatctccatgggaagtttggttgcactgattgccacaagtcagtctcagcaatctctacatcctttacttgtttctgctcaaggagttcacatatttcagtgcgtccaacacattcagcctcctaatcaggaacaaagatgtgaaattctgtgtaatgtaataaaaaataaattggactgtgatataaacaagttcaccgatcttgacctgcagcatgtagctaaagaaactggagggtttgtggctagagattttacagtacttgtggatcgagccatacattctcgactctctcgtcagagtatatccaccagagaaaaattagttttaacaacattggacttccaaaaggctctccgcggatttcttcctgcgtctttgcgaagtgtcaacctgcataaacctagagacctgggttgggacaagattggtgggttacatgaagttaggcagatactcatggatactatccagttacctgccaagtatccagaattatttgcaaacttgcccatacgacaaagaacaggaatactgttgtatggtccgcctggaacaggaaaaaccttactagctggggtaattgcacgagagagtagaatgaattttataagtgtcaaggggccagagttactcagcaaatacattggagcaagtgaacaagctgttcgggatatttttattagagcacaggctgcaaagccctgcattcttttctttgatgaatttgaatccattgctcctcggcggggtcatgataatacaggagttacagaccgagtagttaaccagttgctgactcagttggatggagtagaaggcttacagggtgtttatgtattggctgctactagtcgccctgacttgattgaccctgccctgcttaggcctggtcgactagataaatgtgtatactgtcctcctcctgatcaggtgtcacgtcttgaaattttaaatgtcctcagtgactctctacctctggcagatgatgttgaccttcagcatgtagcatcagtaactgactcctttactggagctgatctgaaagctttactttacaatgcccaattggaggccttacatggaatgctgctctcgagtggactccaggatggaagttccagctctgatagtgacctaagtctgtcttcaatggtctttcttaaccatagcagtggctctgacgattcagctggagatggagaatgtggcttagatcagtcccttgtttctttagagatgtccgagatccttccagatgaatcaaaattcaatatgtaccggctctactttggaagctcttatgaatcagaacttggaaatggaacctcttctgatttgagctcacaatgtctctctgcaccaagctccatgactcaggatttgcctggagttcctgggaaagaccagttgttttcacagcctccagtgttaaggacagcttcacaagagggttgccaagaacttacacaagaacaaagagatcaactgagggcagatatcagtattatcaaaggcagataccggagccaaagtggagaggacgaatccatgaaccaaccaggaccaatcaaaaccagactggctattagtcagtcacatttaatgactgcacttggtcacacaagaccatccattagtgaagatgactggaagaattttgctgagctgtaagtaacagattctgttttggaagtacagctactattacaagtgacatagtattacacttaaacctttaaagttcgtgtttaaaataaaaatattttgaatatttaaaagctaattcaaaaaatatgtg

SEQ ID NO: 370363 - DNA, 3502 bp, Homo sapiens
cctgccgggtcccgggtcctttgcggcgctagggtgggcgaacccagagcgacgctccgggacgatgtggggcagcgatcgcctggcgggtgctgggggaggcggggcggcagtgactgtggccttcaccaacgctcgcgactgcttcctccacctgccgcggcgtctcgtggcccagctgcatctgctgcagaatcaagctatagaagtggtctggagtcaccagcctgcattcttgagctgggtggaaggcaggcattttagtgatcaaggtgaaaatgtggctgaaattaacagacaagttggtcaaaaacttggactctcaaatgggggacaggtatttctcaagccatgttcccatgtggtatcttgtcaacaagttgaggtggaacccctctcagcagatgattgggagatactggagctgcatgctgtttcccttgaacaacatcttctagatcaaattcgaatagtttttccaaaagccatttttcctgtttgggttgatcaacaaacgtacatatttatccaaattgttgcactaataccagctgcctcttatggaaggctggaaactgacaccaaactccttattcagccaaagacacgccgagccaaagagaatacattttcaaaagctgatgctgaatataaaaaacttcatagttatggaagagaccagaaaggaatgatgaaagaacttcaaaccaagcaacttcagtcaaatactgtgggaatcactgaatctaatgaaaacgagtcagagattccagttgactcatcatcagtagcaagtttatggactatgataggaagcattttttcctttcaatctgagaagaaacaagagacatcttggggtttaactgaaatcaatgcattcaaaaatatgcagtcaaaggttgttcctctagacaatattttcagagtatgcaaatctcaacctcctagtatatataacgcgtcagcaacctctgtttttcataaacactgtgccattcatgtatttccatgggaccaggaatattttgatgtagagcccagctttactgtgacatatggaaagctagttaagctactttctccaaagcaacagcaaagtaaaacaaaacaaaatgtgttatcacctgaaaaagagaagcagatgtcagagccactagatcaaaaaaaaattaggtcagatcataatgaagaagatgagaaggcctgtgtgctacaagtagtctggaatggacttgaagaattgaacaatgccatcaaatataccaaaaatgtagaagttctccatcttgggaaagtctggattccagatgacctgaggaagagactaaatatagaaatgcatgccgtagtcaggataactccagtggaagttacccctaaaattccaagatctctaaagttacaacctagagagaatttacctaaagacataagtgaagaagacataaaaactgtattttattcatggctacagcagtctactaccaccatgcttcctttggtaatatcagaggaagaatttattaagctggaaactaaagatggactgaaggaattttctctgagtatagttcattcttgggaaaaagaaaaagataaaaatatttttctgttgagtcccaatttgctgcagaagactacaatacaagtccttctagatcctatggtaaaagaagaaaacagtgaggaaattgactttattcttccttttttaaagctgagctctttgggaggagtgaattccttaggcgtatcctccttggagcacatcactcacagcctcctgggacgccctttgtctcggcagctgatgtctcttgttgcaggacttaggaatggagctcttttactcacaggaggaaagggaagtggaaaatcaactttagccaaagcaatctgtaaagaagcatttgacaaactggatgcccatgtggagagagttgactgtaaagctttacgaggaaaaaggcttgaaaacatacaaaaaaccctagaggtggctttctcagaggcagtgtggatgcagccatctgttgtcctgctggatgaccttgacctcattgctggactgcctgctgtcccggaacatgagcacagtcctgatgcggtgcagagccagcggcttgctcatgctttgaatgatatgataaaagagtttatctccatgggaagtttggttgcactgattgccacaagtcagtctcagcaatctctacatcctttacttgtttctgctcaaggagttcacatatttcagtgcgtccaacacattcagcctcctaatcaggaacaaagatgtgaaattctgtgtaatgtaataaaaaataaattggactgtgatataaacaagttcaccgatcttgacctgcagcatgtagctaaagaaactggagggtttgtggctagagattttacagtacttgtggatcgagccatacattctcgactctctcgtcagagtatatccaccagagaaaaattagttttaacaacattggacttccaaaaggctctccgcggatttcttcctgcgtctttgcgaagtgtcaacctgcataaacctagagacctgggttgggacaagattggtgggttacatgaagttaggcagatactcatggatactatccagttacctgccaagtatccagaattatttgcaaacttgcccatacgacaaagaacaggaatactgttgtatggtccgcctggaacaggaaaaaccttactagctggggtaattgcacgagagagtagaatgaattttataagtgtcaaggggccagagttactcagcaaatacattggagcaagtgaacaagctgttcgggatatttttattagagcacaggctgcaaagccctgcattcttttctttgatgaatttgaatccattgctcctcggcggggtcatgataatacaggagttacagaccgagtagttaaccagttgctgactcagttggatggagtagaaggcttacagggtaataattataaatacagaaatagaatgttataacaaaatgtcatcatgtcatcagattttggtaaaaaaatgttcttttttcctctaggtgtttatgtattggctgctactagtcgccctgacttgattgaccctgccctgcttaggcctggtcgactagataaatgtgtatactgtcctcctcctgatcaggtgacaatttcatatttagagtccaaaacccaacaaatgctacactctttccttgtgagctttacttctgccaggtaatggcaattgtccttagaagaccagctttcttagggaaaagctttagccactgtttgctcaaagcataaaaagattctgaattagatgcaaagcctttttttggcccagtgcaagtctgaaaactttgtaatccttctgtgttggctgattggggaaaaaaaaaaatgcaagaaacctaatgtattatattttcacattatcttctgttcaaagattacatacttccattatcctgtcaaa

SEQ ID NO: 370364 - DNA, 2621 bp, Homo sapiens
cctgccgggtcccgggtcctttgcggcgctagggtgggcgaacccagagcgacgctccgggacgatgtggggcagcgatcgcctggcgggtgctgggggaggcggggcggcagtgactgtggccttcaccaacgctcgcgactgcttcctccacctgccgcggcgtctcgtggcccagctgcatctgctgcagaatcaagctatagaagtggtctggagtcaccagcctgcattcttgagctgggtggaaggcaggcattttagtgatcaaggtgaaaatgtggctgaaattaacagacaagttggtcaaaaacttggactctcaaatgggggacaggtatttctcaagccatgttcccatgtggtatcttgtcaacaagttgaggtggaacccctctcagcagatgattgggagatactggagctgcatgctgtttcccttgaacaacatcttctagatcaaattcgaatagtttttccaaaagccatttttcctgtttgggttgatcaacaaacgtacatatttatccaaattgttgcactaataccagctgcctcttatggaaggctggaaactgacaccaaactccttattcagccaaagacacgccgagccaaagagaatacattttcaaaagctgatgctgaatataaaaaacttcatagttatggaagagaccagaaaggaatgatgaaagaacttcaaaccaagcaacttcagtcaaatactgtgggaatcactgaatctaatgaaaacgagtcagagattccagttgactcatcatcagtagcaagtttatggactatgataggaagcattttttcctttcaatctgagaagaaacaagagacatcttggggtttaactgaaatcaatgcattcaaaaatatgcagtcaaaggttgttcctctagacaatattttcagagtatgcaaatctcaacctcctagtatatataacgcgtcagcaacctctgtttttcataaacactgtgccattcatgtatttccatgggaccaggaatattttgatgtagagcccagctttactgtgacatatggaaagctagttaagctactttctccaaagcaacagcaaagtaaaacaaaacaaaatgtgttatcacctgaaaaagagaagcagatgtcagagccactagatcaaaaaaaaattaggtcagatcataatgaagaagatgagaaggcctgtgtgctacaagtagtctggaatggacttgaagaattgaacaatgccatcaaatataccaaaaatgtagaagttctccatcttgggaaagtctggattccagatgacctgaggaagagactaaatatagaaatgcatgccgtagtcaggataactccagtggaagttacccctaaaattccaagatctctaaagttacaacctagagagaatttacctaaagacataagtgaagaagacataaaaactgtattttattcatggctacagcagtctactaccaccatgcttcctttggtaatatcagaggaagaatttattaagctggaaactaaagatggactgaaggaattttctctgagtatagttcattcttgggaaaaagaaaaagataaaaatatttttctgttgagtcccaatttgctgcagaagactacaatacaagtccttctagatcctatggtaaaagaagaaaacagtgaggaaattgactttattcttccttttttaaagctgagctctttgggaggagtgaattccttaggcgtatcctccttggagcacatcactcacagcctcctgggacgccctttgtctcggcagctgatgtctcttgttgcaggacttaggaatggagctcttttactcacaggaggaaagggaagtggaaaatcaactttagccaaagcaatctgtaaagaagcatttgacaaactggatgcccatgtggagagagttgactgtaaagctttacgaggaaaaaggcttgaaaacatacaaaaaaccctagaggtggctttctcagaggcagtgtggatgcagccatctgttgtcctgctggatgaccttgacctcattgctggactgcctgctgtcccggaacatgagcacagtcctgatgcggtgcagagccagcggcttgctcatgctttgaatgatatgataaaagagtttatctccatgggaagtttggttgcactgattgccacaagtcagtctcagcaatctctacatcctttacttgtttctgctcaaggagttcacatatttcagtgcgtccaacacattcagcctcctaatcaggaacaaagatgtgaaattctgtgtaatgtaataaaaaataaattggactgtgatataaacaagttcaccgatcttgacctgcagcatgtagctaaagaaactggagggtttgtggctagagattttacagtacttgtggatcgagccatacattctcgactctctcgtcagagtatatccaccagagaaagtatgttttactattaaaacctgaacttggaatcttctttctattgtggagaaatgtaattgtagtaagacaagaattaaatatattccattgtagtatttgaataagcagttatttgagtagaaaattagtgtttccagc

SEQ ID NO: 370365 - DNA, 1420 bp, Homo sapiens
gtttattcctggtctttagaagctgctaccttttgttatctaattttgcagtactttgaagtatgtatgtatgtgtacatacgttagtgctatgtatttattaaagaagaatcagaaaacagaggtaaggaaaaataaggaaacaaatttctgttaagcccaccacctcccaaagcatatttgtttatatgcttatatatgttttcctattatggtaagaacagtctgtacatattgctatatagcagtccccctttatccacatacatcctgaaaattgttttacattttaaatgttaactactttattgtttttaaatgtcattttatagtgtagctatgccacaatatccaatttttagacatttaaattgctcccaggcaatgtggtaatgaacattcttgcagctgaatatatgcacatatctaattgtttcactaggatagaggtggaattgtataacagggagctcacattttttaaggcttttgaaatgtattgccaaattgcctgccagatatactgcaccatcactaacattgtgtgttgcagtatttttctaaacttggcccttttgattttagaaaaatgatatcaataatttacatttctttgattaaagtgtagaagttataatttttcatattattcattgtcatttgtattttatcttttctaacttgtctcttcatcccctttgctccgttttctattggagtgcaactttatttgtaagaattctttttaatttctgtgactggaatttttttttctagtttgttatttcccgttcatttcttaaaatataattgtgtttgccaacaatccattatcttttgttttgtaatggtagtatttatacatattaaattatctctttcttttttcagatatgaaagctttcaaaatccaaagaggagaaaaaatcaaagtggaacaatgtttcgacctggacagaaagtaactttagcataaaatatacttctttttgatttggttctgttaagttttttgatggcttttccatatgttgtaacaggaaaaaaatggtgtctatgaatttcttcttaatttaacaaatttggttaatttataaaatcacagattggtaaatgctataattatgtaatgatcaggattgagattaatactgtagtataaattgggacattataacagattccatattttatttcctaaaatctaaattcagtctttaatgaaataatattagccaaatggtggaactaatttatttcttttgaggaaaagataataaagaatgtaattaaatttaaatttcttggaattcccagttgtatattcatcacctttgtagcatttgacaaattttatgcttagcagcttcttcactgttttgaaataaaatatcctattacctactgataaaaaaaaaaa

SEQ ID NO: 370366 - DNA, 2027 bp, Homo sapiens
cctgccgggtcccgggtcctttgcggcgctagggtgggcgaacccagagcgacgctccgggacgatgtggggcagcgatcgcctggcgggtgctgggggaggcggggcggcagtgactgtggccttcaccaacgctcgcgactgcttcctccacctgccgcggcgtctcgtggcccagctgcatctgctgcagaatcaagctatagaagtggtctggagtcaccagcctgcattcttgagctgggtggaaggcaggcattttagtgatcaaggtgaaaatgtggctgaaattaacagacaagttggtcaaaaacttggactctcaaatgggggacaggtatttctcaagccatgttcccatgtggtatcttgtcaacaagttgaggtggaacccctctcagcagatgattgggagatactggagctgcatgctgtttcccttgaacaacatcttctagatcaaattcgaatagtttttccaaaagccatttttcctgtttgggttgatcaacaaacgtacatatttatccaaattgttgcactaataccagctgcctcttatggaaggctggaaactgacaccaaactccttattcagccaaagacacgccgagccaaagagaatacattttcaaaagctgatgctgaatataaaaaacttcatagttatggaagagaccagaaaggaatgatgaaagaacttcaaaccaagcaacttcagtcaaatactgtgggaatcactgaatctaatgaaaacgagtcagagattccagttgactcatcatcagtagcaagtttatggactatgataggaagcattttttcctttcaatctgagaagaaacaagagacatcttggggtttaactgaaatcaatgcattcaaaaatatgcagtcaaaggttgttcctctagacaatattttcagagtatgcaaatctcaacctcctagtatatataacgcgtcagcaacctctgtttttcataaacactgtgccattcatgtatttccatgggaccaggaatattttgatgtagagcccagctttactgtgacatatggaaagctagttaagctactttctccaaagcaacagcaaagtaaaacaaaacaaaatgtgttatcacctgaaaaagagaagcagatgtcagagccactagatcaaaaaaaaattaggtcagatcataatgaagaagatgagaaggcctgtgtgctacaagtagtctggaatggacttgaagaattgaacaatgccatcaaatataccaaaaatgtagaagttctccatcttgggaaagtctgggttagtataaattttataacttgggagaaattttatgtggcttaaacatccccaaattatgaattagaatagtatttcatatataaattgaaaatcaattaaaaagaaacacagtgcctaaaggcacttgggggacacatttacgctttgcagtaaagtccttgtttggataaagattgtatgttttctggccaagtaagcttgaataggtacaagcttagataggttcaggccagagaggtcaaaattacttgcctgagattgcatagctagtgttacaactaggattcaaacccaggcagattgacttgggggttcatcaggatggagtgccctacaaagcctcccatctttaatgcttgcagatttgttccccagttaccgaaagcaacttgttaatattagggaaaagggccagtgtagggagagatccatggcatgaggtaaccttcctgctgcatgtggtggcacctggattggaatgcatccaggagctgcttaccctgccggtgtctgctctttaatttgtgtataacggagaggaagtagacagggcaactagtgctccagcccctcatcctggccacaaatattaatgctacctttatatgacataagtcactagtccatttattggaacctaaatttgaaccactgtaaagtaagacttcatagtgataaagagaggaacttgttaggaaagagaataaaatagaaagagaag

SEQ ID NO: 370367 - DNA, 240 bp, Homo sapiens
aagaaaacagtgaggaaattgactttattcttccttttttaaagctgagctctttggggtaagaagttatggccaaactagcatgttagacatgtttttaacactatatctggcagagttttcaatgtaaatattaaagtagatgttaatgtcaataagtgatcttaataatgcatcagtagatattttttcaaggattgtctctatcttcacgcctagcttataatttgccttgtcgtc

SEQ ID NO: 370368 - DNA, 385 bp, Homo sapiens
acagatagttttttctctccccctcttccttccatctttcattactacaatttaccatgcagagctcacaatgtctctctgcaccaagctccatgactcaggatttgcctggagttcctgggaaagaccagttgttttcacagcctccagtgttaaggacagcttcacaagagggttgccaagaacttacacaagaacaaagagatcaactgagggcagatatcagtattatcaaaggcagataccggagccaaagtggagtatggctttttccccctcattataattgttaaaacttcttaaaaattgtttcacccttttgatatatatttctttgacttataaacgagctatatttataaacaagggaccagaacacattaac

SEQ ID NO: 370369 - DNA, 4238 bp, Homo sapiens
cctgccgggtcccgggtcctttgcggcgctagggtgggcgaacccagagcgacgctccgggacgatgtggggcagcgatcgcctggcgggtgctgggggaggcggggcggcagtgactgtggccttcaccaacgctcgcgactgcttcctccacctgccgcggcgtctcgtggcccagctgcatctgctgcagaatcaagctatagaagtggtctggagtcaccagcctgcattcttgagctgggtggaaggcaggcattttagtgatcaaggtgaaaatgtggctgaaattaacagacaagttggtcaaaaacttggactctcaaatgggggacaggtatttctcaagccatgttcccatgtggtatcttgtcaacaagttgaggtggaacccctctcagcagatgattgggagatactggagctgcatgctgtttcccttgaacaacatcttctagatcaaattcgaatagtttttccaaaagccatttttcctgtttgggttgatcaacaaacgtacatatttatccaaattgttgcactaataccagctgcctcttatggaaggctggaaactgacaccaaactccttattcagccaaagacacgccgagccaaagagaatacattttcaaaagctgatgctgaatataaaaaacttcatagttatggaagagaccagaaaggaatgatgaaagaacttcaaaccaagcaacttcagtcaaatactgtgggaatcactgaatctaatgaaaacgagtcagagattccagttgactcatcatcagtagcaagtttatggactatgataggaagcattttttcctttcaatctgagaagaaacaagagacatcttggggtttaactgaaatcaatgcattcaaaaatatgcagtcaaaggttgttcctctagacaatattttcagagtatgcaaatctcaacctcctagtatatataacgcgtcagcaacctctgtttttcataaacactgtgccattcatgtatttccatgggaccaggaatattttgatgtagagcccagctttactgtgacatatggaaagctagttaagctactttctccaaagcaacagcaaagtaaaacaaaacaaaatgtgttatcacctgaaaaagagaagcagatgtcagagccactagatcaaaaaaaaattaggtcagatcataatgaagaagatgagaaggcctgtgtgctacaagtagtctggaatggacttgaagaattgaacaatgccatcaaatataccaaaaatgtagaagttctccatcttgggaaagtctggattccagatgacctgaggaagagactaaatatagaaatgcatgccgtagtcaggataactccagtggaagttacccctaaaattccaagatctctaaagttacaacctagagagaatttacctaaagacataagtgaagaagacataaaaactgtattttattcatggctacagcagtctactaccaccatgcttcctttggtaatatcagaggaagaatttattaagctggaaactaaagatggactgaaggaattttctctgagtatagttcattcttgggaaaaagaaaaagataaaaatatttttctgttgagtcccaatttgctgcagaagactacaatacaagtccttctagatcctatggtaaaagaagaaaacagtgaggaaattgactttattcttccttttttaaagctgagctctttgggaggagtgaattccttaggcgtatcctccttggagcacatcactcacagcctcctgggacgccctttgtctcggcagctgatgtctcttgttgcaggacttaggaatggagctcttttactcacaggaggaaagggaagtggaaaatcaactttagccaaagcaatctgtaaagaagcatttgacaaactggatgcccatgtggagagagttgactgtaaagctttacgaggaaaaaggcttgaaaacatacaaaaaaccctagaggtggctttctcagaggcagtgtggatgcagccatctgttgtcctgctggatgaccttgacctcattgctggactgcctgctgtcccggaacatgagcacagtcctgatgcggtgcagagccagcggcttgctcatgctttgaatgatatgataaaagagtttatctccatgggaagtttggttgcactgattgccacaagtcagtctcagcaatctctacatcctttacttgtttctgctcaaggagttcacatatttcagtgcgtccaacacattcagcctcctaatcaggaacaaagatgtgaaattctgtgtaatgtaataaaaaataaattggactgtgatataaacaagttcaccgatcttgacctgcagcatgtagctaaagaaactggagggtttgtggctagagattttacagtacttgtggatcgagccatacattctcgactctctcgtcagagtatatccaccagagaaaaattagttttaacaacattggacttccaaaaggctctccgcggatttcttcctgcgtctttgcgaagtgtcaacctgcataaacctagagacctgggttgggacaagattggtgggttacatgaagttaggcagatactcatggatactatccagttacctgccaagtatccagaattatttgcaaacttgcccatacgacaaagaacaggaatactgttgtatggtccgcctggaacaggaaaaaccttactagctggggtaattgcacgagagagtagaatgaattttataagtgtcaaggggccagagttactcagcaaatacattggagcaagtgaacaagctgttcgggatatttttattagagcacaggctgcaaagccctgcattcttttctttgatgaatttgaatccattgctcctcggcggggtcatgataatacaggagttacagaccgagtagttaaccagttgctgactcagttggatggagtagaaggcttacagggtgtttatgtattggctgctactagtcgccctgacttgattgaccctgccctgcttaggcctggtcgactagataaatgtgtatactgtcctcctcctgatcaggtgtcacgtcttgaaattttaaatgtcctcagtgactctctacctctggcagatgatgttgaccttcagcatgtagcatcagtaactgactcctttactggagctgatctgaaagctttactttacaatgcccaattggaggccttacatggaatgctgctctcgagtggactccaggatggaagttccagctctgatagtgacctaagtctgtcttcaatggtctttcttaaccatagcagtggctctgacgattcagctggagatggagaatgtggcttagatcagtcccttgtttctttagagatgtccgagatccttccagatgaatcaaaattcaatatgtaccggctctactttggaagctcttatgaatcagaacttggaaatggaacctcttctgatttgagctcacaatgtctctctgcaccaagctccatgactcaggatttgcctggagttcctgggaaagaccagttgttttcacagcctccagtgttaaggacagcttcacaagagggttgccaagaacttacacaagaacaaagagatcaactgagggcagatatcagtattatcaaaggcagataccggagccaaagtggagaggacgaatccatgaaccaaccaggaccaatcaaaaccagactggctattagtcagtcacatttaatgactgcacttggtcacacaagaccatccattagtgaagatgactggaagaattttgctgagctatatgaaagctttcaaaatccaaagaggagaaaaaatcaaagtggaacaatgtttcgacctggacagaaagtaactttagcataaaatatacttctttttgatttggttctgttaagttttttgatggcttttccatatgttgtaacaggaaaaaaatggtgtctatgaatttcttcttaatttaacaaatttggttaatttataaaatcacagattggtaaatgctataattatgtaatgatcaggattgagattaatactgtagtataaattgggacattataacagattccatattttatttcctaaaatctaaattcagtctttaatgaaataatattagccaaatggtggaactaatttatttcttttgaggaaaagataataaagaatgtaattaaattta

SEQ ID NO: 370370 - DNA, 4258 bp, Homo sapiens
  misc_feature (4114)..(4114): n is a, c, g, or t
  misc_feature (4123)..(4123): n is a, c, g, or t
  misc_feature (4183)..(4183): n is a, c, g, or t
  misc_feature (4199)..(4199): n is a, c, g, or t
  misc_feature (4215)..(4215): n is a, c, g, or t
  misc_feature (4225)..(4225): n is a, c, g, or t
  misc_feature (4247)..(4247): n is a, c, g, or t
  misc_feature (4250)..(4250): n is a, c, g, or t
cctgccgggtcccgggtcctttgcggcgctagggtgggcgaacccagagcgacgctccgggacgatgtggggcagcgatcgcctggcgggtgctgggggaggcggggcggcagtgactgtggccttcaccaacgctcgcgactgcttcctccacctgccgcggcgtctcgtggcccagctgcatctgctgcagaatcaagctatagaagtggtctggagtcaccagcctgcattcttgagctgggtggaaggcaggcattttagtgatcaaggtgaaaatgtggctgaaattaacagacaagttggtcaaaaacttggactctcaaatgggggacaggtatttctcaagccatgttcccatgtggtatcttgtcaacaagttgaggtggaacccctctcagcagatgattgggagatactggagctgcatgctgtttcccttgaacaacatcttctagatcaaattcgaatagtttttccaaaagccatttttcctgtttgggttgatcaacaaacgtacatatttatccaaattgttgcactaataccagctgcctcttatggaaggctggaaactgacaccaaactccttattcagccaaagacacgccgagccaaagagaatacattttcaaaagctgatgctgaatataaaaaacttcatagttatggaagagaccagaaaggaatgatgaaagaacttcaaaccaagcaacttcagtcaaatactgtgggaatcactgaatctaatgaaaacgagtcagagattccagttgactcatcatcagtagcaagtttatggactatgataggaagcattttttcctttcaatctgagaagaaacaagagacatcttggggtttaactgaaatcaatgcattcaaaaatatgcagtcaaaggttgttcctctagacaatattttcagagtatgcaaatctcaacctcctagtatatataacgcgtcagcaacctctgtttttcataaacactgtgccattcatgtatttccatgggaccaggaatattttgatgtagagcccagctttactgtgacatatggaaagctagttaagctactttctccaaagcaacagcaaagtaaaacaaaacaaaatgtgttatcacctgaaaaagagaagcagatgtcagagccactagatcaaaaaaaaattaggtcagatcataatgaagaagatgagaaggcctgtgtgctacaagtagtctggaatggacttgaagaattgaacaatgccatcaaatataccaaaaatgtagaagttctccatcttgggaaagtctggattccagatgacctgaggaagagactaaatatagaaatgcatgccgtagtcaggataactccagtggaagttacccctaaaattccaagatctctaaagttacaacctagagagaatttacctaaagacataagtgaagaagacataaaaactgtattttattcatggctacagcagtctactaccaccatgcttcctttggtaatatcagaggaagaatttattaagctggaaactaaagatggactgaaggaattttctctgagtatagttcattcttgggaaaaagaaaaagataaaaatatttttctgttgagtcccaatttgctgcagaagactacaatacaagtccttctagatcctatggtaaaagaagaaaacagtgaggaaattgactttattcttccttttttaaagctgagctctttgggaggagtgaattccttaggcgtatcctccttggagcacatcactcacagcctcctgggacgccctttgtctcggcagctgatgtctcttgttgcaggacttaggaatggagctcttttactcacaggaggaaagggaagtggaaaatcaactttagccaaagcaatctgtaaagaagcatttgacaaactggatgcccatgtggagagagttgactgtaaagctttacgaggaaaaaggcttgaaaacatacaaaaaaccctagaggtggctttctcagaggcagtgtggatgcagccatctgttgtcctgctggatgaccttgacctcattgctggactgcctgctgtcccggaacatgagcacagtcctgatgcggtgcagagccagcggcttgctcatgctttgaatgatatgataaaagagtttatctccatgggaagtttggttgcactgattgccacaagtcagtctcagcaatctctacatcctttacttgtttctgctcaaggagttcacatatttcagtgcgtccaacacattcagcctcctaatcaggaacaaagatgtgaaattctgtgtaatgtaataaaaaataaattggactgtgatataaacaagttcaccgatcttgacctgcagcatgtagctaaagaaactggagggtttgtggctagagattttacagtacttgtggatcgagccatacattctcgactctctcgtcagagtatatccaccagagaaaaattagttttaacaacattggacttccaaaaggctctccgcggatttcttcctgcgtctttgcgaagtgtcaacctgcataaacctagagacctgggttgggacaagattggtgggttacatgaagttaggcagatactcatggatactatccagttacctgccaagtatccagaattatttgcaaacttgcccatacgacaaagaacaggaatactgttgtatggtccgcctggaacaggaaaaaccttactagctggggtaattgcacgagagagtagaatgaattttataagtgtcaaggggccagagttactcagcaaatacattggagcaagtgaacaagctgttcgggatatttttattagagcacaggctgcaaagccctgcattcttttctttgatgaatttgaatccattgctcctcggcggggtcatgataatacaggagttacagaccgagtagttaaccagttgctgactcagttggatggagtagaaggcttacagggtgtttatgtattggctgctactagtcgccctgacttgattgaccctgccctgcttaggcctggtcgactagataaatgtgtatactgtcctcctcctgatcaggtgtcacgtcttgaaattttaaatgtcctcagtgactctctacctctggcagatgatgttgaccttcagcatgtagcatcagtaactgactcctttactggagctgatctgaaagctttactttacaatgcccaattggaggccttacatggaatgctgctctcgagtggactccaggatggaagttccagctctgatagtgacctaagtctgtcttcaatggtctttcttaaccatagcagtggctctgacgattcagctggagatggagaatgtggcttagatcagtcccttgtttctttagagatgtccgagatccttccagatgaatcaaaattcaatatgtaccggctctactttggaagctcttatgaatcagaacttggaaatggaacctcttctgatttgagctcacaatgtctctctgcaccaagctccatgactcaggatttgcctggagttcctgggaaagaccagttgttttcacagcctccagtgttaaggacagcttcacaagagggttgccaagaacttacacaagaacaaagagatcaactgagggcagatatcagtattatcaaaggcagataccggagccaaagtggagaggacgaatccatgaaccaaccaggaccaatcaaaaccagactggctattagtcagtcacatttaatgactgcacttggtcacacaagaccatccattagtgaagatgactggaagaattttgctgagctatatgaaagctttcaaaatccaaagaggagaaaaaatcaaagtggaacaatgtttcgacctggacagaaagtaactttagcataaaatatacttctttttgatttggttctgttaagttttttgatggcttttccatatgttgtaacaggaaaaaaatggtgtctatgaatttcttcttaatttaacaaatttggttaatttataaaatcacagattggtaaatgctataattatgtaatgatcaggattgagattaatactgtagtataaattggggaccanttttaacangaattcccttattttttaattttccctaaaaaattttaaaatttcaaggcctttttaatnggaaaaattaaattantttaagccccaaaatngggggggggnaaccctaaaaatttaaattttnccntttttggg

SEQ ID NO: 370371 - DNA, 4650 bp, Homo sapiens
cctgccgggtcccgggtcctttgcggcgctagggtgggcgaacccagagcgacgctccgggacgatgtggggcagcgatcgcctggcgggtgctgggggaggcggggcggcagtgactgtggccttcaccaacgctcgcgactgcttcctccacctgccgcggcgtctcgtggcccagctgcatctgctgcagaatcaagctatagaagtggtctggagtcaccagcctgcattcttgagctgggtggaaggcaggcattttagtgatcaaggtgaaaatgtggctgaaattaacagacaagttggtcaaaaacttggactctcaaatgggggacaggtatttctcaagccatgttcccatgtggtatcttgtcaacaagttgaggtggaacccctctcagcagatgattgggagatactggagctgcatgctgtttcccttgaacaacatcttctagatcaaattcgaatagtttttccaaaagccatttttcctgtttgggttgatcaacaaacgtacatatttatccaaattgttgcactaataccagctgcctcttatggaaggctggaaactgacaccaaactccttattcagccaaagacacgccgagccaaagagaatacattttcaaaagctgatgctgaatataaaaaacttcatagttatggaagagaccagaaaggaatgatgaaagaacttcaaaccaagcaacttcagtcaaatactgtgggaatcactgaatctaatgaaaacgagtcagagattccagttgactcatcatcagtagcaagtttatggactatgataggaagcattttttcctttcaatctgagaagaaacaagagacatcttggggtttaactgaaatcaatgcattcaaaaatatgcagtcaaaggttgttcctctagacaatattttcagagtatgcaaatctcaacctcctagtatatataacgcgtcagcaacctctgtttttcataaacactgtgccattcatgtatttccatgggaccaggaatattttgatgtagagcccagctttactgtgacatatggaaagctagttaagctactttctccaaagcaacagcaaagtaaaacaaaacaaaatgtgttatcacctgaaaaagagaagcagatgtcagagccactagatcaaaaaaaaattaggtcagatcataatgaagaagatgagaaggcctgtgtgctacaagtagtctggaatggacttgaagaattgaacaatgccatcaaatataccaaaaatgtagaagttctccatcttgggaaagtctggattccagatgacctgaggaagagactaaatatagaaatgcatgccgtagtcaggataactccagtggaagttacccctaaaattccaagatctctaaagttacaacctagagagaatttacctaaagacataagtgaagaagacataaaaactgtattttattcatggctacagcagtctactaccaccatgcttcctttggtaatatcagaggaagaatttattaagctggaaactaaagatggactgaaggaattttctctgagtatagttcattcttgggaaaaagaaaaagataaaaatatttttctgttgagtcccaatttgctgcagaagactacaatacaagtccttctagatcctatggtaaaagaagaaaacagtgaggaaattgactttattcttccttttttaaagctgagctctttgggaggagtgaattccttaggcgtatcctccttggagcacatcactcacagcctcctgggacgccctttgtctcggcagctgatgtctcttgttgcaggacttaggaatggagctcttttactcacaggaggaaagggaagtggaaaatcaactttagccaaagcaatctgtaaagaagcatttgacaaactggatgcccatgtggagagagttgactgtaaagctttacgaggaaaaaggcttgaaaacatacaaaaaaccctagaggtggctttctcagaggcagtgtggatgcagccatctgttgtcctgctggatgaccttgacctcattgctggactgcctgctgtcccggaacatgagcacagtcctgatgcggtgcagagccagcggcttgctcatgctttgaatgatatgataaaagagtttatctccatgggaagtttggttgcactgattgccacaagtcagtctcagcaatctctacatcctttacttgtttctgctcaaggagttcacatatttcagtgcgtccaacacattcagcctcctaatcaggaacaaagatgtgaaattctgtgtaatgtaataaaaaataaattggactgtgatataaacaagttcaccgatcttgacctgcagcatgtagctaaagaaactggagggtttgtggctagagattttacagtacttgtggatcgagccatacattctcgactctctcgtcagagtatatccaccagagaaaaattagttttaacaacattggacttccaaaaggctctccgcggatttcttcctgcgtctttgcgaagtgtcaacctgcataaacctagagacctgggttgggacaagattggtgggttacatgaagttaggcagatactcatggatactatccagttacctgccaagtatccagaattatttgcaaacttgcccatacgacaaagaacaggaatactgttgtatggtccgcctggaacaggaaaaaccttactagctggggtaattgcacgagagagtagaatgaattttataagtgtcaaggggccagagttactcagcaaatacattggagcaagtgaacaagctgttcgggatatttttattagagcacaggctgcaaagccctgcattcttttctttgatgaatttgaatccattgctcctcggcggggtcatgataatacaggagttacagaccgagtagttaaccagttgctgactcagttggatggagtagaaggcttacagggtgtttatgtattggctgctactagtcgccctgacttgattgaccctgccctgcttaggcctggtcgactagataaatgtgtatactgtcctcctcctgatcaggtgtcacgtcttgaaattttaaatgtcctcagtgactctctacctctggcagatgatgttgaccttcagcatgtagcatcagtaactgactcctttactggagctgatctgaaagctttactttacaatgcccaattggaggccttacatggaatgctgctctcgagtggactccaggatggaagttccagctctgatagtgacctaagtctgtcttcaatggtctttcttaaccatagcagtggctctgacgattcagctggagatggagaatgtggcttagatcagtcccttgtttctttagagatgtccgagatccttccagatgaatcaaaattcaatatgtaccggctctactttggaagctcttatgaatcagaacttggaaatggaacctcttctgatttgagctcacaatgtctctctgcaccaagctccatgactcaggatttgcctggagttcctgggaaagaccagttgttttcacagcctccagtgttaaggacagcttcacaagagggttgccaagaacttacacaagaacaaagagatcaactgagggcagatatcagtattatcaaaggcagataccggagccaaagtggagtatggctttttccccctcattataattgttaaaacttcttaaaaattgtttcacccttttgatatatatttctttgacttataaacgagctatatttataaacaagggaccagaacacattaactcagtcatggttatgtgcttccttgctttcaatgtttcattatcttataaggaagagaacgtatggtctcttgaaaaaactgacaataagaagtaacaactggactaccacatttttttttacatccttaatttaactcttcgtcaatttctttttttacttaaggaggacgaatccatgaaccaaccaggaccaatcaaaaccagactggctattagtcagtcacatttaatgactgcacttggtcacacaagaccatccattagtgaagatgactggaagaattttgctgagctatatgaaagctttcaaaatccaaagaggagaaaaaatcaaagtggaacaatgtttcgacctggacagaaagtaactttagcataaaatatacttctttttgatttggttctgttaagttttttgatggcttttccatatgttgtaacaggaaaaaaatggtgtctatgaatttcttcttaatttaacaaatttggttaatttataaaatcacagattggtaaatgctataattatgtaatgatcaggattgagattaatactgtagtataaattgggacattataacagattccatattttatttcctaaaatctaaattcagtctttaatgaaataatattagccaaatggtggaactaatttatttcttttgaggaaaagataataaagaatgtaattaaatttaaatttcttggaattcccagttgtatattcatcacctttgtagcatttgacaaattttatgcttagcagcttcttcactgttttgaaataaaatatcctattacctactgataaaaaaaaaaa

SEQ ID NO: 370372 - DNA, 1520 bp, Homo sapiens
ggattacaggcgtgagccaccatgcccagccttaagagtgtttgattttcattcattttcctatatatattatttctgttggggaaaaaattccaaggaagataaatagtaggctgttggtacatttctcaacttacttataaagctttttagatatataaggttaatttatgaagaaaatcataagatacacaatttaagataatatttttaattttattttttatttgttaaataaatttttctcctttcaggtgtcacgtcttgaaattttaaatgtcctcagtgactctctacctctggcagatgatgttgaccttcagcatgtagcatcagtaactgactcctttactggagctgatctgaaagctttactttacaatgcccaattggaggccttacatggaatgctgctctcgagtggactccaggatggaagttccagctctgatagtgacctaagtctgtcttcaatggtctttcttaaccatagcagtggctctgacgattcagctggagatggagaatgtggcttagatcagtcccttgtttctttagagatgtccgagatccttccagatgaatcaaaattcaatatgtaccggctctactttggaagctcttatgaatcagaacttggaaatggaacctcttctgatttgagctcacaatgtctctctgcaccaagctccatgactcaggatttgcctggagttcctgggaaagaccagttgttttcacagcctccagtgttaaggacagcttcacaagagggttgccaagaacttacacaagaacaaagagatcaactgagggcagatatcagtattatcaaaggcagataccggagccaaagtggagaggacgaatccatgaaccaaccaggaccaatcaaaaccagactggctattagtcagtcacatttaatgactgcacttggtcacacaagaccatccattagtgaagatgactggaagaattttgctgagctatatgaaagctttcaaaatccaaagaggagaaaaaatcaaagtggaacaatgtttcgacctggacagaaagtaactttagcataaaatatacttctttttgatttggttctgttaagttttttgatggcttttccatatgttgtaacaggaaaaaaatggtgtctatgaatttcttcttaatttaacaaatttggttaatttataaaatcacagattggtaaatgctataattatgtaatgatcaggattgagattaatactgtagtataaattgggacattataacagattccatattttatttcctaaaatctaaattcagtctttaatgaaataatattagccaaatggtggaactaatttatttcttttgaggaaaagataataaagaatgtaattaaatttaaatttcttggaattcccagttgtatattcatcacctttgtagcatttgacaaattttatgcttagcagcttcttcactgttttgaaataaaatatcctattacctactgataaaaaaaaaaa

SEQ ID NO: 370373 - DNA, 3412 bp, Homo sapiens
cctgccgggtcccgggtcctttgcggcgctagggtgggcgaacccagagcgacgctccgggacgatgtggggcagcgatcgcctggcgggtgctgggggaggcggggcggcagtgactgtggccttcaccaacgctcgcgactgcttcctccacctgccgcggcgtctcgtggcccagctgcatctgctgcagaatcaagctatagaagtggtctggagtcaccagcctgcattcttgagctgggtggaaggcaggcattttagtgatcaaggtgaaaatgtggctgaaattaacagacaagttggtcaaaaacttggactctcaaatgggggacaggtatttctcaagccatgttcccatgtggtatcttgtcaacaagttgaggtggaacccctctcagcagatgattgggagatactggagctgcatgctgtttcccttgaacaacatcttctagatcaaattcgaatagtttttccaaaagccatttttcctgtttgggttgatcaacaaacgtacatatttatccaaattgttgcactaataccagctgcctcttatggaaggctggaaactgacaccaaactccttattcagccaaagacacgccgagccaaagagaatacattttcaaaagctgatgctgaatataaaaaacttcatagttatggaagagaccagaaaggaatgatgaaagaacttcaaaccaagcaacttcagtcaaatactgtgggaatcactgaatctaatgaaaacgagtcagagattccagttgactcatcatcagtagcaagtttatggactatgataggaagcattttttcctttcaatctgagaagaaacaagagacatcttggggtttaactgaaatcaatgcattcaaaaatatgcagtcaaaggttgttcctctagacaatattttcagagtatgcaaatctcaacctcctagtatatataacgcgtcagcaacctctgtttttcataaacactgtgccattcatgtatttccatgggaccaggaatattttgatgtagagcccagctttactgtgacatatggaaagctagttaagctactttctccaaagcaacagcaaagtaaaacaaaacaaaatgtgttatcacctgaaaaagagaagcagatgtcagagccactagatcaaaaaaaaattaggtcagatcataatgaagaagatgagaaggcctgtgtgctacaagtagtctggaatggacttgaagaattgaacaatgccatcaaatataccaaaaatgtagaagttctccatcttgggaaagtctggattccagatgacctgaggaagagactaaatatagaaatgcatgccgtagtcaggataactccagtggaagttacccctaaaattccaagatctctaaagttacaacctagagagaatttacctaaagacataagtgaagaagacataaaaactgtattttattcatggctacagcagtctactaccaccatgcttcctttggtaatatcagaggaagaatttattaagctggaaactaaagatggactgaaggaattttctctgagtatagttcattcttgggaaaaagaaaaagataaaaatatttttctgttgagtcccaatttgctgcagaagactacaatacaagtccttctagatcctatggtaaaagaagaaaacagtgaggaaattgactttattcttccttttttaaagctgagctctttgggaggagtgaattccttaggcgtatcctccttggagcacatcactcacagcctcctgggacgccctttgtctcggcagctgatgtctcttgttgcaggacttaggaatggagctcttttactcacaggaggaaagggaagtggaaaatcaactttagccaaagcaatctgtaaagaagcatttgacaaactggatgcccatgtggagagagttgactgtaaagctttacgaggaaaaaggcttgaaaacatacaaaaaaccctagaggtggctttctcagaggcagtgtggatgcagccatctgttgtcctgctggatgaccttgacctcattgctggactgcctgctgtcccggaacatgagcacagtcctgatgcggtgcagagccagcggcttgctcatgctttgaatgatatgataaaagagtttatctccatgggaagtttggttgcactgattgccacaagtcagtctcagcaatctctacatcctttacttgtttctgctcaaggagttcacatatttcagtgcgtccaacacattcagcctcctaatcaggaacaaagatgtgaaattctgtgtaatgtaataaaaaataaattggactgtgatataaacaagttcaccgatcttgacctgcagcatgtagctaaagaaactggagggtttgtggctagagattttacagtacttgtggatcgagccatacattctcgactctctcgtcagagtatatccaccagagaaaaattagttttaacaacattggacttccaaaaggctctccgcggatttcttcctgcgtctttgcgaagtgtcaacctgcataaacctagagacctgggttgggacaagattggtgggttacatgaagttaggcagatactcatggatactatccagttacctgccaagtatccagaattatttgcaaacttgcccatacgacaaagaacaggaatactgttgtatggtccgcctggaacaggaaaaaccttactagctggggtaattgcacgagagagtagaatgaattttataagtgtcaaggggccagagttactcagcaaatacattggagcaagtgaacaagctgttcgggatatttttattagagcacaggctgcaaagccctgcattcttttctttgatgaatttgaatccattgctcctcggcggggtcatgataatacaggagttacagaccgagtagttaaccagttgctgactcagttggatggagtagaaggcttacagggtgtttatgtattggctgctactagtcgccctgacttgattgaccctgccctgcttaggcctggtcgactagataaatgtgtatactgtcctcctcctgatcaggtgacaatttcatatttagagtccaaaacccaacaaatgctacactctttccttgtgagctttacttctgccaggtaatggcaattgtccttagaagaccagctttcttagggaaaagctttagccactgtttgctcaaagcataaaaagattctgaattagatgcaaagcctttttttggcccagtgcaagtctgaaaactttgtaatccttctgtgttggctgattggggaaaaaaaaaaatgcaagaaacctaatgtattatattttcacattatcttctgttcaaagattacatacttccattatcctgtcaaa

SEQ ID NO: 370374 - DNA, 3549 bp, Homo sapiens
cctgccgggtcccgggtcctttgcggcgctagggtgggcgaacccagagcgacgctccgggacgatgtggggcagcgatcgcctggcgggtgctgggggaggcggggcggcagtgactgtggccttcaccaacgctcgcgactgcttcctccacctgccgcggcgtctcgtggcccagctgcatctgctgcagaatcaagctatagaagtggtctggagtcaccagcctgcattcttgagctgggtggaaggcaggcattttagtgatcaaggtgaaaatgtggctgaaattaacagacaagttggtcaaaaacttggactctcaaatgggggacaggtatttctcaagccatgttcccatgtggtatcttgtcaacaagttgaggtggaacccctctcagcagatgattgggagatactggagctgcatgctgtttcccttgaacaacatcttctagatcaaattcgaatagtttttccaaaagccatttttcctgtttgggttgatcaacaaacgtacatatttatccaaattgttgcactaataccagctgcctcttatggaaggctggaaactgacaccaaactccttattcagccaaagacacgccgagccaaagagaatacattttcaaaagctgatgctgaatataaaaaacttcatagttatggaagagaccagaaaggaatgatgaaagaacttcaaaccaagcaacttcagtcaaatactgtgggaatcactgaatctaatgaaaacgagtcagagattccagttgactcatcatcagtagcaagtttatggactatgataggaagcattttttcctttcaatctgagaagaaacaagagacatcttggggtttaactgaaatcaatgcattcaaaaatatgcagtcaaaggttgttcctctagacaatattttcagagtatgcaaatctcaacctcctagtatatataacgcgtcagcaacctctgtttttcataaacactgtgccattcatgtatttccatgggaccaggaatattttgatgtagagcccagctttactgtgacatatggaaagctagttaagctactttctccaaagcaacagcaaagtaaaacaaaacaaaatgtgttatcacctgaaaaagagaagcagatgtcagagccactagatcaaaaaaaaattaggtcagatcataatgaagaagatgagaaggcctgtgtgctacaagtagtctggaatggacttgaagaattgaacaatgccatcaaatataccaaaaatgtagaagttctccatcttgggaaagtctggattccagatgacctgaggaagagactaaatatagaaatgcatgccgtagtcaggataactccagtggaagttacccctaaaattccaagatctctaaagttacaacctagagagaatttacctaaagacataagtgaagaagacataaaaactgtattttattcatggctacagcagtctactaccaccatgcttcctttggtaatatcagaggaagaatttattaagctggaaactaaagatggactgaaggaattttctctgagtatagttcattcttgggaaaaagaaaaagataaaaatatttttctgttgagtcccaatttgctgcagaagactacaatacaagtccttctagatcctatggtaaaagaagaaaacagtgaggaaattgactttattcttccttttttaaagctgagctctttgggaggagtgaattccttaggcgtatcctccttggagcacatcactcacagcctcctgggacgccctttgtctcggcagctgatgtctcttgttgcaggacttaggaatggagctcttttactcacaggaggaaagggaagtggaaaatcaactttagccaaagcaatctgtaaagaagcatttgacaaactggatgcccatgtggagagagttgactgtaaagctttacgaggaaaaaggcttgaaaacatacaaaaaaccctagaggtggctttctcagaggcagtgtggatgcagccatctgttgtcctgctggatgaccttgacctcattgctggactgcctgctgtcccggaacatgagcacagtcctgatgcggtgcagagccagcggcttgctcatgctttgaatgatatgataaaagagtttatctccatgggaagtttggttgcactgattgccacaagtcagtctcagcaatctctacatcctttacttgtttctgctcaaggagttcacatatttcagtgcgtccaacacattcagcctcctaatcaggaacaaagatgtgaaattctgtgtaatgtaataaaaaataaattggactgtgatataaacaagttcaccgatcttgacctgcagcatgtagctaaagaaactggagggtttgtggctagagattttacagtacttgtggatcgagccatacattctcgactctctcgtcagagtatatccaccagagaaaaattagttttaacaacattggacttccaaaaggctctccgcggatttcttcctgcgtctttgcgaagtgtcaacctgcataaacctagagacctgggttgggacaagattggtgggttacatgaagttaggcagatactcatggatactatccagttacctgccaagtatccagaattatttgcaaacttgcccatacgacaaagaacaggaatactgttgtatggtccgcctggaacaggaaaaaccttactagctggggtaattgcacgagagagtagaatgaattttataagtgtcaaggggccagagttactcagcaaatacattggagcaagtgaacaagctgttcgggatatttttattagagcacaggctgcaaagccctgcattcttttctttgatgaatttgaatccattgctcctcggcggggtcatgataatacaggagttacagaccgagtagttaaccagttgctgactcagttggatggagtagaaggcttacagggtgtttatgtattggctgctactagtcgccctgacttgattgaccctgccctgcttaggcctggtcgactagataaatgtgtatactgtcctcctcctgatcaggtgtcacgtcttgaaattttaaatgtcctcagtgactctctacctctggcagatgatgttgaccttcagcatgtagcatcagtaactgactcctttactggagctgatctgaaagctttactttacaatgcccaattggaggccttacatggaatgctgctctcgagtggactccaggcaagttatatgaggaagttgttatgacattttatgagtgataaaagaagtacaatgtcaaaatttccaccttaaaaaatgctattttttaaacaactttggtaaaactgtatagaaacataaatttacctttagttgaatgttccatagttggaatatgggttttgcagagaatttataattatgaagtttgatgtctgtttctttaacattaccttaatattggcaaaaacatgttggtgtttgcaaggatattatttaaattgggataccatgaa

SEQ ID NO: 370375 - DNA, 2540 bp, Homo sapiens
  misc_feature (2486)..(2486): n is a, c, g, or t
  misc_feature (2499)..(2499): n is a, c, g, or t
  misc_feature (2535)..(2535): n is a, c, g, or t
cctgccgggtcccgggtcctttgcggcgctagggtgggcgaacccagagcgacgctccgggacgatgtggggcagcgatcgcctggcgggtgctgggggaggcggggcggcagtgactgtggccttcaccaacgctcgcgactgcttcctccacctgccgcggcgtctcgtggcccagctgcatctgctgcagaatcaagctatagaagtggtctggagtcaccagcctgcattcttgagctgggtggaaggcaggcattttagtgatcaaggtgaaaatgtggctgaaattaacagacaagttggtcaaaaacttggactctcaaatgggggacaggtatttctcaagccatgttcccatgtggtatcttgtcaacaagttgaggtggaacccctctcagcagatgattgggagatactggagctgcatgctgtttcccttgaacaacatcttctagatcaaattcgaatagtttttccaaaagccatttttcctgtttgggttgatcaacaaacgtacatatttatccaaattgttgcactaataccagctgcctcttatggaaggctggaaactgacaccaaactccttattcagccaaagacacgccgagccaaagagaatacattttcaaaagctgatgctgaatataaaaaacttcatagttatggaagagaccagaaaggaatgatgaaagaacttcaaaccaagcaacttcagtcaaatactgtgggaatcactgaatctaatgaaaacgagtcagagattccagttgactcatcatcagtagcaagtttatggactatgataggaagcattttttcctttcaatctgagaagaaacaagagacatcttggggtttaactgaaatcaatgcattcaaaaatatgcagtcaaaggttgttcctctagacaatattttcagagtatgcaaatctcaacctcctagtatatataacgcgtcagcaacctctgtttttcataaacactgtgccattcatgtatttccatgggaccaggaatattttgatgtagagcccagctttactgtgacatatggaaagctagttaagctactttctccaaagcaacagcaaagtaaaacaaaacaaaatgtgttatcacctgaaaaagagaagcagatgtcagagccactagatcaaaaaaaaattaggtcagatcataatgaagaagatgagaaggcctgtgtgctacaagtagtctggaatggacttgaagaattgaacaatgccatcaaatataccaaaaatgtagaagttctccatcttgggaaagtctggattccagatgacctgaggaagagactaaatatagaaatgcatgccgtagtcaggataactccagtggaagttacccctaaaattccaagatctctaaagttacaacctagagagaatttacctaaagacataagtgaagaagacataaaaactgtattttattcatggctacagcagtctactaccaccatgcttcctttggtaatatcagaggaagaatttattaagctggaaactaaagatggactgaaggaattttctctgagtatagttcattcttgggaaaaagaaaaagataaaaatatttttctgttgagtcccaatttgctgcagaagactacaatacaagtccttctagatcctatggtaaaagaagaaaacagtgaggaaattgactttattcttccttttttaaagctgagctctttgggaggagtgaattccttaggcgtatcctccttggagcacatcactcacagcctcctgggacgccctttgtctcggcagctgatgtctcttgttgcaggacttaggaatggagctcttttactcacaggaggaaagggaagtggaaaatcaactttagccaaagcaatctgtaaagaagcatttgacaaactggatgcccatgtggagagagttgactgtaaagctttacgaggaaaaaggcttgaaaacatacaaaaaaccctagaggtggctttctcagaggcagtgtggatgcagccatctgttgtcctgctggatgaccttgacctcattgctggactgcctgctgtcccggaacatgagcacagtcctgatgcggtgcagagccagcggcttgctcatgctttgaatgatatgataaaagagtttatctccatgggaagtttggttgcactgattgccacaagtcagtctcagcaatctctacatcctttacttgtttctgctcaaggagttcacatatttcagtgcgtccaacacattcagcctcctaatcaggaacaaagatgtgaaattctgtgtaatgtaataaaaaataaattggactgtgatataaacaagttcaccgatcttgacctgcagcatgtagctaaagaaactggagggtttgtggctagagattttacagtacttgtggatcgagccatacattctcgactctctcgtcagagtatatccaccagagaaaaaattnatttttaaaaacntttggaatttcccaaaaaggggcccccccggaattncttcc

SEQ ID NO: 370376 - DNA, 360 bp, Homo sapiens
agtaatatatagatacatgggtgatacaaatgtttggggccttgtagataatgtagaaacagcatgcaacctcaccgctcttgctccacggagtccaagtgtctgaaaagttgataatacatcaaattagaactgacttggtagaccagggaaatgagatagctggtaggacactgtcatcacttgctataatgagtgacctacttttgatcctatgtcaacttcagtgactaggtgaaaagctactgaattgtgtcctcatctcaaatgtatttttaaattagtttgtgctgtggtacttctgattaattttaaaatggagcttgtctctaggccagtgacccttaagtctgttatgtg

SEQ ID NO: 370377 - DNA, 335 bp, Homo sapiens
ctgttgagagctgctgctcaggaaaaaatattcctttcaaaatagttttgttctatgacaatgcacctggtcgtccaagggttctgatggagatgtacaaggagattaatgttttcatgcctgctaacataatatccatactgaaactctttattatttaaggaatacattttataaggctatagctgccatagatagtgattcttctgatgaaccggggacaagtaaattaaaaacctttagaaaaccttctccatcaggatttgttgcttttgaaatctgggtcaagtaaattaaaaaccttctagatgccattgggaacatttgtgattcat

SEQ ID NO: 370378 - DNA, 452 bp, Homo sapiens
agttaaaaagaatttaatgaaatgagctcctacaaagggaagaaggagaaaggaactaactagggaagatgaagcaagcacacaggaactaaccccaacaaaaagccattactaccttttggtctaaagaatcatgaggagggaggctgctgccggaatccagcaagagctatcgccatgttggaggggatcccgggtaagagctacagccttgtaggaagtcataacctctgcaaaacaatgccacaacagacaggattggaagacagaaggatataggtaccctgggctctctcctcttaccttcagatttcttgctggtaattattactgaaaccctggaagtcagaagctaaggaaacccaggtgatgaagttcatagtgttcttcctcttggggcaaaagaaggcaagagactaatgaagaggggaactgaagagaataaaaaaaaa

SEQ ID NO: 370379 - DNA, 155 bp, Homo sapiens
caaatgctggggttacaggcgtgagccactgtgcccagccgcagagttcatcttgagaccctgacttctgccagctctgatcctagtgggtggggctctggggctcagtgaaacagtcagccgttttgcttcagagaacacaaataagattttgg

SEQ ID NO: 370380 - DNA, 4143 bp, Homo sapiens
  misc_feature (246)..(246): n is a, c, g, or t
  misc_feature (1120)..(1120): n is a, c, g, or t
  misc_feature (3870)..(3870): n is a, c, g, or t
cagcagctggcctgggagggagaaggggctggagagggcctggcctctccgagggatggaggggacagaggcggcggcggccaaacccgcgggcggcagcccccaagggcccaagacagggagtggaacagccagccccgtggaggggacctcagctgtggagtggagtggtcctgagccacagctggataacggacaccccccaagaccctggccttgccctcaggaaaacagaacatccagccngatggccccccagcctcccagggtatggggagtacagctccagggcccctctgtgctggaatccaaggtgagggctttgaaggagaagatgacagtggccaaacagggagtgagtccctgctctgcttcccaagagtggtcatcccccaagaaaccccaatgcagacgaggcaaggcagggagagccgggactccatcagaggggtctttcctgccaggtgctgtggtggctcctcgtacccaaaacctgcctgatgggcagctggacggcagcatcaatgaggagcaacccgccagggatggaggccccaggcttcccaggccgcctgcccctggacgtgagtactgcaacagggggagcccgtggcctccagaagccgaatggacacttcctgaccatgacagaggtccgctgctggggcccagctctttgcaacagagcccgatccatggagttactcccggacggcctgggggtcctggtcattgtaacaaaatcatccacattcccagcccaaggacaggaaggtcctacccttttccagatggcgtggtgacagaggcagatctggatagcacatccctgacctccgaggaggtctttgtccccaggacggccctgctgggtgagcgctggagagctggagacctggaggctctgggcgctgggagcagtgtcttgtccctgtctgatcgggtggagagaaaccgcctgttgctgcaggagatgctcaacgtttctgggcagagcccccgcaaggtgggaacccctgcctggactccatcctgggacacagctgcaccagagcgaccagtgggggatgtggactgggcctcgggcacctccttgcaggactccggccagaacaggacngttggtcccaacccggagcctgtgctgagccccaggcatgaggaagccacgcatctgctgcagcgtgcccgcatgaaggccaggacccggcccctccgtgccagccatgacatcgtgcccaccattacccagggcagccgagatggccacagaagcccagcccgggaccccaggacgacccctgcctgcagagacagcctccagaacgggcacacgagcgattcctccagcggagagtccagcggtgggcacaggccgaggcggggcccctcgccgtcgcacgtgcgctttgaggatgagtccgcccgcgaagccgagttccgtcacctggagcggctgcagcagcgccagcgccaggtgctgagcaccgtgttgcaggccgcggaccagggccccctgcgctccaagcccgacctcgccgactacatcaacggggctccccggctccgggacgcggggcaggggacattccacaggcttgtgggcagcctggaccgcaggggacacccggcaccgccggcaccgggcagcgagaggaggtgccaggcctgcggcagctgcatcgacgacccgcgccccgcccaggggaaggcgccccccgtccccaggaccctccaggagctccaggctgcctgtgggatggagagggtgctgggtggcctgagctccccactccggctccttcctgcagagccccggctccacatggaatggatccgggaaacacacatcggagacaccgtgtgccctgcggaggtggactctgccctggacagcacagacaactctgacaactgcaggaccgacagtgaggaggcggggacctctcaggctggctgggcgtgtgggcggacccaaggcagcagcccgcgactgcgactgcggggctccaggcctcgaggccacaggtggtccaagaaggctgaggcggagctcccttggggccttcaggcccagcaacacctgcctagggctgatgatgtggaggtggaaaatgaggtgaaagagggcagaggacacacgcctgaaggaactctatttttgagagaagatgccaagcctcctgacctggagttgaagcgggtgtccctgggaccccagtggcagcctggaccagggctgggaagtcaccagcctcaccctttggattcccggactccatgcaggacagcctatgccaccaccgcccccatgacgcctgaatcatcggggccaggaggccaggcccaggttacagaaagccacgagtccctggaaattgtctctccttcctccctgcaacagagccatgcagagccttctgccccacaccaagcctggcagccaacagcttccttgtgtcctgaaggctgggcgccaacccctcccccttcgaggaaaaccacctcgccagtgtctcacaggaaggcagccctggctggactgctcaggctgggtgaccagacagagcctgtgggtatccctcggcctccttcaagaagcgcggttctcaggacctgtgagctgcccccatcacagacccagcccagccgccctcaggtcaggcacccactgctggccctgtccaccaacaactgcaacaacagcgcacctcgggggctgcaggagccctacgggggagccgtccacgagggtagggtggagaggggcccctgcagccgggaaccggagccgcccctggagaacagcagagatggaggaccccagggctttcttggctcagcagatgttgccaccatcaactccacgggcatcaccctctccctgtcctcagaggagtcagagtccagcaaggaatcagagggaagcctgcagaggacagggtcaggatctggaggacatgtgctgtcaagagcatcagcaggagctggcacaggacccggctccccctcggctgcccctttggaccagaacaagaaaaggagcagcagcatagcctccaccctggggctgaaaaagctcttctcagccctgggccagagttcccggcccaagctgggcaagtcccgcagctacagtgtggagcagttgcagcccgccccgcctggcctgacgtcacagtccagggccccatcgttacaatccctgcacccggtgtcaccctctcaccagcgtcggaaagctgcctcttttcagaacctccattctctgctgagcagcaagggggaccggtccagcctctacctggtagcagggccaggggaccacagtgcagctggcaggccggccaagacttcaccacggcgtgccctcagtgtggaggacgtgggtgctcccagcctggctcgcaccgtgggccgcctggtggaggtgttcccagacggcaccagccagctgcagctgcagcgctccccagggggcactttcggcttctgcgtggcctctgggaatgggcgcccagactcaggtatgccctctcctcttcctcagccccatggctggggcggccttagcaaacaaggcagggccttctggctgtggtcagaggcttttctggtctttggctgagccgtgcagctctgggaattcagaaagcctctgactacaggactaggcttctcccctcaggggctctttctgaattgtccagggctctctaggagtctgcacctgcagagcctttgccctaggcaactgcagctgagagtgcgttggtggggagtgtgcgggagggggtagagttggcaggtttgactccactgtccccctgctgtctgatgacatcttgaaattagaagcttaggccgggngcagtggctcatgcctgtaatcccagaactttgggaggccgaggcgcctggatcacctgaggtcaggagttcgagaccagtctggcccacatggtgaaacccatgtctactaaaaatacaaaattagctgggcgtggtggcgcatgcctataatcccagctacttgggaggctgaggcaggagaattgcttgaacccgggaggtagaggttgcagtgagccgagattgcgccattgcactccagcctgggcaacaagagcaaaacttcatctc

SEQ ID NO: 370381 - DNA, 4130 bp, Homo sapiens
  misc_feature (246)..(246): n is a, c, g, or t
  misc_feature (1120)..(1120): n is a, c, g, or t
cagcagctggcctgggagggagaaggggctggagagggcctggcctctccgagggatggaggggacagaggcggcggcggccaaacccgcgggcggcagcccccaagggcccaagacagggagtggaacagccagccccgtggaggggacctcagctgtggagtggagtggtcctgagccacagctggataacggacaccccccaagaccctggccttgccctcaggaaaacagaacatccagccngatggccccccagcctcccagggtatggggagtacagctccagggcccctctgtgctggaatccaaggtgagggctttgaaggagaagatgacagtggccaaacagggagtgagtccctgctctgcttcccaagagtggtcatcccccaagaaaccccaatgcagacgaggcaaggcagggagagccgggactccatcagaggggtctttcctgccaggtgctgtggtggctcctcgtacccaaaacctgcctgatgggcagctggacggcagcatcaatgaggagcaacccgccagggatggaggccccaggcttcccaggccgcctgcccctggacgtgagtactgcaacagggggagcccgtggcctccagaagccgaatggacacttcctgaccatgacagaggtccgctgctggggcccagctctttgcaacagagcccgatccatggagttactcccggacggcctgggggtcctggtcattgtaacaaaatcatccacattcccagcccaaggacaggaaggtcctacccttttccagatggcgtggtgacagaggcagatctggatagcacatccctgacctccgaggaggtctttgtccccaggacggccctgctgggtgagcgctggagagctggagacctggaggctctgggcgctgggagcagtgtcttgtccctgtctgatcgggtggagagaaaccgcctgttgctgcaggagatgctcaacgtttctgggcagagcccccgcaaggtgggaacccctgcctggactccatcctgggacacagctgcaccagagcgaccagtgggggatgtggactgggcctcgggcacctccttgcaggactccggccagaacaggacngttggtcccaacccggagcctgtgctgagccccaggcatgaggaagccacgcatctgctgcagcgtgcccgcatgaaggccaggacccggcccctccgtgccagccatgacatcgtgcccaccattacccagggcagccgagatggccacagaagcccagcccgggaccccaggacgacccctgcctgcagagacagcctccagaacgggcacacgagcgattcctccagcggagagtccagcggtgggcacaggccgaggcggggcccctcgccgtcgcacgtgcgctttgaggatgagtccgcccgcgaagccgagttccgtcacctggagcggctgcagcagcgccagcgccaggtgctgagcaccgtgttgcaggccgcggaccagggccccctgcgctccaagcccgacctcgccgactacatcaacggggctccccggctccgggacgcggggcaggggacattccacaggcttgtgggcagcctggaccgcaggggacacccggcaccgccggcaccgggcagcgagaggaggtgccaggcctgcggcagctgcatcgacgacccgcgccccgcccaggggaaggcgccccccgtccccaggaccctccaggagctccaggctgcctgtgggatggagagggtgctgggtggcctgagctccccactccggctccttcctgcagagccccggctccacatggaatggatccgggaaacacacatcggagacaccgtgtgccctgcggaggtggactctgccctggacagcacagacaactctgacaactgcaggaccgacagtgaggaggcggggacctctcaggctggctgggcgtgtgggcggacccaaggcagcagcccgcgactgcgactgcggggctccaggcctcgaggccacaggtggtccaagaaggctgaggcggagctcccttggggccttcaggcccagcaacacctgcctagggctgatgatgtggaggtggaaaatgaggtgaaagagggcagaggacacacgcctgaaggaactctatttttgagagaagatgccaagcctcctgacctggagttgaagcgggtgtccctgggaccccagtggcagcctggaccagggctgggaagtcaccagcctcaccctttggattcccggactccatgcaggacagcctatgccaccaccgcccccatgacgcctgaatcatcggggccaggaggccaggcccaggttacagaaagccacgagtccctggaaattgtctctccttcctccctgcaacagagccatgcagagccttctgccccacaccaagcctggcagccaacagcttccttgtgtcctgaaggctgggcgccaacccctcccccttcgaggaaaaccacctcgccagtgtctcacaggaaggcagccctggctggactgctcaggctgggtgaccagacagagcctgtgggtatccctcggcctccttcaagaagcgcggttctcaggacctgtgagctgcccccatcacagacccagcccagccgccctcaggtcaggcacccactgctggccctgtccaccaacaactgcaacaacagcgcacctcgggggctgcaggagccctacgggggagccgtccacgagggtagggtggagaggggcccctgcagccgggaaccggagccgcccctggagaacagcagagatggaggaccccagggctttcttggctcagcagatgttgccaccatcaactccacgggcatcaccctctccctgtcctcagaggagtcagagtccagcaaggaatcagagggaagcctgcagaggacagggtcaggatctggaggacatgtgctgtcaagagcatcagcaggagctggcacaggacccggctccccctcggctgcccctttggaccagaacaagaaaaggagcagcagcatagcctccaccctggggctgaaaaagctcttctcagccctgggccagagttcccggcccaagctgggcaagtcccgcagctacagtgtggagcagttgcagcccgccccgcctggcctgacgtcacagtccagggccccatcgttacaatccctgcacccggtgtcaccctctcaccagcgtcggaaagctgcctcttttcagaacctccattctctgctgagcagcaagggggaccggtccagcctctacctggtagcagggccaggggaccacagtgcagctggcaggccggccaagacttcaccacggcgtgccctcagtgtggaggacgtgggtgctcccagcctggctcgcaccgtgggccgcctggtggaggtgttcccagacggcaccagccagctgcagctgcagcgctccccagggggcactttcggcttctgcgtggcctctgggaatgggcgcccagactcagggatctacgtgcaggagatggctgacatgagcatggccaagctgtactcagggctgctgggggtgggcgatgagatcctcgaggtgaacggggccaaggtggcagggctgggcttggctcacattaaggagctcctggcccactcagagagcttgtcaatccgtgtcctgaggcagagacctgtcccacggtgacccagaagtgccgctgccctcactgtcacggcctcggaagccctgaagcactcagggtggttggcaggaacgtgctgcacagagctgctctgtggcggaaacagatcctggcagcatctaaccccttgggctgtggcagggcttctgtggtgggctgcctttgggagacgcaaggagcctgtttgcatattttgtttaaggccatttatccagaactagaaaaagaaaaaaatgggtctccttccatgtctgagggggtgtcaacatctacttgtacctttgttggcagggggagaagggagattcagtggatcctttggttgatgcctgagagccggcctcacctcctggtcccatgcctggtcaaaggctacagcctccaacactgtggaaccaaagaaagcacatg

SEQ ID NO: 370382 - DNA, 2574 bp, Homo sapiens
  misc_feature (246)..(246): n is a, c, g, or t
  misc_feature (1120)..(1120): n is a, c, g, or t
cagcagctggcctgggagggagaaggggctggagagggcctggcctctccgagggatggaggggacagaggcggcggcggccaaacccgcgggcggcagcccccaagggcccaagacagggagtggaacagccagccccgtggaggggacctcagctgtggagtggagtggtcctgagccacagctggataacggacaccccccaagaccctggccttgccctcaggaaaacagaacatccagccngatggccccccagcctcccagggtatggggagtacagctccagggcccctctgtgctggaatccaaggtgagggctttgaaggagaagatgacagtggccaaacagggagtgagtccctgctctgcttcccaagagtggtcatcccccaagaaaccccaatgcagacgaggcaaggcagggagagccgggactccatcagaggggtctttcctgccaggtgctgtggtggctcctcgtacccaaaacctgcctgatgggcagctggacggcagcatcaatgaggagcaacccgccagggatggaggccccaggcttcccaggccgcctgcccctggacgtgagtactgcaacagggggagcccgtggcctccagaagccgaatggacacttcctgaccatgacagaggtccgctgctggggcccagctctttgcaacagagcccgatccatggagttactcccggacggcctgggggtcctggtcattgtaacaaaatcatccacattcccagcccaaggacaggaaggtcctacccttttccagatggcgtggtgacagaggcagatctggatagcacatccctgacctccgaggaggtctttgtccccaggacggccctgctgggtgagcgctggagagctggagacctggaggctctgggcgctgggagcagtgtcttgtccctgtctgatcgggtggagagaaaccgcctgttgctgcaggagatgctcaacgtttctgggcagagcccccgcaaggtgggaacccctgcctggactccatcctgggacacagctgcaccagagcgaccagtgggggatgtggactgggcctcgggcacctccttgcaggactccggccagaacaggacngttggtcccaacccggagcctgtgctgagccccaggcatgaggaagccacgcatctgctgcagcgtgcccgcatgaaggccaggacccggcccctccgtgccagccatgacatcgtgcccaccattacccagggcagccggaggaccccagggctttcttggctcagcagatgttgccaccatcaactccacgggcatcaccctctccctgtcctcagaggagtcagagtccagcaaggaatcagagggaagcctgcagaggacagggtcaggatctggaggacatgtgctgtcaagagcatcagcaggagctggcacaggacccggctccccctcggctgcccctttggaccagaacaagaaaaggagcagcagcatagcctccaccctggggctgaaaaagctcttctcagccctgggccagagttcccggcccaagctgggcaagtcccgcagctacagtgtggagcagttgcagcccgccccgcctggcctgacgtcacagtccagggccccatcgttacaatccctgcacccggtgtcaccctctcaccagcgtcggaaagctgcctcttttcagaacctccattctctgctgagcagcaagggggaccggtccagcctctacctggtagcagggccaggggaccacagtgcagctggcaggccggccaagacttcaccacggcgtgccctcagtgtggaggacgtgggtgctcccagcctggctcgcaccgtgggccgcctggtggaggtgttcccagacggcaccagccagctgcagctgcagcgctccccagggggcactttcggcttctgcgtggcctctgggaatgggcgcccagactcagggatctacgtgcaggagatggctgacatgagcatggccaagctgtactcagggctgctgggggtgggcgatgagatcctcgaggtgaacggggccaaggtggcagggctgggcttggctcacattaaggagctcctggcccactcagagagcttgtcaatccgtgtcctgaggcagagacctgtcccacggtgacccagaagtgccgctgccctcactgtcacggcctcggaagccctgaagcactcagggtggttggcaggaacgtgctgcacagagctgctctgtggcggaaacagatcctggcagcatctaaccccttgggctgtggcagggcttctgtggtgggctgcctttgggagacgcaaggagcctgtttgcatattttgtttaaggccatttatccagaactagaaaaagaaaaaaatgggtctccttccatgtctgagggggtgtcaacatctacttgtacctttgttggcagggggagaagggagattcagtggatcctttggttgatgcctgagagccggcctcacctcctggtcccatgcctggtcaaaggctacagcctccaacactgtggaaccaaagaaagcacatg

SEQ ID NO: 370383 - DNA, 536 bp, Homo sapiens
taactctaaagtggtatttattactgtataataaacttactttcatttcttccttaatgagtacattagatttccttaatcaatgaggaaattagtatagcactaaagttgttatttcagctaaaaagcaaaacaaaaactcccttgactcctcagatggcctatgtagacccatgatgtccttgagtaagtcatggtggttcctgttgaattcttggaagcaatgataaaagcttgtgctgtcactttcttacagggccctcaggttcatggtggggccaagtcctctgtcagcacctcccaggtagcttttctcacccgcaatattgtccctttctcatcaggtgtcaccctctcaccagcgtcggaaagctgcctcttttcagaacctccattctctgctgagcagcaagggggaccggtccagcctctacctggtagcagggccaggggaccacagtgcagctggcaggtatgaggggcacacatggtttggaggataaactcagagagtgaccagcggagccaaaagctta

SEQ ID NO: 370384 - DNA, 1260 bp, Homo sapiens
taactctaaagtggtatttattactgtataataaacttactttcatttcttccttaatgagtacattagatttccttaatcaatgaggaaattagtatagcactaaagttgttatttcagctaaaaagcaaaacaaaaactcccttgactcctcagatggcctatgtagacccatgatgtccttgagtaagtcatggtggttcctgttgaattcttggaagcaatgataaaagcttgtgctgtcactttcttacagggccctcaggttcatggtggggccaagtcctctgtcagcacctcccaggtagcttttctcacccgcaatattgtccctttctcatcaggtgtcaccctctcaccagcgtcggaaagctgcctcttttcagaacctccattctctgctgagcagcaagggggaccggtccagcctctacctggtagcagggccaggggaccacagtgcagctggcaggccggccaagacttcaccacggcgtgccctcagtgtggaggacgtgggtgctcccagcctggctcgcaccgtgggccgcctggtggaggtgttcccagacggcaccagccagctgcagctgcagcgctccccagggggcactttcggcttctgcgtggcctctgggaatgggcgcccagactcagggatctacgtgcaggagatggctgacatgagcatggccaagctgtactcagggctgctgggggtgggcgatgagatcctcgaggtgaacggggccaaggtggcagggctgggcttggctcacattaaggagctcctggcccactcagagagcttgtcaatccgtgtcctgaggcagagacctgtcccacggtgacccagaagtgccgctgccctcactgtcacggcctcggaagccctgaagcactcagggtggttggcaggaacgtgctgcacagagctgctctgtggcggaaacagatcctggcagcatctaaccccttgggctgtggcagggcttctgtggtgggctgcctttgggagacgcaaggagcctgtttgcatattttgtttaaggccatttatccagaactagaaaaagaaaaaaatgggtctccttccatgtctgagggggtgtcaacatctacttgtacctttgttggcagggggagaagggagattcagtggatcctttggttgatgcctgagagccggcctcacctcctggtcccatgcctggtcaaaggctacagcctccaacactgtggaaccaaagaaagcacatg

SEQ ID NO: 370385 - DNA, 429 bp, Homo sapiens
aatcacttctctttttgctagaatcattttagttgctattggtaggacttactctataacagacttgacttgcttttgctgcatggctactgcttatttatgtaaatgttctgtactgccatctcatttccgtttgctgcagctattctttttctatattccctccctatttttctttttcatcccttctttctctacctctgctgcagacccaccagtcttgattttcataatcactgcgtcagttcctgaagttcccttgaatttaggatattttcattgtgtacatcaaacataaaaattatttgaactgtatccatcctgatttgaatttgaaagactgtcagtagtagttatctcagacctctgaaaaatgccagtaatatgaggcatttctgtttcttaatactattttatatgtttttactg

SEQ ID NO: 370386 - DNA, 817 bp, Homo sapiens
gagaggttgaatggcatgctcaaagtcacaaagctggcatggggcggggctggaactcaagagtcagacagtctggctccaaggcctggagatcccaggctgggccccagatttaattcagcaaatattgactgactgctgtggacaaagtgctgggctcaccttggagggatccaacctccaggagctcgagcgcagcagggtagacaagccaggggcacgtgatgcggctgtggcagaagccaagtgcaggagctcccaggctcctttgttttactgagtcaccttaaatgtaactctgccctctcccttgcttcgccaaggctagcgagaaactcagtcttagccacacaggaggaatcggaccccttctgggggtttatgtggagtctgggaaaccaagggtggggtgaggcctggtactcaatccaggaggggcccctatgaccaccctcgcctgtttttcttctcaatgctccctgatcactggaccactggacactgatgtgtcctcagtgcttggggtctggctctgcaggcagcctgcagccagcctccatccccctttcagggacaaatggccttccaccagagtcggtgagtggagaggcacaatgccactccccttcctgaggtgggggtaggggaagggagtcccacaatgcagttacaaacaggatggacaagaacacctgctcaggagtcagacttacagggttcaaagttctgctccaaggtttgaccctaacaagaatcacttagtaataagtggttatgctctgtgaccttgagtaaattacttaccctctcaaaaaaa

SEQ ID NO: 370387 - DNA, 589 bp, Homo sapiens
gtgtttttaaagccaatagaatgtttcattattgttagcttcactgaattttattattccttaactattttactctcttgtaggagatctatgcttgtgaattagctaagagatctggagtagctaattacataaatttttatgtatattcatgtcagtgtataggtgacatttgcgacacaagttctaggtcattgttttggaaactatcccagttcgtgtaacatatatccatcccattcaggaagcatctgggtatgtagctgcatggcagccctctccatgccctcttgtaaaaatcccttaatggtgcattatcagttgtgttataggaaacctgcttaaaaggtttcatgaatcataaaacattatgaaggctattaaatttttaaaatagtatttgggaaagggggaagtccccaggaaatcctgatcttttccaacttccctctctactaaaatctttttggaaagggacctaatgtttttcataaccggggctgaagggaggacttctgacttagttttggctaccagatctgaattcctcatgctccaagattctctgatctctttgagacccttttgc

SEQ ID NO: 370388 - DNA, 414 bp, Homo sapiens
aatggcgtgatcacggctcactgtagccttgaacttctgggttgaagcaatcctcccacctcagcctcctgagtagctgggactacagatgtgcgccaccacccctggctagtgtttgtatttttttttgtagagatggggtttctccatgttgcccagtctggtctcgaactcataggcccaagcaatcctcctgcctcagcctccaaaagtactgtagaaatacactttttaaattaaaacaggcaggttgaatggggctcaaacctaaggatttagtttttaggctctatgatgtagaaaaacatctgtttcttcgatattaccaaaacctcagcatattgtatagtataatacttggttatagcaggcatttaaaaacagtaaataataaaaacaataagagctatcaaa

SEQ ID NO: 370389 - DNA, 160 bp, Homo sapiens
ttctttattttctgttttctaacattagttagggaatattagttgtgcttccacacaccagtaagcccaaaataaatcagttccttatgtaaacaaaatctagtagactatagtaattcatctaagaaaaacgaatctccttctgtagaatagttacact

SEQ ID NO: 370390 - DNA, 4170 bp, Homo sapiens
gtcgatgctgtcgggaacctgctcgtcctcctcgcctgccgtcacaggccgctccccagagcgctggtagatgagggggttggcattctccaggaggccgccgccgaccccgccgccgcctaccatcgcggaaccaccaccgctgatcctagcaggcgtgcgcttccgctccaacccgcgcacttccggagaacgggaagggggcgtggcgtggcgacggagtcgcgcgagggacacgccgcgttgtgggttctcggcctgaggtgcgagagaagcggtgaccgcggccctggctgctcggacccgggaacatgatggtcgctggagcagaaggcgctgagaagggaccacggcggcgctgggtcgtgcgagccagtagcgggctgaaacgtagaggccagaaccaggtctcagggggcactaaaggcggtcggaggtaatccccacaccgcttcctcctggaagtcaggctggccgggagctcccgtatccaggacggttggtcgcctctggcctggcagggatcctagtgtctcgggacctcccggtgacgcgcctgcctcccctgctgcaccataggcccgggagtacggcgtccccacagcttggaccggcaggggctcgtgaaatgtttgtcaagtggataaatgaccatggccgtggtctccgcgggaggtgaggaaactgaaagccaccgaggaaaaggggggcgctccttaagaagtgccgcggtcacgtgtacgtttcaaaagaatggcgtgactgagtagggaggggaccgcggagaccctcagaccctggactgtaaggagatgaggggccgtgaaggggaacccaggaaactgagtcctgaaagcaaggaggaacttccagaatgaagggcgccgacactccttcctgcctttgctcaagcggttccttcaccccgatcaagttccttcccatttctccatctgggggatcctgaacgtgcacatcctcagagaagccctcctggggtctccaattctagtttattgccccctcctatcgatcccccagcgcgctcatcgggcctgtggacaaggacaggtttgaagagaggattccctggatcgcggaagggctgcaggaatggcacagccccttccgaggatgccaaaggagcccgggcaaaggaaagtggccgtgcccgggcctgcctaccactagatccccacccacctatgactgctcagtcccgctctcctaccacacccacctttcccggcccaagccagcgcaccccgctgactccctgcccagtccaaactccaaggctgggcaaggcactgatccactgctggacagacccggggcagcctctgggtgaacagcagcgtgtccgccggcagcgaaccgagaccagcgagccgaccatgcggctgcacagacttcgtgcgcggctgagcgcggtggcctgtgggcttctgctgcttcttgtccggggccagggccaggactcagccagtcccatccggaccacacacacggggcaggtgctggggagtcttgtccatgtgaagggcgccaatgccggggtccaaaccttcctgggaattccatttgccaagccacctctaggtccgctgcgatttgcaccccctgagccccctgaatcttggagtggtgtgagggatggaaccacccatccggccatgtgtctacaggacctcaccgcagtggagtcagagtttcttagccagttcaacatgaccttcccttccgactccatgtctgaggactgcctgtacctcagcatctacacgccggcccatagccatgaaggctctaacctgccggtgatggtgtggatccacggtggtgcgcttgtttttggcatggcttccttgtatgatggttccatgctggctgccttggagaacgtggtggtggtcatcatccagtaccgcctgggtgtcctgggcttcttcagcactggagacaagcacgcaaccggcaactggggctacctggaccaagtggctgcactacgctgggtccagcagaatatcgcccactttggaggcaaccctgaccgtgtcaccatttttggcgagtctgcgggtggcacgagtgtgtcttcgcttgttgtgtcccccatatcccaaggactcttccacggagccatcatggagagtggcgtggccctcctgcccggcctcattgccagctcagctgatgtcatctccacggtggtggccaacctgtctgcctgtgaccaagttgactctgaggccctggtgggctgcctgcggggcaagagtaaagaggagattcttgcaattaacaagcctttcaagatgatccccggagtggtggatggggtcttcctgcccaggcacccccaggagctgctggcctctgccgactttcagcctgtccctagcattgttggtgtcaacaacaatgaattcggctggctcatccccaaggtcatgaggatctatgatacccagaaggaaatggacagagaggcctcccaggctgctctgcagaaaatgttaacgctgctgatgttgcctcctacatttggtgacctgctgagggaggagtacattggggacaatggggatccccagaccctccaagcgcagttccaggagatgatggcggactccatgtttgtgatccctgcactccaagtagcacattttcagtgttcccgggcccctgtgtacttctacgagttccagcatcagcccagctggctcaagaacatcaggccaccgcacatgaaggcagaccatggtgatgagcttccttttgttttcagaagtttctttgggggcaactacattaaattcactgaggaagaggagcagctaagcaggaagatgatgaagtactgggccaactttgcgagaaatgggaaccccaatggcgagggtctgccacactggccgctgttcgaccaggaggagcaatacctgcagctgaacctacagcctgcggtgggccgggctctgaaggcccacaggctccagttctggaagaaggcgctgccccaaaagatccaggagctcgaggagcctgaagagagacacacagagctgtagctccctgtgccggggaggagggggtgggttcgctgacaggcgagggtcagcctgctgtgcccacacacacccactaaggagaaagaagttgattccttcattcacttcgccattcattcatacttccgtccatccattcagaaagcatttattaagaatttactcaggcatgatggcccatacttgtaatcccagctattgggaaggatgagatgggaggatggcttgaggccagaggtttgagaccgaccagccagggcaacacagtgagaccccttctcaaaaaaaaaaaaaaaaaagagagagtgtgtgattagaagctaaataggaaagttttgagcttcaagtcagtgaggagtaaaaaagatttttaaaaagcaaagaaaacaaaatataagggaaaaatatgagaaaaataaaaataaaaagagaataataggccaggcactgtggctcatgcccctaatcccagcacttttgggaggtcaaggtgagcagaacacctgaggacaggagtttgagaccagcctgcccaacgtggtgaaaccccatctctatgaaaaatacaaaaatcagacgggcacagtggtggtgcccacctgtgatcccagctcactgcaacctctgcctcccaggttcaagtaattctcctgcctcagcctcctgagtagctgggaggcagaggttgcagtgagctgagattgtgccactgtactccagcctgggcaacaagagcgagactccgtttccaaaaaaataagagagaatagaagaagctactgcatgatgttagttaccaagcctgccatgggtcctctcttgctagacacactccatagatccccccactgagctgtggatgggcaaaccccggtggaatcccaccctccccaacaccccactgagccctgggccccctcctcccttcctcacctccaccttctccctgccttctctcttctctcgtctgagcccccaggccttttccactttgagggaggtgcttcgaagaatgttgcccacacctaagtgttagaagcctatgtccgttcatccctgagaggtctgaaagaataaaaataaattctaaaaa

SEQ ID NO: 370391 - DNA, 2850 bp, Homo sapiens
gcgaaccgagaccagcggacacgctgctgttcgacccggggcagcctctgggtgaacagcagcgtgtccgccggcagcgaaccgagaccagcgagccgaccatgcggctgcacagacttcgtgcgcggctgagcgcggtggcctgtgggcttctgctgcttcttgtccggggccagggccaggactcagccagtcccatccggaccacacacacggggcaggtgctggggagtcttgtccatgtgaagggcgccaatgccggggtccaaaccttcctgggaattccatttgccaagccacctctaggtccgctgcgatttgcaccccctgagccccctgaatcttggagtggtgtgagggatggaaccacccatccggccatgtgtctacaggacctcaccgcagtggagtcagagtttcttagccagttcaacatgaccttcccttccgactccatgtctgaggactgcctgtacctcagcatctacacgccggcccatagccatgaaggctctaacctgccggtgatggtgtggatccacggtggtgcgcttgtttttggcatggcttccttgtatgatggttccatgctggctgccttggagaacgtggtggtggtcatcatccagtaccgcctgggtgtcctgggcttcttcagcactggagacaagcacgcaaccggcaactggggctacctggaccaagtggctgcactacgctgggtccagcagaatatcgcccactttggaggcaaccctgaccgtgtcaccatttttggcgagtctgcgggtggcacgagtgtgtcttcgcttgttgtgtcccccatatcccaaggactcttccacggagccatcatggagagtggcgtggccctcctgcccggcctcattgccagctcagctgatgtcatctccacggtggtggccaacctgtctgcctgtgaccaagttgactctgaggccctggtgggctgcctgcggggcaagagtaaagaggagattcttgcaattaacaagcctttcaagatgatccccggagtggtggatggggtcttcctgcccaggcacccccaggagctgctggcctctgccgactttcagcctgtccctagcattgttggtgtcaacaacaatgaattcggctggctcatccccaaggtcatgaggatctatgatacccagaaggaaatggacagagaggcctcccaggctgctctgcagaaaatgttaacgctgctgatgttgcctcctacatttggtgacctgctgagggaggagtacattggggacaatggggatccccagaccctccaagcgcagttccaggagatgatggcggactccatgtttgtgatccctgcactccaagtagcacattttcagtgttcccgggcccctgtgtacttctacgagttccagcatcagcccagctggctcaagaacatcaggccaccgcacatgaaggcagaccatggtgatgagcttccttttgttttcagaagtttctttgggggcaactacattaaattcactgaggaagaggagcagctaagcaggaagatgatgaagtactgggccaactttgcgagaaatgggaaccccaatggcgagggtctgccacactggccgctgttcgaccaggaggagcaatacctgcagctgaacctacagcctgcggtgggccgggctctgaaggcccacaggctccagttctggaagaaggcgctgccccaaaagatccaggagctcgaggagcctgaagagagacacacagagctgtagctccctgtgccggggaggagggggtgggttcgctgacaggcgagggtcagcctgctgtgcccacacacacccactaaggagaaagaagttgattccttcattcacttcgccattcattcatacttccgtccatccattcagaaagcatttattaagaatttactcaggcatgatggcccatacttgtaatcccagctattgggaaggatgagatgggaggatggcttgaggccagaggtttgagaccgaccagccagggcaacacagtgagaccccttctcaaaaaaaaaaaaaaaaaagagagagtgtgtgattagaagctaaataggaaagttttgagcttcaagtcagtgaggagtaaaaaagatttttaaaaagcaaagaaaacaaaatataagggaaaaatatgagaaaaataaaaataaaaagagaataataggccaggcactgtggctcatgcccctaatcccagcacttttgggaggtcaaggtgagcagaacacctgaggacaggagtttgagaccagcctgcccaacgtggtgaaaccccatctctatgaaaaatacaaaaatcagacgggcacagtggtggtgcccacctgtgatcccagctactcaggaggctgaggcaggagaattacttgaacctgggaggcagaggttgcagtgagctgagattgtgccactgtactccagcctgggcaacaagagcgagactccgtttccaaaaaaataagagagaatagaagaagctactgcatgatgttagttaccaagcctgccatgggtcctctcttgctagacacactccatagatccccccactgagctgtggatgggcaaaccccggtggaatcccaccctccccaacaccccactgagccctgggccccctcctcccttcctcacctccaccttctccctgccttctctcttctctcgtctgagcccccaggccttttccactttgagggaggtgcttcgaagaatgttgcccacacctaagtgttagaagcctatgtccgttcatccctgagaggtctgaaagaataaaaataaattctaaaaa

SEQ ID NO: 370392 - DNA, 4310 bp, Homo sapiens
gtcgatgctgtcgggaacctgctcgtcctcctcgcctgccgtcacaggccgctccccagagcgctggtagatgagggggttggcattctccaggaggccgccgccgaccccgccgccgcctaccatcgcggaaccaccaccgctgatcctagcaggcgtgcgcttccgctccaacccgcgcacttccggagaacgggaagggggcgtggcgtggcgacggagtcgcgcgagggacacgccgcgttgtgggttctcggcctgaggtgcgagagaagcggtgaccgcggccctggctgctcggacccgggaacatgatggtcgctggagcagaaggcgctgagaagggaccacggcggcgctgggtcgtgcgagccagtagcgggctgaaacgtagaggccagaaccaggtctcagggggcactaaaggcggtcggaggtaatccccacaccgcttcctcctggaagtcaggctggccgggagctcccgtatccaggacggttggtcgcctctggcctggcagggatcctagtgtctcgggacctcccggtgacgcgcctgcctcccctgctgcaccataggcccgggagtacggcgtccccacagcttggaccggcaggggctcgtgaaatgtttgtcaagtggataaatgaccatggccgtggtctccgcgggaggtgaggaaactgaaagccaccgaggaaaaggggggcgctccttaagaagtgccgcggtcacgtgtacgtttcaaaagaatggcgtgactgagtagggaggggaccgcggagaccctcagaccctggactgtaaggagatgaggggccgtgaaggggaacccaggaaactgagtcctgaaagcaaggaggaacttccagaatgaagggcgccgacactccttcctgcctttgctcaagcggttccttcaccccgatcaagttccttcccatttctccatctgggggatcctgaacgtgcacatcctcagagaagccctcctggggtctccaattctagtttattgccccctcctatcgatcccccagcgcgctcatcgggcctgtggacaaggacaggtttgaagagaggattccctggatcgcggaagggctgcaggaatggcacagccccttccgaggatgccaaaggagcccgggcaaaggaaagtggccgtgcccgggcctgcctaccactagatccccacccacctatgactgctcagtcccgctctcctaccacacccacctttcccggcccaagccagcgcaccccgctgactccctgcccagtccaaactccaaggctgggcaaggcactgatccactgctggacagacccggggcagcctctgggtgaacagcagcgtgtccgccggcagcgaaccgagaccagcgagccgaccatgcggctgcacagacttcgtgcgcggctgagcgcggtggcctgtgggcttctgctgcttcttgtccggggccagggtgaggctccctcggaggggcgacagggaccgggctcagatctgccaaatgctgcggaggcagaacctgacagtgcgggagggcaggcgcctgggaggtaggagctggtggagatgacagcgtggaactcgtgagccccacgcaacgcctccccgccgcccaaggccaggactcagccagtcccatccggaccacacacacggggcaggtgctggggagtcttgtccatgtgaagggcgccaatgccggggtccaaaccttcctgggaattccatttgccaagccacctctaggtccgctgcgatttgcaccccctgagccccctgaatcttggagtggtgtgagggatggaaccacccatccggccatgtgtctacaggacctcaccgcagtggagtcagagtttcttagccagttcaacatgaccttcccttccgactccatgtctgaggactgcctgtacctcagcatctacacgccggcccatagccatgaaggctctaacctgccggtgatggtgtggatccacggtggtgcgcttgtttttggcatggcttccttgtatgatggttccatgctggctgccttggagaacgtggtggtggtcatcatccagtaccgcctgggtgtcctgggcttcttcagcactggagacaagcacgcaaccggcaactggggctacctggaccaagtggctgcactacgctgggtccagcagaatatcgcccactttggaggcaaccctgaccgtgtcaccatttttggcgagtctgcgggtggcacgagtgtgtcttcgcttgttgtgtcccccatatcccaaggactcttccacggagccatcatggagagtggcgtggccctcctgcccggcctcattgccagctcagctgatgtcatctccacggtggtggccaacctgtctgcctgtgaccaagttgactctgaggccctggtgggctgcctgcggggcaagagtaaagaggagattcttgcaattaacaagcctttcaagatgatccccggagtggtggatggggtcttcctgcccaggcacccccaggagctgctggcctctgccgactttcagcctgtccctagcattgttggtgtcaacaacaatgaattcggctggctcatccccaaggtcatgaggatctatgatacccagaaggaaatggacagagaggcctcccaggctgctctgcagaaaatgttaacgctgctgatgttgcctcctacatttggtgacctgctgagggaggagtacattggggacaatggggatccccagaccctccaagcgcagttccaggagatgatggcggactccatgtttgtgatccctgcactccaagtagcacattttcagtgttcccgggcccctgtgtacttctacgagttccagcatcagcccagctggctcaagaacatcaggccaccgcacatgaaggcagaccatggtgatgagcttccttttgttttcagaagtttctttgggggcaactacattaaattcactgaggaagaggagcagctaagcaggaagatgatgaagtactgggccaactttgcgagaaatgggaaccccaatggcgagggtctgccacactggccgctgttcgaccaggaggagcaatacctgcagctgaacctacagcctgcggtgggccgggctctgaaggcccacaggctccagttctggaagaaggcgctgccccaaaagatccaggagctcgaggagcctgaagagagacacacagagctgtagctccctgtgccggggaggagggggtgggttcgctgacaggcgagggtcagcctgctgtgcccacacacacccactaaggagaaagaagttgattccttcattcacttcgccattcattcatacttccgtccatccattcagaaagcatttattaagaatttactcaggcatgatggcccatacttgtaatcccagctattgggaaggatgagatgggaggatggcttgaggccagaggtttgagaccgaccagccagggcaacacagtgagaccccttctcaaaaaaaaaaaaaaaaaagagagagtgtgtgattagaagctaaataggaaagttttgagcttcaagtcagtgaggagtaaaaaagatttttaaaaagcaaagaaaacaaaatataagggaaaaatatgagaaaaataaaaataaaaagagaataataggccaggcactgtggctcatgcccctaatcccagcacttttgggaggtcaaggtgagcagaacacctgaggacaggagtttgagaccagcctgcccaacgtggtgaaaccccatctctatgaaaaatacaaaaatcagacgggcacagtggtggtgcccacctgtgatcccagctactcaggaggctgaggcaggagaattacttgaacctgggaggcagaggttgcagtgagctgagattgtgccactgtactccagcctgggcaacaagagcgagactccgtttccaaaaaaataagagagaatagaagaagctactgcatgatgttagttaccaagcctgccatgggtcctctcttgctagacacactccatagatccccccactgagctgtggatgggcaaaccccggtggaatcccaccctccccaacaccccactgagccctgggccccctcctcccttcctcacctccaccttctccctgccttctctcttctctcgtctgagcccccaggccttttccactttgagggaggtgcttcgaagaatgttgcccacacctaagtgttagaagcctatgtccgttcatccctgagaggtctgaaagaataaaaataaattctaaaaa

SEQ ID NO: 370393 - DNA, 4523 bp, Homo sapiens
gtcgatgctgtcgggaacctgctcgtcctcctcgcctgccgtcacaggccgctccccagagcgctggtagatgagggggttggcattctccaggaggccgccgccgaccccgccgccgcctaccatcgcggaaccaccaccgctgatcctagcaggcgtgcgcttccgctccaacccgcgcacttccggagaacgggaagggggcgtggcgtggcgacggagtcgcgcgagggacacgccgcgttgtgggttctcggcctgaggtgcgagagaagcggtgaccgcggccctggctgctcggacccgggaacatgatggtcgctggagcagaaggcgctgagaagggaccacggcggcgctgggtcgtgcgagccagtagcgggctgaaacgtagaggccagaaccaggtctcagggggcactaaaggcggtcggaggtaatccccacaccgcttcctcctggaagtcaggctggccgggagctcccgtatccaggacggttggtcgcctctggcctggcagggatcctagtgtctcgggacctcccggtgacgcgcctgcctcccctgctgcaccataggcccgggagtacggcgtccccacagcttggaccggcaggggctcgtgaaatgtttgtcaagtggataaatgaccatggccgtggtctccgcgggaggtgaggaaactgaaagccaccgaggaaaaggggggcgctccttaagaagtgccgcggtcacgtgtacgtttcaaaagaatggcgtgactgagtagggaggggaccgcggagaccctcagaccctggactgtaaggagatgaggggccgtgaaggggaacccaggaaactgagtcctgaaagcaaggaggaacttccagaatgaagggcgccgacactccttcctgcctttgctcaagcggttccttcaccccgatcaagttccttcccatttctccatctgggggatcctgaacgtgcacatcctcagagaagccctcctggggtctccaattctagtttattgccccctcctatcgatcccccagcgcgctcatcgggcctgtggacaaggacaggtttgaagagaggattccctggatcgcggaagggctgcaggaatggcacagccccttccgaggatgccaaaggagcccgggcaaaggaaagtggccgtgcccgggcctgcctaccactagatccccacccacctatgactgctcagtcccgctctcctaccacacccacctttcccggcccaagccagcgcaccccgctgactccctgcccagtccaaactccaaggctgggcaaggcactgatccactgctggacagacccggggcagcctctgggtgaacagcagcgtgtccgccggcagcgaaccgagaccagcgagccgaccatgcggctgcacagacttcgtgcgcggctgagcgcggtggcctgtgggcttctgctgcttcttgtccggggccagggccaggactcagccagtcccatccggaccacacacacggggcaggtgctggggagtcttgtccatgtgaagggcgccaatgccggggtccaaaccttcctgggaattccatttgccaagccacctctaggtccgctgcgatttgcaccccctgagccccctgaatcttggagtggtgtgagggatggaaccacccatccggccatgtgtctacaggacctcaccgcagtggagtcagagtttcttagccagttcaacatgaccttcccttccgactccatgtctgaggactgcctgtacctcagcatctacacgccggcccatagccatgaaggctctaacctgccggtgatggtgtggatccacggtggtgcgcttgtttttggcatggcttccttgtatgatggttccatgctggctgccttggagaacgtggtggtggtcatcatccagtaccgcctgggtgtcctgggcttcttcagcactggagacaagcacgcaaccggcaactggggctacctggaccaagtggctgcactacgctgggtccagcagaatatcgcccactttggaggcaaccctgaccgtgtcaccatttttggcgagtctgcgggtggcacgagtgtgtcttcgcttgttgtgtcccccatatcccaaggactcttccacggagccatcatggagagtggcgtggccctcctgcccggcctcattgccagctcagctgatgtcatctccacggtggtggccaacctgtctgcctgtgaccaagttgactctgaggccctggtgggctgcctgcggggcaagagtaaagaggagattcttgcaattaacaagcctttcaagatgatccccggagtggtggatggggtcttcctgcccaggcacccccaggagctgctggcctctgccgactttcagcctgtccctagcattgttggtgtcaacaacaatgaattcggctggctcatccccaaggtgagccccaacccaagcccacaagtgcctggggagcccatctggtagtggggggtgttcagggcttcatagctccaggctcatcccatccccagctacagactctctcctggccatccaggtcatgaggatctatgatacccagaaggaaatggacagagaggcctcccaggctgctctgcagaaaatgttaacgctgctggtaaggctcctggggtccctcgccaatggagacgggctcctctcctgtcctgagacagaggaaattcaacccccagatacccttcctatgtagtgacccccatgagcaaaggcctgggtgtgtgtgtttaggggtggggtcacctcagagcctcgcctttgctcccccttcctgtgccatccccaagcccgagaccacctcctccctgcccctggcatccagtctaacctgcctcttcctgatccacctggggtagatgttgcctcctacatttggtgacctgctgagggaggagtacattggggacaatggggatccccagaccctccaagcgcagttccaggagatgatggcggactccatgtttgtgatccctgcactccaagtagcacattttcagtgttcccgggcccctgtgtacttctacgagttccagcatcagcccagctggctcaagaacatcaggccaccgcacatgaaggcagaccatggtgatgagcttccttttgttttcagaagtttctttgggggcaactacattaaattcactgaggaagaggagcagctaagcaggaagatgatgaagtactgggccaactttgcgagaaatgggaaccccaatggcgagggtctgccacactggccgctgttcgaccaggaggagcaatacctgcagctgaacctacagcctgcggtgggccgggctctgaaggcccacaggctccagttctggaagaaggcgctgccccaaaagatccaggagctcgaggagcctgaagagagacacacagagctgtagctccctgtgccggggaggagggggtgggttcgctgacaggcgagggtcagcctgctgtgcccacacacacccactaaggagaaagaagttgattccttcattcacttcgccattcattcatacttccgtccatccattcagaaagcatttattaagaatttactcaggcatgatggcccatacttgtaatcccagctattgggaaggatgagatgggaggatggcttgaggccagaggtttgagaccgaccagccagggcaacacagtgagaccccttctcaaaaaaaaaaaaaaaaaagagagagtgtgtgattagaagctaaataggaaagttttgagcttcaagtcagtgaggagtaaaaaagatttttaaaaagcaaagaaaacaaaatataagggaaaaatatgagaaaaataaaaataaaaagagaataataggccaggcactgtggctcatgcccctaatcccagcacttttgggaggtcaaggtgagcagaacacctgaggacaggagtttgagaccagcctgcccaacgtggtgaaaccccatctctatgaaaaatacaaaaatcagacgggcacagtggtggtgcccacctgtgatcccagctactcaggaggctgaggcaggagaattacttgaacctgggaggcagaggttgcagtgagctgagattgtgccactgtactccagcctgggcaacaagagcgagactccgtttccaaaaaaataagagagaatagaagaagctactgcatgatgttagttaccaagcctgccatgggtcctctcttgctagacacactccatagatccccccactgagctgtggatgggcaaaccccggtggaatcccaccctccccaacaccccactgagccctgggccccctcctcccttcctcacctccaccttctccctgccttctctcttctctcgtctgagcccccaggccttttccactttgagggaggtgcttcgaagaatgttgcccacacctaagtgttagaagcctatgtccgttcatccctgagaggtctgaaagaataaaaataaattctaaaaa

SEQ ID NO: 370394 - DNA, 4098 bp, Homo sapiens
gtcgatgctgtcgggaacctgctcgtcctcctcgcctgccgtcacaggccgctccccagagcgctggtagatgagggggttggcattctccaggaggccgccgccgaccccgccgccgcctaccatcgcggaaccaccaccgctgatcctagcaggcgtgcgcttccgctccaacccgcgcacttccggagaacgggaagggggcgtggcgtggcgacggagtcgcgcgagggacacgccgcgttgtgggttctcggcctgaggtgcgagagaagcggtgaccgcggccctggctgctcggacccgggaacatgatggtcgctggagcagaaggcgctgagaagggaccacggcggcgctgggtcgtgcgagccagtagcgggctgaaacgtagaggccagaaccaggtctcagggggcactaaaggcggtcggaggtaatccccacaccgcttcctcctggaagtcaggctggccgggagctcccgtatccaggacggttggtcgcctctggcctggcagggatcctagtgtctcgggacctcccggtgacgcgcctgcctcccctgctgcaccataggcccgggagtacggcgtccccacagcttggaccggcaggggctcgtgaaatgtttgtcaagtggataaatgaccatggccgtggtctccgcgggaggtgaggaaactgaaagccaccgaggaaaaggggggcgctccttaagaagtgccgcggtcacgtgtacgtttcaaaagaatggcgtgactgagtagggaggggaccgcggagaccctcagaccctggactgtaaggagatgaggggccgtgaaggggaacccaggaaactgagtcctgaaagcaaggaggaacttccagaatgaagggcgccgacactccttcctgcctttgctcaagcggttccttcaccccgatcaagttccttcccatttctccatctgggggatcctgaacgtgcacatcctcagagaagccctcctggggtctccaattctagtttattgccccctcctatcgatcccccagcgcgctcatcgggcctgtggacaaggacaggtttgaagagaggattccctggatcgcggaagggctgcaggaatggcacagccccttccgaggatgccaaaggagcccgggcaaaggaaagtggccgtgcccgggcctgcctaccactagatccccacccacctatgactgctcagtcccgctctcctaccacacccacctttcccggcccaagccagcgcaccccgctgactccctgcccagtccaaactccaaggctgggcaaggcactgatccactgctggacagacccggggcagcctctgggtgaacagcagcgtgtccgccggcagcgaaccgagaccagcgagccgaccatgcggctgcacagacttcgtgcgcggctgagcgcggtggcctgtgggcttctgctgcttcttgtccggggccagggccaggactcagccagtcccatccggaccacacacacggggcaggtgctggggagtcttgtccatgtgaagggcgccaatgccggggtccaaaccttcctgggaattccatttgccaagccacctctaggtccgctgcgatttgcaccccctgagccccctgaatcttggagtggtgtgagggatggaaccacccatccggccatgtgtctacaggacctcaccgcagtggagtcagagtttcttagccagttcaacatgaccttcccttccgactccatgtctgaggactgcctgtacctcagcatctacacgccggcccatagccatgaaggctctaacctgccggtgatggtgtggatccacggtggtgcgcttgtttttggcatggcttccttgtatgatggttccatgctggctgccttggagaacgtggtggtggtcatcatccagtaccgcctgggtgtcctgggcttcttcagcactggagacaagcacgcaaccggcaactggggctacctggaccaagtggctgcactacgctgggtccagcagaatatcgcccactttggaggcaaccctgaccgtgtcaccatttttggcgagtctgcgggtggcacgagtgtgtcttcgcttgttgtgtcccccatatcccaaggactcttccacggagccatcatggagagtggcgtggccctcctgcccggcctcattgccagctcagctgatgtcatctccacggtggtggccaacctgtctgcctgtgaccaagttgactctgaggccctggtgggctgcctgcggggcaagagtaaagaggagattcttgcaattaacaagcctttcaagatgatccccggagtggtggatggggtcttcctgcccaggcacccccaggagctgctggcctctgccgactttcagcctgtccctagcattgttggtgtcaacaacaatgaattcggctggctcatccccaaggtcatgaggatctatgatacccagaaggaaatggacagagaggcctcccaggctgctctgcagaaaatgttaacgctgctgatgttgcctcctacatttggtgacctgctgagggaggagtacattggggacaatggggatccccagaccctccaagcgcagttccaggagatgatggcggactccatgtttgtgatccctgcactccaagtagcacattttcagtgttcccgggcccctgtgtacttctacgagttccagcatcagcccagctggctcaagaacatcaggccaccgcacatgaaggcagaccatgttaaattcactgaggaagaggagcagctaagcaggaagatgatgaagtactgggccaactttgcgagaaatgggaaccccaatggcgagggtctgccacactggccgctgttcgaccaggaggagcaatacctgcagctgaacctacagcctgcggtgggccgggctctgaaggcccacaggctccagttctggaagaaggcgctgccccaaaagatccaggagctcgaggagcctgaagagagacacacagagctgtagctccctgtgccggggaggagggggtgggttcgctgacaggcgagggtcagcctgctgtgcccacacacacccactaaggagaaagaagttgattccttcattcacttcgccattcattcatacttccgtccatccattcagaaagcatttattaagaatttactcaggcatgatggcccatacttgtaatcccagctattgggaaggatgagatgggaggatggcttgaggccagaggtttgagaccgaccagccagggcaacacagtgagaccccttctcaaaaaaaaaaaaaaaaaagagagagtgtgtgattagaagctaaataggaaagttttgagcttcaagtcagtgaggagtaaaaaagatttttaaaaagcaaagaaaacaaaatataagggaaaaatatgagaaaaataaaaataaaaagagaataataggccaggcactgtggctcatgcccctaatcccagcacttttgggaggtcaaggtgagcagaacacctgaggacaggagtttgagaccagcctgcccaacgtggtgaaaccccatctctatgaaaaatacaaaaatcagacgggcacagtggtggtgcccacctgtgatcccagctactcaggaggctgaggcaggagaattacttgaacctgggaggcagaggttgcagtgagctgagattgtgccactgtactccagcctgggcaacaagagcgagactccgtttccaaaaaaataagagagaatagaagaagctactgcatgatgttagttaccaagcctgccatgggtcctctcttgctagacacactccatagatccccccactgagctgtggatgggcaaaccccggtggaatcccaccctccccaacaccccactgagccctgggccccctcctcccttcctcacctccaccttctccctgccttctctcttctctcgtctgagcccccaggccttttccactttgagggaggtgcttcgaagaatgttgcccacacctaagtgttagaagcctatgtccgttcatccctgagaggtctgaaagaataaaaataaattctaaaaa

SEQ ID NO: 370395 - DNA, 4613 bp, Homo sapiens
gtcgatgctgtcgggaacctgctcgtcctcctcgcctgccgtcacaggccgctccccagagcgctggtagatgagggggttggcattctccaggaggccgccgccgaccccgccgccgcctaccatcgcggaaccaccaccgctgatcctagcaggcgtgcgcttccgctccaacccgcgcacttccggagaacgggaagggggcgtggcgtggcgacggagtcgcgcgagggacacgccgcgttgtgggttctcggcctgaggtgcgagagaagcggtgaccgcggccctggctgctcggacccgggaacatgatggtcgctggagcagaaggcgctgagaagggaccacggcggcgctgggtcgtgcgagccagtagcgggctgaaacgtagaggccagaaccaggtctcagggggcactaaaggcggtcggaggtaatccccacaccgcttcctcctggaagtcaggctggccgggagctcccgtatccaggacggttggtcgcctctggcctggcagggatcctagtgtctcgggacctcccggtgacgcgcctgcctcccctgctgcaccataggcccgggagtacggcgtccccacagcttggaccggcaggggctcgtgaaatgtttgtcaagtggataaatgaccatggccgtggtctccgcgggaggtgaggaaactgaaagccaccgaggaaaaggggggcgctccttaagaagtgccgcggtcacgtgtacgtttcaaaagaatggcgtgactgagtagggaggggaccgcggagaccctcagaccctggactgtaaggagatgaggggccgtgaaggggaacccaggaaactgagtcctgaaagcaaggaggaacttccagaatgaagggcgccgacactccttcctgcctttgctcaagcggttccttcaccccgatcaagttccttcccatttctccatctgggggatcctgaacgtgcacatcctcagagaagccctcctggggtctccaattctagtttattgccccctcctatcgatcccccagcgcgctcatcgggcctgtggacaaggacaggtttgaagagaggattccctggatcgcggaagggctgcaggaatggcacagccccttccgaggatgccaaaggagcccgggcaaaggaaagtggccgtgcccgggcctgcctaccactagatccccacccacctatgactgctcagtcccgctctcctaccacacccacctttcccggcccaagccagcgcaccccgctgactccctgcccagtccaaactccaaggctgggcaaggcactgatccactgctggacagacccggggcagcctctgggtgaacagcagcgtgtccgccggcagcgaaccgagaccagcgagccgaccatgcggctgcacagacttcgtgcgcggctgagcgcggtggcctgtgggcttctgctgcttcttgtccggggccagggccaggactcagccagtcccatccggaccacacacacggggcaggtgctggggagtcttgtccatgtgaagggcgccaatgccggggtccaaaccttcctgggaattccatttgccaagccacctctaggtccgctgcgatttgcaccccctgagccccctgaatcttggagtggtgtgagggatggaaccacccatccggccatgtgtctacaggacctcaccgcagtggagtcagagtttcttagccagttcaacatgaccttcccttccgactccatgtctgaggactgcctgtacctcagcatctacacgccggcccatagccatgaaggctctaacctgccggtgatggtgtggatccacggtggtgcgcttgtttttggcatggcttccttgtatgatggttccatgctggctgccttggagaacgtggtggtggtcatcatccagtaccgcctgggtgtcctgggcttcttcagcactggagacaagcacgcaaccggcaactggggctacctggaccaagtggctgcactacgctgggtccagcagaatatcgcccactttggaggcaaccctgaccgtgtcaccatttttggcgagtctgcgggtggcacgagtgtgtcttcgcttgttgtgtcccccatatcccaaggactcttccacggagccatcatggagagtggcgtggccctcctgcccggcctcattgccagctcagctgatgtcatctccacggtggtggccaacctgtctgcctgtgaccaagttgactctgaggccctggtgggctgcctgcggggcaagagtaaagaggagattcttgcaattaacaagcctttcaagatgatccccggagtggtggatggggtcttcctgcccaggcacccccaggagctgctggcctctgccgactttcagcctgtccctagcattgttggtgtcaacaacaatgaattcggctggctcatccccaaggtcatgaggatctatgatacccagaaggaaatggacagagaggcctcccaggctgctctgcagaaaatgttaacgctgctgatgttgcctcctacatttggtgacctgctgagggaggagtacattggggacaatggggatccccagaccctccaagcgcagttccaggagatgatggcggactccatgtttgtgatccctgcactccaagtagcacattttcagtgttcccgggcccctgtgtacttctacgagttccagcatcagcccagctggctcaagaacatcaggccaccgcacatgaaggcagaccatggtgatgagcttccttttgttttcagaagtttctttgggggcaactacattaaattcactgaggaagaggagcagctaagcaggaagatgatgaagtactgggccaactttgcgagaaatgggtgagacagcacacccctgcctcaacctccccgattgggggacttgtgcccatccagtgctctcctagtctggggtgacctcatgagcacacccgcatccttcatcacatgatggccccttccccagctccgggacccactcagacagggtgggggtgcatggggcagtggacacgctctatctctccagtctacctggagggtgggcgccagtgctgtgccaccgtcagggcctccctctcagagagagggacacaacagagctggctgccctcccccaacccccactggtgctgacactagccagagggagcttatttcctgtttctggaagcctccccactcattccccaagcccacctggcctgcttggctgccttgcctgaccagactcagggtgctcaggtctgggcttcgggggcccagagtgaccctcatactgccctgctgggatggcatgtctacaggaaccccaatggcgagggtctgccacactggccgctgttcgaccaggaggagcaatacctgcagctgaacctacagcctgcggtgggccgggctctgaaggcccacaggctccagttctggaagaaggcgctgccccaaaagatccaggagctcgaggagcctgaagagagacacacagagctgtagctccctgtgccggggaggagggggtgggttcgctgacaggcgagggtcagcctgctgtgcccacacacacccactaaggagaaagaagttgattccttcattcacttcgccattcattcatacttccgtccatccattcagaaagcatttattaagaatttactcaggcatgatggcccatacttgtaatcccagctattgggaaggatgagatgggaggatggcttgaggccagaggtttgagaccgaccagccagggcaacacagtgagaccccttctcaaaaaaaaaaaaaaaaaagagagagtgtgtgattagaagctaaataggaaagttttgagcttcaagtcagtgaggagtaaaaaagatttttaaaaagcaaagaaaacaaaatataagggaaaaatatgagaaaaataaaaataaaaagagaataataggccaggcactgtggctcatgcccctaatcccagcacttttgggaggtcaaggtgagcagaacacctgaggacaggagtttgagaccagcctgcccaacgtggtgaaaccccatctctatgaaaaatacaaaaatcagacgggcacagtggtggtgcccacctgtgatcccagctactcaggaggctgaggcaggagaattacttgaacctgggaggcagaggttgcagtgagctgagattgtgccactgtactccagcctgggcaacaagagcgagactccgtttccaaaaaaataagagagaatagaagaagctactgcatgatgttagttaccaagcctgccatgggtcctctcttgctagacacactccatagatccccccactgagctgtggatgggcaaaccccggtggaatcccaccctccccaacaccccactgagccctgggccccctcctcccttcctcacctccaccttctccctgccttctctcttctctcgtctgagcccccaggccttttccactttgagggaggtgcttcgaagaatgttgcccacacctaagtgttagaagcctatgtccgttcatccctgagaggtctgaaagaataaaaataaattctaaaaa

SEQ ID NO: 370396 - DNA, 1495 bp, Homo sapiens
gtatcttatcaccatgggtgaggcaagaagtcttcagggggaggggccaccgtgtcatgggctgtccaccccacaggttcccgggcccctgtgtacttctacgagttccagcatcagcccagctggctcaagaacatcaggccaccgcacatgaaggcagaccatgttaaattcactgaggaagaggagcagctaagcaggaagatgatgaagtactgggccaactttgcgagaaatgggaaccccaatggcgagggtctgccacactggccgctgttcgaccaggaggagcaatacctgcagctgaacctacagcctgcggtgggccgggctctgaaggcccacaggctccagttctggaagaaggcgctgccccaaaagatccaggagctcgaggagcctgaagagagacacacagagctgtagctccctgtgccggggaggagggggtgggttcgctgacaggcgagggtcagcctgctgtgcccacacacacccactaaggagaaagaagttgattccttcattcacttcgccattcattcatacttccgtccatccattcagaaagcatttattaagaatttactcaggcatgatggcccatacttgtaatcccagctattgggaaggatgagatgggaggatggcttgaggccagaggtttgagaccgaccagccagggcaacacagtgagaccccttctcaaaaaaaaaaaaaaaaaagagagagtgtgtgattagaagctaaataggaaagttttgagcttcaagtcagtgaggagtaaaaaagatttttaaaaagcaaagaaaacaaaatataagggaaaaatatgagaaaaataaaaataaaaagagaataataggccaggcactgtggctcatgcccctaatcccagcacttttgggaggtcaaggtgagcagaacacctgaggacaggagtttgagaccagcctgcccaacgtggtgaaaccccatctctatgaaaaatacaaaaatcagacgggcacagtggtggtgcccacctgtgatcccagctactcaggaggctgaggcaggagaattacttgaacctgggaggcagaggttgcagtgagctgagattgtgccactgtactccagcctgggcaacaagagcgagactccgtttccaaaaaaataagagagaatagaagaagctactgcatgatgttagttaccaagcctgccatgggtcctctcttgctagacacactccatagatccccccactgagctgtggatgggcaaaccccggtggaatcccaccctccccaacaccccactgagccctgggccccctcctcccttcctcacctccaccttctccctgccttctctcttctctcgtctgagcccccaggccttttccactttgagggaggtgcttcgaagaatgttgcccacacctaagtgttagaagcctatgtccgttcatccctgagaggtctgaaagaataaaaataaattctaaaaa

SEQ ID NO: 370397 - DNA, 1804 bp, Homo sapiens
gtcgatgctgtcgggaacctgctcgtcctcctcgcctgccgtcacaggccgctccccagagcgctggtagatgagggggttggcattctccaggaggccgccgccgaccccgccgccgcctaccatcgcggaaccaccaccgctgatcctagcaggcgtgcgcttccgctccaacccgcgcacttccggagaacgggaagggggcgtggcgtggcgacggagtcgcgcgagggacacgccgcgttgtgggttctcggcctgaggtgcgagagaagcggtgaccgcggccctggctgctcggacccgggaacatgatggtcgctggagcagaaggcgctgagaagggaccacggcggcgctgggtcgtgcgagccagtagcgggctgaaacgtagaggccagaaccaggtctcagggggcactaaaggcggtcggaggtaatccccacaccgcttcctcctggaagtcaggctggccgggagctcccgtatccaggacggttggtcgcctctggcctggcagggatcctagtgtctcgggacctcccggtgacgcgcctgcctcccctgctgcaccataggcccgggagtacggcgtccccacagcttggaccggcaggggctcgtgaaatgtttgtcaagtggataaatgaccatggccgtggtctccgcgggaggtgaggaaactgaaagccaccgaggaaaaggggggcgctccttaagaagtgccgcggtcacgtgtacgtttcaaaagaatggcgtgactgagtagggaggggaccgcggagaccctcagaccctggactgtaaggagatgaggggccgtgaaggggaacccaggaaactgagtcctgaaagcaaggaggaacttccagaatgaagggcgccgacactccttcctgcctttgctcaagcggttccttcaccccgatcaagttccttcccatttctccatctgggggatcctgaacgtgcacatcctcagagaagccctcctggggtctccaattctagtttattgccccctcctatcgatcccccagcgcgctcatcgggcctgtggacaaggacaggtttgaagagaggattccctggatcgcggaagggctgcaggaatggcacagccccttccgaggatgccaaaggagcccgggcaaaggaaagtggccgtgcccgggcctgcctaccactagatccccacccacctatgactgctcagtcccgctctcctaccacacccacctttcccggcccaagccagcgcaccccgctgactccctgcccagtccaaactccaaggctgggcaaggcactgatccactgctggacagacccggggcagcctctgggtgaacagcagcgtgtccgccggcagcgaaccgagaccagcgagccgaccatgcggctgcacagacttcgtgcgcggctgagcgcggtggcctgtgggcttctgctgcttcttgtccggggccagggccaggactcagccagtcccatccggaccacacacacggggcaggtgctggggagtcttgtccatgtgaagggcgccaatgccggggtccaaaccttcctgggaattccatttgccaagccacctctaggtccgctgcgatttgcaccccctgagcccctcccttcctcacctccaccttctccctgccttctctcttctctcgtctgagcccccaggccttttccactttgagggaggtgcttcgaagaatgttgcccacacctaagtgttagaagcctatgtccgttcatccctgagaggtctgaaagaataaaaataaattctaaaaa

SEQ ID NO: 370398 - DNA, 534 bp, Homo sapiens
gtttctttgggggcaactacagtgagtcttcttcctttcccgggaggtgggctgggattctggctgggtctctgagcgatgattgattgtcctcactgcccagataaggaaactgaggctcagagagaggatgagatcaggtgtccaaggttttatagctccaaaagctgcaccaggattagaattcacgactcttcagactgtgagctgtgctccctctgcctctccccagccatgggtgtctggcctggtgcagaacaggtgtttcagggacatgtttatttcttcagtgactcccagagatagaaggaagaaggggcctttggggccatgaaggagcccaggatggagtcagccagagcctggtctacagggaaagtttggaaaaggggagggctggcttctgagggcagtggaagaaaaagcggagaagcaggactggggaccgaggtctcgggggccaaggacgagctccacctgggatgctgaggttggacatcctgatgaagacacatgtcctcttcctcttggcag

SEQ ID NO: 370399 - DNA, 4146 bp, Homo sapiens
gtcgatgctgtcgggaacctgctcgtcctcctcgcctgccgtcacaggccgctccccagagcgctggtagatgagggggttggcattctccaggaggccgccgccgaccccgccgccgcctaccatcgcggaaccaccaccgctgatcctagcaggcgtgcgcttccgctccaacccgcgcacttccggagaacgggaagggggcgtggcgtggcgacggagtcgcgcgagggacacgccgcgttgtgggttctcggcctgaggtgcgagagaagcggtgaccgcggccctggctgctcggacccgggaacatgatggtcgctggagcagaaggcgctgagaagggaccacggcggcgctgggtcgtgcgagccagtagcgggctgaaacgtagaggccagaaccaggtctcagggggcactaaaggcggtcggaggtaatccccacaccgcttcctcctggaagtcaggctggccgggagctcccgtatccaggacggttggtcgcctctggcctggcagggatcctagtgtctcgggacctcccggtgacgcgcctgcctcccctgctgcaccataggcccgggagtacggcgtccccacagcttggaccggcaggggctcgtgaaatgtttgtcaagtggataaatgaccatggccgtggtctccgcgggaggtgaggaaactgaaagccaccgaggaaaaggggggcgctccttaagaagtgccgcggtcacgtgtacgtttcaaaagaatggcgtgactgagtagggaggggaccgcggagaccctcagaccctggactgtaaggagatgaggggccgtgaaggggaacccaggaaactgagtcctgaaagcaaggaggaacttccagaatgaagggcgccgacactccttcctgcctttgctcaagcggttccttcaccccgatcaagttccttcccatttctccatctgggggatcctgaacgtgcacatcctcagagaagccctcctggggtctccaattctagtttattgccccctcctatcgatcccccagcgcgctcatcgggcctgtggacaaggacaggtttgaagagaggattccctggatcgcggaagggctgcaggaatggcacagccccttccgaggatgccaaaggagcccgggcaaaggaaagtggccgtgcccgggcctgcctaccactagatccccacccacctatgactgctcagtcccgctctcctaccacacccacctttcccggcccaagccagcgcaccccgctgactccctgcccagtccaaactccaaggctgggcaaggcactgatccactgctggacagacccggggcagcctctgggtgaacagcagcgtgtccgccggcagcgaaccgagaccagcgagccgaccatgcggctgcacagacttcgtgcgcggctgagcgcggtggcctgtgggcttctgctgcttcttgtccggggccagggccaggactcagccagtcccatccggaccacacacacggggcaggtgctggggagtcttgtccatgtgaagggcgccaatgccggggtccaaaccttcctgggaattccatttgccaagccacctctaggtccgctgcgatttgcaccccctgagccccctgaatcttggagtggtgtgagggatggaaccacccatccggccatgtgtctacaggacctcaccgcagtggagtcagagtttcttagccagttcaacatgaccttcccttccgactccatgtctgaggactgcctgtacctcagcatctacacgccggcccatagccatgaaggctctaacctgccggtgatggtgtggatccacggtggtgcgcttgtttttggcatggcttccttgtatgatggttccatgctggctgccttggagaacgtggtggtggtcatcatccagtaccgcctgggtgtcctgggcttcttcagcactggagacaagcacgcaaccggcaactggggctacctggaccaagtggctgcactacgctgggtccagcagaatatcgcccactttggaggcaaccctgaccgtgtcaccatttttggcgagtctgcgggtggcacgagtgtgtcttcgcttgttgtgtcccccatatcccaaggactcttccacggagccatcatggagagtggcgtggccctcctgcccggcctcattgccagctcagctgatgtcatctccacggtggtggccaacctgtctgcctgtgaccaagttgactctgaggccctggtgggctgcctgcggggcaagagtaaagaggagattcttgcaattaacaagcctttcaagatgatccccggagtggtggatggggtcttcctgcccaggcacccccaggagctgctggcctctgccgactttcagcctgtccctagcattgttggtgtcaacaacaatgaattcggctggctcatccccaaggtcatgaggatctatgatacccagaaggaaatggacagagaggcctcccaggctgctctgcagaaaatgttaacgctgctgatgttgcctcctacatttggtgacctgctgagggaggagtacattggggacaatggggatccccagaccctccaagcgcagttccaggagatgatggcggactccatgtttgtgatccctgcactccaagtagcacattttcagtgttcccgggcccctgtgtacttctacgagttccagcatcagcccagctggctcaagaacatcaggccaccgcacatgaaggcagaccatggtgatgagcttccttttgttttcagaagtttctttgggggcaactacattaaattcactgaggaagaggagcagctaagcaggaagatgatgaagtactgggccaactttgcgagaaatgggaaccccaatggcgagggtctgccacactggccgctgttcgaccaggaggagcaatacctgcagctgaacctacagcctgcggtgggccgggctctgaaggcccacaggctccagttctggaagaaggcgctgccccaaaagatccaggagctcgaggagcctgaagagagacacacagagctgtagctccctgtgccggggaggagggggtgggttcgctgacaggcgagggtcagcctgctgtgcccacacacacccactaaggagaaagaagttgattccttcattcacttcgccattcattcatacttccgtccatccattcagaaagcatttattaagaatttactcaggcatgatggcccatacttgtaatcccagctattgggaaggatgagatgggaggatggcttgaggccagaggtttgagaccgaccagccagggcaacacagtgagaccccttctcaaaaaaaaaaaaaaaaaagagagagtgtgtgattagaagctaaataggaaagttttgagcttcaagtcagtgaggagtaaaaaagatttttaaaaagcaaagaaaacaaaatataagggaaaaatatgagaaaaataaaaataaaaagagaataataggccaggcactgtggctcatgcccctaatcccagcacttttgggaggtcaaggtgagcagaacacctgaggacaggagtttgagaccagcctgcccaacgtggtgaaaccccatctctatgaaaaatacaaaaatcagacgggcacagtggtggtgcccacctgtgatcccagctactcaggaggctgaggcaggagaattacttgaacctgggaggcagaggttgcagtgagctgagattgtgccactgtactccagcctgggcaacaagagcgagactccgtttccaaaaaaataagagagaatagaagaagctactgcatgatgttagttaccaagcctgccatgggtcctctcttgctagacacactccatagatccccccactgagctgtggatgggcaaaccccggtggaatcccaccctccccaacaccccactgagccctgggccccctcctcccttcctcacctccaccttctccctgccttctctcttctctcgtctgagcccccaggccttttccactttgagggaggtgcttcgaagaatgttgcccacacctaagtgttagaagcctatgtccgttcatccctgagaggtctgaaagaataaaaataaattctaaaaa

SEQ ID NO: 370400 - DNA, 3562 bp, Homo sapiens
gtcgatgctgtcgggaacctgctcgtcctcctcgcctgccgtcacaggccgctccccagagcgctggtagatgagggggttggcattctccaggaggccgccgccgaccccgccgccgcctaccatcgcggaaccaccaccgctgatcctagcaggcgtgcgcttccgctccaacccgcgcacttccggagaacgggaagggggcgtggcgtggcgacggagtcgcgcgagggacacgccgcgttgtgggttctcggcctgaggtgcgagagaagcggtgaccgcggccctggctgctcggacccgggaacatgatggtcgctggagcagaaggcgctgagaagggaccacggcggcgctgggtcgtgcgagccagtagcgggctgaaacgtagaggccagaaccaggtctcagggggcactaaaggcggtcggaggtaatccccacaccgcttcctcctggaagtcaggctggccgggagctcccgtatccaggacggttggtcgcctctggcctggcagggatcctagtgtctcgggacctcccggtgacgcgcctgcctcccctgctgcaccataggcccgggagtacggcgtccccacagcttggaccggcaggggctcgtgaaatgtttgtcaagtggataaatgaccatggccgtggtctccgcgggaggtgaggaaactgaaagccaccgaggaaaaggggggcgctccttaagaagtgccgcggtcacgtgtacgtttcaaaagaatggcgtgactgagtagggaggggaccgcggagaccctcagaccctggactgtaaggagatgaggggccgtgaaggggaacccaggaaactgagtcctgaaagcaaggaggaacttccagaatgaagggcgccgacactccttcctgcctttgctcaagcggttccttcaccccgatcaagttccttcccatttctccatctgggggatcctgaacgtgcacatcctcagagaagccctcctggggtctccaattctagtttattgccccctcctatcgatcccccagcgcgctcatcgggcctgtggacaaggacaggtttgaagagaggattccctggatcgcggaagggctgcaggaatggcacagccccttccgaggatgccaaaggagcccgggcaaaggaaagtggccgtgcccgggcctgcctaccactagatccccacccacctatgactgctcagtcccgctctcctaccacacccacctttcccggcccaagccagcgcaccccgctgactccctgcccagtccaaactccaaggctgggcaaggcactgatccactgctggacagacccggggcagcctctgggtgaacagcagcgtgtccgccggcagcgaaccgagaccagcgagccgaccatgcggctgcacagacttcgtgcgcggctgagcgcggtggcctgtgggcttctgctgcttcttgtccggggccagggccaggactcagccagtcccatccggaccacacacacggggcaggtgctggggagtcttgtccatgtgaagggcgccaatgccggggtccaaaccttcctgggaattccatttgccaagccacctctaggtccgctgcgatttgcaccccctgagccccctgaatcttggagtggtgtgagggatggaaccacccatccggccatgtgtctacaggacctcaccgcagtggagtcagagtttcttagccagttcaacatgaccttcccttccgactccatgtctgaggactgcctgtacctcagcatctacacgccggcccatagccatgaaggctctaacctgccggtgatggtgtggatccacggtggtgcgcttgtttttggcatggcttccttgtatgatggttccatgctggctgccttggagaacgtggtggtggtcatcatccagtaccgcctgggtgtcctgggcttcttcagcactggagacaagcacgcaaccggcaactggggctacctggaccaagtggctgcactacgctgggtccagcagaatatcgcccactttggaggcaaccctgaccgtgtcaccatttttggcgagtctgcgggtggcacgagtgtgtcttcgcttgttgtgtcccccatatcccaaggactcttccacggagccatcatggagagtggcgtggccctcctgcccggcctcattgccagctcagctgatgtcatctccacggtggtggccaacctgtctgcctgtgaccaagttgactctgaggccctggtgggctgcctgcggggcaagagtaaagaggagattcttgcaattaacaagcctttcaagatgatccccggagtggtggatggggtcttcctgcccaggcacccccaggagctgctggcctctgccgactttcagcctgtccctagcattgttggtgtcaacaacaatgaattcggctggctcatccccaaggtcatgaggatctatgatacccagaaggaaatggacagagaggcctcccaggctgctctgcagaaaatgttaacgctgctgatgttgcctcctacatttggtgacctgctgagggaggagtacattggggacaatggggatccccagaccctccaagcgcagttccaggagatgatggcggactccatgtttgtgatccctgcactccaagtagcacattttcagtgttcccgggcccctgtgtacttctacgagttccagcatcagcccagctggctcaagaacatcaggccaccgcacatgaaggcagaccatggtgatgagcttccttttgttttcagaagtttctttgggggcaactacattaaattcactgaggaagaggagcagctaagcaggaagatgatgaagtactgggccaactttgcgagaaatgggaaccccaatggcgagggtctgccacactggccgctgttcgaccaggaggagcaatacctgcagctgaacctacagcctgcggtgggccgggctctgaaggcccacaggctccagttctggaagaaggcgctgccccaaaagatccaggagctcgaggagcctgaagagagacacacagagctgtagctccctgtgccggggaggagggggtgggttcgctgacaggcgagggtcagcctgctgtgcccacacacacccactaaggagaaagaagttgattccttcattcacttcgccattcattcatacttccgtccatccattcagaaagcatttattaagaatttactcaggcatgatggcccatacttgtaatcccagctattgggaaggatgagatgggaggatggcttgaggccagaggtttgagaccgaccagccagggcaacacagtgagaccccttctcaaaaaaaaaaaaaaaaaaaaaaaaaaaaaaacttcgggggctttattttcggggtgggggaaaaagggggttttgaaaagtgggccattgggccataagttgtgttttcttggaccccggtttttttgtgtccaggggggaaaaatcggggggcccccctaaagggggggcgaaataatttcggaaaagccagggtacctcgta

SEQ ID NO: 370401 - DNA, 2863 bp, Homo sapiens
  misc_feature (8)..(9): n is a, c, g, or t
actgttgnngcctactggaaattaaaaaaaaaaaagagaaaaaacgacccggggcagcctctgggtgaacagcagcgtgtccgccggcagcgaaccgagaccagcgagccgaccatgcggctgcacagacttcgtgcgcggctgagcgcggtggcctgtgggcttctgctgcttcttgtccggggccagggccaggactcagccagtcccatccggaccacacacacggggcaggtgctggggagtcttgtccatgtgaagggcgccaatgccggggtccaaaccttcctgggaattccatttgccaagccacctctaggtccgctgcgatttgcaccccctgagccccctgaatcttggagtggtgtgagggatggaaccacccatccggccatgtgtctacaggacctcaccgcagtggagtcagagtttcttagccagttcaacatgaccttcccttccgactccatgtctgaggactgcctgtacctcagcatctacacgccggcccatagccatgaaggctctaacctgccggtgatggtgtggatccacggtggtgcgcttgtttttggcatggcttccttgtatgatggttccatgctggctgccttggagaacgtggtggtggtcatcatccagtaccgcctgggtgtcctgggcttcttcagcactggagacaagcacgcaaccggcaactggggctacctggaccaagtggctgcactacgctgggtccagcagaatatcgcccactttggaggcaaccctgaccgtgtcaccatttttggcgagtctgcgggtggcacgagtgtgtcttcgcttgttgtgtcccccatatcccaaggactcttccacggagccatcatggagagtggcgtggccctcctgcccggcctcattgccagctcagctgatgtcatctccacggtggtggccaacctgtctgcctgtgaccaagttgactctgaggccctggtgggctgcctgcggggcaagagtaaagaggagattcttgcaattaacaagcctttcaagatgatccccggagtggtggatggggtcttcctgcccaggcacccccaggagctgctggcctctgccgactttcagcctgtccctagcattgttggtgtcaacaacaatgaattcggctggctcatccccaaggtcatgaggatctatgatacccagaaggaaatggacagagaggcctcccaggctgctctgcagaaaatgttaacgctgctgatgttgcctcctacatttggtgacctgctgagggaggagtacattggggacaatggggatccccagaccctccaagcgcagttccaggagatgatggcggactccatgtttgtgatccctgcactccaagtagcacattttcagtgttcccgggcccctgtgtacttctacgagttccagcatcagcccagctggctcaagaacatcaggccaccgcacatgaaggcagaccatggtgatgagcttccttttgttttcagaagtttctttgggggcaactacattaaattcactgaggaagaggagcagctaagcaggaagatgatgaagtactgggccaactttgcgagaaatgggaaccccaatggcgagggtctgccacactggccgctgttcgaccaggaggagcaatacctgcagctgaacctacagcctgcggtgggccgggctctgaaggcccacaggctccagttctggaagaaggcgctgccccaaaagatccaggagctcgaggagcctgaagagagacacacagagctgtagctccctgtgccggggaggagggggtgggttcgctgacaggcgagggtcagcctgctgtgcccacacacacccactaaggagaaagaagttgattccttcattcacttcgccattcattcatacttccgtccatccattcagaaagcatttattaagaatttactcaggcatgatggcccatacttgtaatcccagctattgggaaggatgagatgggaggatggcttgaggccagaggtttgagaccgaccagccagggcaacacagtgagaccccttctcaaaaaaaaaaaaaaaaaagagagagtgtgtgattagaagctaaataggaaagttttgagcttcaagtcagtgaggagtaaaaaagatttttaaaaagcaaagaaaacaaaatataagggaaaaatatgagaaaaataaaaataaaaagagaataataggccaggcactgtggctcatgcccctaatcccagcacttttgggaggtcaaggtgagcagaacacctgaggacaggagtttgagaccagcctgcccaacgtggtgaaaccccatctctatgaaaaatacaaaaatcagacgggcacagtggtggtgcccacctgtgatcccagctactcaggaggctgaggcaggagaattacttgaacctgggaggcagaggttgcagtgagctgagattgtgccactgtactccagcctgggcaacaagagcgagactccgtttccaaaaaaataagagagaatagaagaagctactgcatgatgttagttaccaagcctgccatgggtcctctcttgctagacacactccatagatccccccactgagctgtggatgggcaaaccccggtggaatcccaccctccccaacaccccactgagccctgggccccctcctcccttcctcacctccaccttctccctgccttctctcttctctcgtctgagcccccaggccttttccactttgagggaggtgcttcgaagaatgttgcccacacctaagtgttagaagcctatgtccgttcatccctgagaggtctgaaagaataaaaataaattctaaaaa

SEQ ID NO: 370402 - DNA, 3229 bp, Homo sapiens
gtcgatgctgtcgggaacctgctcgtcctcctcgcctgccgtcacaggccgctccccagagcgctggtagatgagggggttggcattctccaggaggccgccgccgaccccgccgccgcctaccatcgcggaaccaccaccgctgatcctagcaggcgtgcgcttccgctccaacccgcgcacttccggagaacgggaagggggcgtggcgtggcgacggagtcgcgcgagggacacgccgcgttgtgggttctcggcctgaggtgcgagagaagcggtgaccgcggccctggctgctcggacccgggaacatgatggtcgctggagcagaaggcgctgagaagggaccacggcggcgctgggtcgtgcgagccagtagcgggctgaaacgtagaggccagaaccaggtctcagggggcactaaaggcggtcggaggtaatccccacaccgcttcctcctggaagtcaggctggccgggagctcccgtatccaggacggttggtcgcctctggcctggcagggatcctagtgtctcgggacctcccggtgacgcgcctgcctcccctgctgcaccataggcccgggagtacggcgtccccacagcttggaccggcaggggctcgtgaaatgtttgtcaagtggataaatgaccatggccgtggtctccgcgggagccacctctaggtccgctgcgatttgcaccccctgagccccctgaatcttggagtggtgtgagggatggaaccacccatccggccatgtgtctacaggacctcaccgcagtggagtcagagtttcttagccagttcaacatgaccttcccttccgactccatgtctgaggactgcctgtacctcagcatctacacgccggcccatagccatgaaggctctaacctgccggtgatggtgtggatccacggtggtgcgcttgtttttggcatggcttccttgtatgatggttccatgctggctgccttggagaacgtggtggtggtcatcatccagtaccgcctgggtgtcctgggcttcttcagcactggagacaagcacgcaaccggcaactggggctacctggaccaagtggctgcactacgctgggtccagcagaatatcgcccactttggaggcaaccctgaccgtgtcaccatttttggcgagtctgcgggtggcacgagtgtgtcttcgcttgttgtgtcccccatatcccaaggactcttccacggagccatcatggagagtggcgtggccctcctgcccggcctcattgccagctcagctgatgtcatctccacggtggtggccaacctgtctgcctgtgaccaagttgactctgaggccctggtgggctgcctgcggggcaagagtaaagaggagattcttgcaattaacaagcctttcaagatgatccccggagtggtggatggggtcttcctgcccaggcacccccaggagctgctggcctctgccgactttcagcctgtccctagcattgttggtgtcaacaacaatgaattcggctggctcatccccaaggtcatgaggatctatgatacccagaaggaaatggacagagaggcctcccaggctgctctgcagaaaatgttaacgctgctgatgttgcctcctacatttggtgacctgctgagggaggagtacattggggacaatggggatccccagaccctccaagcgcagttccaggagatgatggcggactccatgtttgtgatccctgcactccaagtagcacattttcagtgttcccgggcccctgtgtacttctacgagttccagcatcagcccagctggctcaagaacatcaggccaccgcacatgaaggcagaccatggtgatgagcttccttttgttttcagaagtttctttgggggcaactacattaaattcactgaggaagaggagcagctaagcaggaagatgatgaagtactgggccaactttgcgagaaatgggaaccccaatggcgagggtctgccacactggccgctgttcgaccaggaggagcaatacctgcagctgaacctacagcctgcggtgggccgggctctgaaggcccacaggctccagttctggaagaaggcgctgccccaaaagatccaggagctcgaggagcctgaagagagacacacagagctgtagctccctgtgccggggaggagggggtgggttcgctgacaggcgagggtcagcctgctgtgcccacacacacccactaaggagaaagaagttgattccttcattcacttcgccattcattcatacttccgtccatccattcagaaagcatttattaagaatttactcaggcatgatggcccatacttgtaatcccagctattgggaaggatgagatgggaggatggcttgaggccagaggtttgagaccgaccagccagggcaacacagtgagaccccttctcaaaaaaaaaaaaaaaaaagagagagtgtgtgattagaagctaaataggaaagttttgagcttcaagtcagtgaggagtaaaaaagatttttaaaaagcaaagaaaacaaaatataagggaaaaatatgagaaaaataaaaataaaaagagaataataggccaggcactgtggctcatgcccctaatcccagcacttttgggaggtcaaggtgagcagaacacctgaggacaggagtttgagaccagcctgcccaacgtggtgaaaccccatctctatgaaaaatacaaaaatcagacgggcacagtggtggtgcccacctgtgatcccagctactcaggaggctgaggcaggagaattacttgaacctgggaggcagaggttgcagtgagctgagattgtgccactgtactccagcctgggcaacaagagcgagactccgtttccaaaaaaataagagagaatagaagaagctactgcatgatgttagttaccaagcctgccatgggtcctctcttgctagacacactccatagatccccccactgagctgtggatgggcaaaccccggtggaatcccaccctccccaacaccccactgagccctgggccccctcctcccttcctcacctccaccttctccctgccttctctcttctctcgtctgagcccccaggccttttccactttgagggaggtgcttcgaagaatgttgcccacacctaagtgttagaagcctatgtccgttcatccctgagaggtctgaaagaataaaaataaattctaaaaa

SEQ ID NO: 370403 - DNA, 3255 bp, Homo sapiens
gtcgatgctgtcgggaacctgctcgtcctcctcgcctgccgtcacaggccgctccccagagcgctggtagatgagggggttggcattctccaggaggccgccgccgaccccgccgccgcctaccatcgcggaaccaccaccgctgatcctagcaggcgtgcgcttccgctccaacccgcgcacttccggagaacgggaagggggcgtggcgtggcgacggagtcgcgcgagggacacgccgcgttgtgggttctcggcctgaggtgcgagagaagcggtgaccgcggccctggctgctcggacccgggaacatgatggtcgctggagcagaaggcgctgagaagggaccacggcggcgctgggtcgtgcgagccagtagcgggctgaaacgtagaggccagaaccaggtctcagggggcactaaaggcggtcggaggtaatccccacaccgcttcctcctggaagtcaggctggccgggagctcccgtatccaggacggttggtcgcctctggcctggcagggatcctagtgtctcgggacctcccggtgacgcgcctgcctcccctgctgcaccataggcccgggagtacggcgtccccacagcttggaccggcaggggctcgtgaaatgtttgtcaagtggataaatgaccatggccgtggtctccgcgggaggtgaggaaactgaaagccaccgaggaaaaggggggcgctccttaagaagtgccgcggtcacgtgtacgtttcaaaagaatggcgtgactgagtagggaggggaccgcggagaccctcagaccctggactgtaaggagatgaggggccgtgaaggggaacccaggaaactgagtcctgaaagcaaggaggaacttccagaatgaagggcgccgacactccttcctgcctttgctcaagcggttccttcaccccgatcaagttccttcccatttctccatctgggggatcctgaacgtgcacatcctcagagaagccctcctggggtctccaattctagtttattgccccctcctatcgatcccccagcgcgctcatcgggcctgtggacaaggacaggtttgaagagaggattccctggatcgcggaagggctgcaggaatggcacagccccttccgaggatgccaaaggagcccgggcaaaggaaagtggccgtgcccgggcctgcctaccactagatccccacccacctatgactgctcagtcccgctctcctaccacacccacctttcccggcccaagccagcgcaccccgctgactccctgcccagtccaaactccaaggctgggcaaggcactgatccactgctggacagacccggggcagcctctgggtgaacagcagcgtgtccgccggcagcgaaccgagaccagcgagccgaccatgcggctgcacagacttcgtgcgcggctgagcgcggtggcctgtgggcttctgctgcttcttgtccggggccagggccaggactcagccagtcccatccggaccacacacacggggcaggtgctggggagtcttgtccatgtgaagggcgccaatgccggggtccaaaccttcctgggaattccatttgccaagccacctctaggtccgctgcgatttgcaccccctgagccccctgaatcttggagtggtgtgagggatggaaccacccatccggccatgtgtctacaggacctcaccgcagtggagtcagagtttcttagccagttcaacatgaccttcccttccgactccatgtctgaggactgcctgtacctcagcatctacacgccggcccatagccatgaaggctctaacctgccggtgatggtgtggatccacggtggtgcgcttgtttttggcatggcttccttgtatgatggttccatgctggctgccttggagaacgtggtggtggtcatcatccagtaccgcctgggtgtcctgggcttcttcagcactggagacaagcacgcaaccggcaactggggctacctggaccaagtggctgcactacgctgggtccagcagaatatcgcccactttggaggcaaccctgaccgtgtcaccatttttggcgagtctgcgggtggcacgagtgtgtcttcgcttgttgtgtcccccatatcccaaggactcttccacggagccatcatggagagtggcgtggccctcctgcccggcctcattgccagctcagctgatgtcatctccacggtggtggccaacctgtctgcctgtgaccaagttgactctgaggccctggtgggctgcctgcggggcaagagtaaagaggagattcttgcaattaacaagcctttcaagatgatccccggagtggtggatggggtcttcctgcccaggcacccccaggagctgctggcctctgccgactttcagcctgtccctagcattgttggtgtcaacaacaatgaattcggctggctcatccccaaggtcatgaggatctatgatacccagaaggaaatggacagagaggcctcccaggctgctctgcagaaaatgttaacgctgctgatgttgcctcctacatttggtgacctgctgagggaggagtacattggggacaatggggatccccagaccctccaagcgcagttccaggagatgatggcggactccatgtttgtgatccctgcactccaagtagcacattttcagtgttcccgggcccctgtgtacttctacgagttccagcatcagcccagctggctcaagaacatcaggccaccgcacatgaaggcagaccatggtgatgagcttccttttgttttcagaagtttctttgggggcaactacattaaattcactgaggaagaggagcagctaagcaggaagatgatgaagtactgggccaactttgcgagaaatgggaaccccaatggcgagggtctgccacactggccgctgttcgaccaggaggagcaatacctgcagctgaacctacagcctgcggtgggccgggctctgaaggcccacaggctccagttctggaagaaggcgctgccccaaaagatccaggagctcgaggagcctgaagagagacacacagagctgtagctcccttcccttcctcacctccaccttctccctgccttctctcttctctcgtctgagcccccaggccttttccactttgagggaggtgcttcgaagaatgttgcccacacctaagtgttagaagcctatgtccgttcatccctgagaggtctgaaagaataaaaataaattctaaaaa

SEQ ID NO: 370404 - DNA, 3236 bp, Homo sapiens
gtcgatgctgtcgggaacctgctcgtcctcctcgcctgccgtcacaggccgctccccagagcgctggtagatgagggggttggcattctccaggaggccgccgccgaccccgccgccgcctaccatcgcggaaccaccaccgctgatcctagcaggcgtgcgcttccgctccaacccgcgcacttccggagaacgggaagggggcgtggcgtggcgacggagtcgcgcgagggacacgccgcgttgtgggttctcggcctgaggtgcgagagaagcggtgaccgcggccctggctgctcggacccgggaacatgatggtcgctggagcagaaggcgctgagaagggaccacggcggcgctgggtcgtgcgagccagtagcgggctgaaacgtagaggccagaaccaggtctcagggggcactaaaggcggtcggaggtaatccccacaccgcttcctcctggaagtcaggctggccgggagctcccgtatccaggacggttggtcgcctctggcctggcagggatcctagtgtctcgggacctcccggtgacgcgcctgcctcccctgctgcaccataggcccgggagtacggcgtccccacagcttggaccggcaggggctcgtgaaatgtttgtcaagtggataaatgaccatggccgtggtctccgcgggaggtgaggaaactgaaagccaccgaggaaaaggggggcgctccttaagaagtgccgcggtcacgtgtacgtttcaaaagaatggcgtgactgagtagggaggggaccgcggagaccctcagaccctggactgtaaggagatgaggggccgtgaaggggaacccaggaaactgagtcctgaaagcaaggaggaacttccagaatgaagggcgccgacactccttcctgcctttgctcaagcggttccttcaccccgatcaagttccttcccatttctccatctgggggatcctgaacgtgcacatcctcagagaagccctcctggggtctccaattctagtttattgccccctcctatcgatcccccagcgcgctcatcgggcctgtggacaaggacaggtttgaagagaggattccctggatcgcggaagggctgcaggaatggcacagccccttccgaggatgccaaaggagcccgggcaaaggaaagtggccgtgcccgggcctgcctaccactagatccccacccacctatgactgctcagtcccgctctcctaccacacccacctttcccggcccaagccagcgcaccccgctgactccctgcccagtccaaactccaaggctgggcaaggcactgatccactgctggacagacccggggcagcctctgggtgaacagcagcgtgtccgccggcagcgaaccgagaccagcgagccgaccatgcggctgcacagacttcgtgcgcggctgagcgcggtggcctgtgggcttctgctgcttcttgtccggggccagggccaggactcagccagtcccatccggaccacacacacggggcaggtgctggggagtcttgtccatgtgaagggcgccaatgccggggtccaaaccttcctgggaattccatttgccaagccacctctaggtccgctgcgatttgcaccccctgagccccctgaatcttggagtggtgtgagggatggaaccacccatccggccatgtgtctacaggacctcaccgcagtggagtcagagtttcttagccagttcaacatgaccttcccttccgactccatgtctgaggactgcctgtacctcagcatctacacgccggcccatagccatgaaggctctaacctgccggtgatggtgtggatccacggtggtgcgcttgtttttggcatggcttccttgtatgatggttccatgctggctgccttggagaacgtggtggtggtcatcatccagtaccgcctgggtgtcctgggcttcttcagcactggagacaagcacgcaaccggcaactggggctacctggaccaagtggctgcactacgctgggtccagcagaatatcgcccactttggaggcaaccctgaccgtgtcaccatttttggcgagtctgcgggtggcacgagtgtgtcttcgcttgttgtgtcccccatatcccaaggactcttccacggagccatcatggagagtggcgtggccctcctgcccggcctcattgccagctcagctgatgtcatctccacggtggtggccaacctgtctgcctgtgaccaagttgactctgaggccctggtgggctgcctgcggggcaagagtaaagaggagattcttgcaattaacaagcctttcaagatgatccccggagtggtggatggggtcttcctgcccaggcacccccaggagctgctggcctctgccgactttcagcctgtccctagcattgttggtgtcaacaacaatgaattcggctggctcatccccaaggtcatgaggatctatgatacccagaaggaaatggacagagaggcctcccaggctgctctgcagaaaatgttaacgctgctggttcccgggcccctgtgtacttctacgagttccagcatcagcccagctggctcaagaacatcaggccaccgcacatgaaggcagaccatggtgatgagcttccttttgttttcagaagtttctttgggggcaactacattaaattcactgaggaagaggagcagctaagcaggaagatgatgaagtactgggccaactttgcgagaaatgggaaccccaatggcgagggtctgccacactggccgctgttcgaccaggaggagcaatacctgcagctgaacctacagcctgcggtgggccgggctctgaaggcccacaggctccagttctggaagaaggcgctgccccaaaagatccaggagctcgaggagcctgaagagagacacacagagctgtagctccctgtgccggggaggagggggtgggttcgctgacaggcgagggtcagcctgctgtgcccacacacacccactaaggagaaagaagttgattccttcattcacttcgccattcattcatacttccgtccatccattcagaaagcatttattaagaatttactcaggcatgatggcccatacttgtaatcccagctattgggaaggatgagatgggaggatggcttgaggccagaggtttgagaccgaccagccaggcacaacagacgtgatccggtcgcttgtgtttgctggccggcgtgct

SEQ ID NO: 370405 - DNA, 464 bp, Homo sapiens
ttcgagaccagcttgggcaatgtggtgaaaccctgtctctgcaaaaaaaaagtaaaaaattagctgggtgtggttgcgcatgcctgtggtcccagctactcgtttgagcctgggaagtcgaggctgcagtcagctgtgattgtgccactgcactccagcctgggcaacagagtgagaccctgtctcaaataaaaaaaaaaaaaggctgagataggagtgatagacacagttatggggggcatcccacataatggagagcatccaaggccatactagactgcggaagtggggtgctgatatttgtgagatatttgtggccccctgctcatatcagtggtctgactttttccaatgtggcctctttcaagaggcaccttgattagactcttgagtcatcttagagacattagctgcccctggcatgaaattgcaatttggcccatagattttccaggaaaaaaaaa

SEQ ID NO: 370406 - DNA, 2876 bp, Homo sapiens
acgaagagtcaggggctgaggagcgagttgcggtagttgctgtgtaccatggtctcggaggtttctgtcccgcggcccgttaggtcctggtcgggttttcagcgaagcaggccgctcccctgcgtttcccagcgggcgtgctgtgccgcccaacaggctctgcctccaagtgccaaaaactcctagtaaagtttgcgcctcgcccgccgtccacaccccagcggccctgacgctgtcccctccgcgaccctcgcctctggaaaaagtgacaggcaaggccacgcccccgcgagggccggcctcgagcccgcagcccccagggcctgggacggtgaggggcgtgaatgcggcggggggcggggccgttgccgggggagggggccggggcgcatgcgcgctgcgcagcggggctgaatgtttcccaagtgtttgaaactggtatttgggttttccacgttggacaagtgcggctcggcggccagcggagcgcgccccttcccgctgcccgctccgctcctctcttctacccagcccagtgggcgagtgggcagcggcggccgcggcgctgggccctctcccgccggtgtgtgcgcgctcgtacgcgcggcccccggcgccagccccgccgcctgagagggggcctgcgccgccggccggggcgtgcgcccgggagccaccgccaccgcggcccgcgccctcaggcgctggggtccccgcggacccggaggcggcggacgggctcggcagatgtagccgccgggccgaagcaggagccggcgggggggcgccgggagagcgagggctttgcattttgcagtgctattttttgaggggggcggggggtggaggaagcggaaagccgcgccgagtcgccggggacctccggggtgaaccatgttgagtcctgccaacggggagcagctccacctggtgaactatgtggaggactacctggactccatcgagtccctgcctttcgacttgcagagaaatgtctcgctgatgcgggagatcgacgcgaaataccaagagatcctgaaggagctagacgagtgctacgagcgcttcagtcgcgagacagacggggcgcagaagcggcggatgctgcactgtgtgcagcgcgcgctgatccgcagccaggagctgggcgacgagaagatccagatcgtgagccagatggtggagctggtggagaaccgcacgcggcaggtggacagccacgtggagctgttcgaggcgcagcaggagctgggcgacacagcgggcaacagcggcaaggctggcgcggacaggcccaaaggcgaggcggcagcgcaggctgacaagcccaacagcaagcgctcacggcggcagcgcaacaacgagaaccgtgagaacgcgtccagcaaccacgaccacgacgacggcgcctcgggcacacccaaggagaagaaggccaagacctccaagaagaagaagcgctccaaggccaaggcggagcgagaggcgtcccctgccgacctccccatcgaccccaacgaacccacgtactgtctgtgcaaccaggtctcctatggggagatgatcggctgcgacaacgacgagtgccccatcgagtggttccacttctcgtgcgtggggctcaatcataaacccaagggcaagtggtactgtcccaagtgccggggggagaacgagaagaccatggacaaagccctggagaaatccaaaaaagagagggcttacaacaggtagtttgtggacaggcgcctggtgtgaggaggacaaaataaaccgtgtatttattacattgctgcctttgttgaggtgcaaggagtgtaaaatgtatatttttaaagaatgttagaaaaggaaccattcctttcatagggatggcagtgattctgtttgccttttgttttcattggtacacgtgtaacaagaaagtggtctgtggatcagcattttagaaactacaaatataggtttgattcaacacttaagtctcagactgatttcttgcgggaggagggggactaaactcaacctaacacattaaatgtggaaggaaaatatttcatttagcttttttattttaatacaagtaatattattactttatgaacaattttttttaattggccatgtcgccaaaaatacagcctatagtaaatgtgtttcttgctgccatgatgtatatccatataacaattcagtaacaaaggtttaaagtttgaagattattttttaaaaaggtaaatggttaaattttacatgacagatattttatctattggcctgttccccaaatggccattttaaaatgcttgggtacacttctcttaagtggtctagtcaaggaacctcaagtcatgcttttgctatcaccaatcatagtgtacccatctttaatttatatcaggtgtataaatgtacatttccaaatgaacttgcacttgttatattataattggaagtgcagtcagcagatgctgttgtgaagctaatgtcacaattatgtgcaaaggtgtgcttcctgctgtatgtgagctgtaaaaatgttacgtgaagaaataaatgaaacttggccagtttgttcctctagtagtatatttaattttgacataagtaacttttaaaatttgtcttaaaaatttatacaccagcaatttagacaaagccttaagcaaattttgtattattgttctcacttattattaataatgaagtagaagttacttaattgccagcaaataaatacgtgtcaaaaaagaatctgtattcagaccctgggtcaggaaattactgcccacttgtcaagttcagcccaccatctgtttgaacattatatgaagtttaaattctagtgtccataaataaagtttcagcggaacaca

SEQ ID NO: 370407 - DNA, 2043 bp, Homo sapiens
gagtaacccgataatatgccgttgtgcacggcgacgagaattcccagatatagcagtagcagtgatcccgggcctgtgggctcggggccggggctgcagttcggaccgcctcccgcgacccgcggggccggctcggagacagtttcaggccgcatctttgctgacccgagggtggggccgcgcgtggccgtggaaacagatcctgaaggagctagacgagtgctacgagcgcttcagtcgcgagacagacggggcgcagaagcggcggatgctgcactgtgtgcagcgcgcgctgatccgcagccaggagctgggcgacgagaagatccagatcgtgagccagatggtggagctggtggagaaccgcacgcggcaggtggacagccacgtggagctgttcgaggcgcagcaggagctgggcgacacagcgggcaacagcggcaaggctggcgcggacaggcccaaaggcgaggcggcagcgcaggctgacaagcccaacagcaagcgctcacggcggcagcgcaacaacgagaaccgtgagaacgcgtccagcaaccacgaccacgacgacggcgcctcgggcacacccaaggagaagaaggccaagacctccaagaagaagaagcgctccaaggccaaggcggagcgagaggcgtcccctgccgacctccccatcgaccccaacgaacccacgtactgtctgtgcaaccaggtctcctatggggagatgatcggctgcgacaacgacgagtgccccatcgagtggttccacttctcgtgcgtggggctcaatcataaacccaagggcaagtggtactgtcccaagtgccggggggagaacgagaagaccatggacaaagccctggagaaatccaaaaaagagagggcttacaacaggtagtttgtggacaggcgcctggtgtgaggaggacaaaataaaccgtgtatttattacattgctgcctttgttgaggtgcaaggagtgtaaaatgtatatttttaaagaatgttagaaaaggaaccattcctttcatagggatggcagtgattctgtttgccttttgttttcattggtacacgtgtaacaagaaagtggtctgtggatcagcattttagaaactacaaatataggtttgattcaacacttaagtctcagactgatttcttgcgggaggagggggactaaactcaacctaacacattaaatgtggaaggaaaatatttcatttagcttttttattttaatacaagtaatattattactttatgaacaattttttttaattggccatgtcgccaaaaatacagcctatagtaaatgtgtttcttgctgccatgatgtatatccatataacaattcagtaacaaaggtttaaagtttgaagattattttttaaaaaggtaaatggttaaattttacatgacagatattttatctattggcctgttccccaaatggccattttaaaatgcttgggtacacttctcttaagtggtctagtcaaggaacctcaagtcatgcttttgctatcaccaatcatagtgtacccatctttaatttatatcaggtgtataaatgtacatttccaaatgaacttgcacttgttatattataattggaagtgcagtcagcagatgctgttgtgaagctaatgtcacaattatgtgcaaaggtgtgcttcctgctgtatgtgagctgtaaaaatgttacgtgaagaaataaatgaaacttggccagtttgttcctctagtagtatatttaattttgacataagtaacttttaaaatttgtcttaaaaatttatacaccagcaatttagacaaagccttaagcaaattttgtattattgttctcacttattattaataatgaagtagaagttacttaattgccagcaaataaatacgtgtcaaaaaagaatctgtattcagaccctgggtcaggaaattactgcccacttgtcaagttcagcccaccatctgtttgaacattatatgaagtttaaattctagtgtccataaataaagtttcagcggaacaca

SEQ ID NO: 370408 - DNA, 3285 bp, Homo sapiens
acgaagagtcaggggctgaggagcgagttgcggtagttgctgtgtaccatggtctcggaggtttctgtcccgcggcccgttaggtcctggtcgggttttcagcgaagcaggccgctcccctgcgtttcccagcgggcgtgctgtgccgcccaacaggctctgcctccaagtgccaaaaactcctagtaaagtttgcgcctcgcccgccgtccacaccccagcggccctgacgctgtcccctccgcgaccctcgcctctggaaaaagtgacaggcaaggccacgcccccgcgagggccggcctcgagcccgcagcccccagggcctgggacggtgaggggcgtgaatgcggcggggggcggggccgttgccgggggagggggccggggcgcatgcgcgctgcgcagcggggctgaatgtttcccaagtgtttgaaactggtatttgggttttccacgttggacaagtgcggctcggcggccagcggagcgcgccccttcccgctgcccgctccgctcctctcttctacccagcccagtgggcgagtgggcagcggcggccgcggcgctgggccctctcccgccggtgtgtgcgcgctcgtacgcgcggcccccggcgccagccccgccgcctgagagggggcctgcgccgccggccggggcgtgcgcccgggagccaccgccaccgcggcccgcgccctcaggcgctggggtccccgcggacccggaggcggcggacgggctcggcagatgtagccgccgggccgaagcaggagccggcgggggggcgccgggagagcgagggctttgcattttgcagtgctattttttgaggggggcggggggtggaggaagcggaaagccgcgccgagtcgccggggacctccggggtgaaccatgttgagtcctgccaacggggagcagctccacctggtgaactatgtggaggactacctggactccatcgagtccctgcctttcgacttgcagagaaatgtctcgctgatgcgggagatcgacgcgaaataccaagagatcctgaaggagctagacgagtgctacgagcgcttcagtcgcgagacagacggggcgcagaagcggcggatgctgcactgtgtgcagcgcgcgctgatccgcagccaggagctgggcgacgagaagatccagatcgtgagccagatggtggagctggtggagaaccgcacgcggcaggtggacagccacgtggagctgttcgaggcgcagcaggagctgggcgacacagcgggcaacagcggcaaggctggcgcggacaggcccaaaggcgaggcggcagcgcaggctgacaagcccaacagcaagcgctcacggcggcagcgcaacaacgagaaccgtgagaacgcgtccagcaaccacgaccacgacgacggcgcctcgggcacacccaaggagaagaaggccaagacctccaagaagaagaagcgctccaaggccaaggcggagcgagaggcgtcccctgccgacctccccatcgaccccaacgaacccacgtactgtctgtgcaaccaggtctcctatggggagatgatcggctgcgacaacgacgagtgccccatcgagtggttccacttctcgtgcgtggggctcaatcataaacccaagggcaagtggtactgtcccaagtgccggggggagaacgagaagaccatggacaaagccctggagaaatccaaaaaagagagggcttacaacaggtagtttgtggacaggcgcctggtgtgaggaggacaaaataaaccgtgtatttattacattgctgcctttgttgaggtgcaaggagtgtaaaatgtatatttttaaagaatgttagaaaaggaaccattcctttcatagggatggcagtgattctgtttgccttttgttttcattggtacacgtgtaacaagaaagtggtctgtggatcagcattttagaaactacaaatataggtttgattcaacacttaagtctcagactgatttcttgcgggaggagggggactaaactcaacctaacacattaaatgtggaaggaaaatatttcatttagcttttttattttaatacaagtaatattattactttatgaacaattttttttaattggccatgtcgccaaaaatacagcctatagtaaatgtgtttcttgctgccatgatgtatatccatataacaattcagtaacaaaggtttaaagtttgaagattattttttaaaaaggtaaatggttaaattttacatgacagatattttatctattggcctgttccccaaatggccattttaaaatgcttgggtacacttctcttaagtggtctagtcaaggaacctcaagtcatgcttttgctatcaccaatcatagtgtacccatctttaatttatatcaggtgtataaatgtacatttccaaatgaacttgcacttgttatattataattggaagtgcagtcagcagatgctgttgtgaagctaatgtcacaattatgtgcaaaggtgtgcttcctgctgtatgtgagctgtaaaaatgttacgtgaagaaataaatgaaacttggccagtttgttcctctagtagtatatttaattttgacataagtaacttttaaaatttgtcttaaaaatttatacaccagcaatttagacaaagccttaagcaaattttgtattattgttctcacttattattaataatgaagtagaagttacttaattgccagcaaataaatacgtgtcaaaaaagaatctgtattcagaccctgggtcaggaaattactgcccacttgtcaagttcagcccaccatctgtttgaacattatatgaagtttaaattctagtgtccataaataaagtttcagcggaacacagccgtgcttatgtgcgtatgtattgtctgactgcttttgcaaaacggcagagttcaatagttgcacctgaaaccatttgacttgacaagccaaaactattttctggccctctgcagaaagggtttgctgacctctgatttagactagcatctaacattgatttgcccacatattgaaagggtcagtggagttttcatttattattttttatttttttgagattgagttccaggctggagtgcaatagcgcaatcttggctcaccgcaacctccgcctcccaggttcaagcgattgtcctgcctcagcctccccagtagctaggattacaggcatgcaccaccacgcctggctaattttgtattttcagtagagacgcggtttctccatgttggtcatggctggtctcgc

SEQ ID NO: 370409 - DNA, 2177 bp, Homo sapiens
acgaagagtcaggggctgaggagcgagttgcggtagttgctgtgtaccatggtctcggaggtttctgtcccgcggcccgttaggtcctggtcgggttttcagcgaagcaggccgctcccctgcgtttcccagcgggcgtgctgtgccgcccaacaggctctgcctccaagtgccaaaaactcctagtaaagtttgcgcctcgcccgccgtccacaccccagcggccctgacgctgtcccctccgcgaccctcgcctctggaaaaagtgacaggcaaggccacgcccccgcgagggccggcctcgagcccgcagcccccagggcctgggacgagatcctgaaggagctagacgagtgctacgagcgcttcagtcgcgagacagacggggcgcagaagcggcggatgctgcactgtgtgcagcgcgcgctgatccgcagccaggagctgggcgacgagaagatccagatcgtgagccagatggtggagctggtggagaaccgcacgcggcaggtggacagccacgtggagctgttcgaggcgcagcaggagctgggcgacacagcgggcaacagcggcaaggctggcgcggacaggcccaaaggcgaggcggcagcgcaggctgacaagcccaacagcaagcgctcacggcggcagcgcaacaacgagaaccgtgagaacgcgtccagcaaccacgaccacgacgacggcgcctcgggcacacccaaggagaagaaggccaagacctccaagaagaagaagcgctccaaggccaaggcggagcgagaggcgtcccctgccgacctccccatcgaccccaacgaacccacgtactgtctgtgcaaccaggtctcctatggggagatgatcggctgcgacaacgacgagtgccccatcgagtggttccacttctcgtgcgtggggctcaatcataaacccaagggcaagtggtactgtcccaagtgccggggggagaacgagaagaccatggacaaagccctggagaaatccaaaaaagagagggcttacaacaggtagtttgtggacaggcgcctggtgtgaggaggacaaaataaaccgtgtatttattacattgctgcctttgttgaggtgcaaggagtgtaaaatgtatatttttaaagaatgttagaaaaggaaccattcctttcatagggatggcagtgattctgtttgccttttgttttcattggtacacgtgtaacaagaaagtggtctgtggatcagcattttagaaactacaaatataggtttgattcaacacttaagtctcagactgatttcttgcgggaggagggggactaaactcaacctaacacattaaatgtggaaggaaaatatttcatttagcttttttattttaatacaagtaatattattactttatgaacaattttttttaattggccatgtcgccaaaaatacagcctatagtaaatgtgtttcttgctgccatgatgtatatccatataacaattcagtaacaaaggtttaaagtttgaagattattttttaaaaaggtaaatggttaaattttacatgacagatattttatctattggcctgttccccaaatggccattttaaaatgcttgggtacacttctcttaagtggtctagtcaaggaacctcaagtcatgcttttgctatcaccaatcatagtgtacccatctttaatttatatcaggtgtataaatgtacatttccaaatgaacttgcacttgttatattataattggaagtgcagtcagcagatgctgttgtgaagctaatgtcacaattatgtgcaaaggtgtgcttcctgctgtatgtgagctgtaaaaatgttacgtgaagaaataaatgaaacttggccagtttgttcctctagtagtatatttaattttgacataagtaacttttaaaatttgtcttaaaaatttatacaccagcaatttagacaaagccttaagcaaattttgtattattgttctcacttattattaataatgaagtagaagttacttaattgccagcaaataaatacgtgtcaaaaaagaatctgtattcagaccctgggtcaggaaattactgcccacttgtcaagttcagcccaccatctgtttgaacattatatgaagtttaaattctagtgtccataaataaagtttcagcggaacaca

SEQ ID NO: 370410 - DNA, 2729 bp, Homo sapiens
acgaagagtcaggggctgaggagcgagttgcggtagttgctgtgtaccatggtctcggaggtttctgtcccgcggcccgttaggtcctggtcgggttttcagcgaagcaggccgctcccctgcgtttcccagcgggcgtgctgtgccgcccaacaggctctgcctccaagtgccaaaaactcctagtaaagtttgcgcctcgcccgccgtccacaccccagcggccctgacgctgtcccctccgcgaccctcgcctctggaaaaagtgacaggcaaggccacgcccccgcgagggccggcctcgagcccgcagcccccagggcctgggacggtgaggggcgtgaatgcggcggggggcggggccgttgccgggggagggggccggggcgcatgcgcgctgcgcagcggggctgaatgtttcccaagtgtttgaaactggtatttgggttttccacgttggacaagtgcggctcggcggccagcggagcgcgccccttcccgctgcccgctccgctcctctcttctacccagcccagtgggcgagtgggcagcggcggccgcggcgctgggccctctcccgccggtgtgtgcgcgctcgtacgcgcggcccccggcgccagccccgccgcctgagagggggcctgcgccgccggccggggcgtgcgcccgggagccaccgccaccgcggcccgcgccctcaggcgctggggtccccgcggacccggaggcggcggacgggctcggcagatgtagccgccgggccgaagcaggagccggcgggggggcgccgggagagcgagggctttgcattttgcagtgctattttttgaggggggcggggggtggaggaagcggaaagccgcgccgagtcgccggggacctccggggtgaaccatgttgagtcctgccaacggggagcagctccacctggtgaactatgtggaggactacctggactccatcgagtccctgcctttcgacttgcagagaaatgtctcgctgatgcgggagatcgacgcgaaataccaagagatcctgaaggagctagacgagtgctacgagcgcttcagtcgcgagacagacggggcgcagaagcggcggatgctgcactgtgtgcagcgcgcgctgatccgcagccaggagctgggcgacgagaagatccagatcgtgagccagatggtggagctggtggagaaccgcacgcggcaggtggacagccacgtggagctgttcgaggccaaccacgaccacgacgacggcgcctcgggcacacccaaggagaagaaggccaagacctccaagaagaagaagcgctccaaggccaaggcggagcgagaggcgtcccctgccgacctccccatcgaccccaacgaacccacgtactgtctgtgcaaccaggtctcctatggggagatgatcggctgcgacaacgacgagtgccccatcgagtggttccacttctcgtgcgtggggctcaatcataaacccaagggcaagtggtactgtcccaagtgccggggggagaacgagaagaccatggacaaagccctggagaaatccaaaaaagagagggcttacaacaggtagtttgtggacaggcgcctggtgtgaggaggacaaaataaaccgtgtatttattacattgctgcctttgttgaggtgcaaggagtgtaaaatgtatatttttaaagaatgttagaaaaggaaccattcctttcatagggatggcagtgattctgtttgccttttgttttcattggtacacgtgtaacaagaaagtggtctgtggatcagcattttagaaactacaaatataggtttgattcaacacttaagtctcagactgatttcttgcgggaggagggggactaaactcaacctaacacattaaatgtggaaggaaaatatttcatttagcttttttattttaatacaagtaatattattactttatgaacaattttttttaattggccatgtcgccaaaaatacagcctatagtaaatgtgtttcttgctgccatgatgtatatccatataacaattcagtaacaaaggtttaaagtttgaagattattttttaaaaaggtaaatggttaaattttacatgacagatattttatctattggcctgttccccaaatggccattttaaaatgcttgggtacacttctcttaagtggtctagtcaaggaacctcaagtcatgcttttgctatcaccaatcatagtgtacccatctttaatttatatcaggtgtataaatgtacatttccaaatgaacttgcacttgttatattataattggaagtgcagtcagcagatgctgttgtgaagctaatgtcacaattatgtgcaaaggtgtgcttcctgctgtatgtgagctgtaaaaatgttacgtgaagaaataaatgaaacttggccagtttgttcctctagtagtatatttaattttgacataagtaacttttaaaatttgtcttaaaaatttatacaccagcaatttagacaaagccttaagcaaattttgtattattgttctcacttattattaataatgaagtagaagttacttaattgccagcaaataaatacgtgtcaaaaaagaatctgtattcagaccctgggtcaggaaattactgcccacttgtcaagttcagcccaccatctgtttgaacattatatgaagtttaaattctagtgtccataaataaagtttcagcggaacaca

SEQ ID NO: 370411 - DNA, 2135 bp, Homo sapiens
ttccggcgacggcgcgggggcagctgggaatccggaatgctgcccgatggccctgggtcctcgctgtggggcaatccgggcttgcagacgagttttagaaagagcgttttcgctacgtaaagcacattcgataaaggatatggaaaatactttgcagctggtgagaaatatcatacctcctctgtcttccacaaagcacaaagggcaagatggaagaataggcgtagttggaggctgtcaggagtacactggagccccatattttgcagcaatctcagctctcaaagtgagatcctgaaggagctagacgagtgctacgagcgcttcagtcgcgagacagacggggcgcagaagcggcggatgctgcactgtgtgcagcgcgcgctgatccgcagccaggagctgggcgacgagaagatccagatcgtgagccagatggtggagctggtggagaaccgcacgcggcaggtggacagccacgtggagctgttcgaggcgcagcaggagctgggcgacacagcgggcaacagcggcaaggctggcgcggacaggcccaaaggcgaggcggcagcgcaggctgacaagcccaacagcaagcgctcacggcggcagcgcaacaacgagaaccgtgagaacgcgtccagcaaccacgaccacgacgacggcgcctcgggcacacccaaggagaagaaggccaagacctccaagaagaagaagcgctccaaggccaaggcggagcgagaggcgtcccctgccgacctccccatcgaccccaacgaacccacgtactgtctgtgcaaccaggtctcctatggggagatgatcggctgcgacaacgacgagtgccccatcgagtggttccacttctcgtgcgtggggctcaatcataaacccaagggcaagtggtactgtcccaagtgccggggggagaacgagaagaccatggacaaagccctggagaaatccaaaaaagagagggcttacaacaggtagtttgtggacaggcgcctggtgtgaggaggacaaaataaaccgtgtatttattacattgctgcctttgttgaggtgcaaggagtgtaaaatgtatatttttaaagaatgttagaaaaggaaccattcctttcatagggatggcagtgattctgtttgccttttgttttcattggtacacgtgtaacaagaaagtggtctgtggatcagcattttagaaactacaaatataggtttgattcaacacttaagtctcagactgatttcttgcgggaggagggggactaaactcaacctaacacattaaatgtggaaggaaaatatttcatttagcttttttattttaatacaagtaatattattactttatgaacaattttttttaattggccatgtcgccaaaaatacagcctatagtaaatgtgtttcttgctgccatgatgtatatccatataacaattcagtaacaaaggtttaaagtttgaagattattttttaaaaaggtaaatggttaaattttacatgacagatattttatctattggcctgttccccaaatggccattttaaaatgcttgggtacacttctcttaagtggtctagtcaaggaacctcaagtcatgcttttgctatcaccaatcatagtgtacccatctttaatttatatcaggtgtataaatgtacatttccaaatgaacttgcacttgttatattataattggaagtgcagtcagcagatgctgttgtgaagctaatgtcacaattatgtgcaaaggtgtgcttcctgctgtatgtgagctgtaaaaatgttacgtgaagaaataaatgaaacttggccagtttgttcctctagtagtatatttaattttgacataagtaacttttaaaatttgtcttaaaaatttatacaccagcaatttagacaaagccttaagcaaattttgtattattgttctcacttattattaataatgaagtagaagttacttaattgccagcaaataaatacgtgtcaaaaaagaatctgtattcagaccctgggtcaggaaattactgcccacttgtcaagttcagcccaccatctgtttgaacattatatgaagtttaaattctagtgtccataaataaagtttcagcggaacaca

SEQ ID NO: 370412 - DNA, 2873 bp, Homo sapiens
agcggaggcggggaaggcgcccatctgcgctgcgctcgggggggcgcgggcagatcgctggcttggagaggactgtggcaggtgagaggacctgtgcgtcgttctctgcagacctggccgccccgggtgtcagagagaggtggcgagttcgtgtccgccgggaattgttggctgttggggaaactttcctgcgaggtcagtcaaggctttgggggctctgttttgaatgtggatcaccactcggagtttactaatgtttacaaggctgcgcagtagggaaacggaagagttgggtgggggcaaaaaaaaaaattgaccgctgtccccgaaagtactagacgcctctgccgggaaggcgcccctgcgcgttctatccgagacgtagcttcgcagcgaattttataggaacttcattagcatattatggaacgtcccgcctcagccccccagtagttggctgtgatgtccttcgtggaatgtccttatcattcccctgcggaacgattggtcgctgaggcggatgaaggcgggcctagcgcaataactggtatgggtctgtgtttccgctgtcttcttttttctttttcggggaggagcggggtggagggtggacgagttgatttgaacgtcttcgggtcgctcggcctccagccttggattggttcttctcgctgctggggcgggccgtgctcttccgccctgcggtgtggttggttctcctcctggcctccgccctccaaatcggcgattcccataggcggcggctctcggggtgcggggcgagtctcccgctggcctcctccccattggctggaggcctggcgggtgtcgccccggcccctctccccgctcagcccggccactttcgggcgcggatttatagcagtagcagtgatcccgggcctgtgggctcggggccggggctgcagttcggaccgcctcccgcgacccgcggggccggctcggagacagtttcaggccgcatctttgctgacccgagggtggggccgcgcgtggccgtggaaacagatcctgaaggagctagacgagtgctacgagcgcttcagtcgcgagacagacggggcgcagaagcggcggatgctgcactgtgtgcagcgcgcgctgatccgcagccaggagctgggcgacgagaagatccagatcgtgagccagatggtggagctggtggagaaccgcacgcggcaggtggacagccacgtggagctgttcgaggcgcagcaggagctgggcgacacagcgggcaacagcggcaaggctggcgcggacaggcccaaaggcgaggcggcagcgcaggctgacaagcccaacagcaagcgctcacggcggcagcgcaacaacgagaaccgtgagaacgcgtccagcaaccacgaccacgacgacggcgcctcgggcacacccaaggagaagaaggccaagacctccaagaagaagaagcgctccaaggccaaggcggagcgagaggcgtcccctgccgacctccccatcgaccccaacgaacccacgtactgtctgtgcaaccaggtctcctatggggagatgatcggctgcgacaacgacgagtgccccatcgagtggttccacttctcgtgcgtggggctcaatcataaacccaagggcaagtggtactgtcccaagtgccggggggagaacgagaagaccatggacaaagccctggagaaatccaaaaaagagagggcttacaacaggtagtttgtggacaggcgcctggtgtgaggaggacaaaataaaccgtgtatttattacattgctgcctttgttgaggtgcaaggagtgtaaaatgtatatttttaaagaatgttagaaaaggaaccattcctttcatagggatggcagtgattctgtttgccttttgttttcattggtacacgtgtaacaagaaagtggtctgtggatcagcattttagaaactacaaatataggtttgattcaacacttaagtctcagactgatttcttgcgggaggagggggactaaactcaacctaacacattaaatgtggaaggaaaatatttcatttagcttttttattttaatacaagtaatattattactttatgaacaattttttttaattggccatgtcgccaaaaatacagcctatagtaaatgtgtttcttgctgccatgatgtatatccatataacaattcagtaacaaaggtttaaagtttgaagattattttttaaaaaggtaaatggttaaattttacatgacagatattttatctattggcctgttccccaaatggccattttaaaatgcttgggtacacttctcttaagtggtctagtcaaggaacctcaagtcatgcttttgctatcaccaatcatagtgtacccatctttaatttatatcaggtgtataaatgtacatttccaaatgaacttgcacttgttatattataattggaagtgcagtcagcagatgctgttgtgaagctaatgtcacaattatgtgcaaaggtgtgcttcctgctgtatgtgagctgtaaaaatgttacgtgaagaaataaatgaaacttggccagtttgttcctctagtagtatatttaattttgacataagtaacttttaaaatttgtcttaaaaatttatacaccagcaatttagacaaagccttaagcaaattttgtattattgttctcacttattattaataatgaagtagaagttacttaattgccagcaaataaatacgtgtcaaaaaagaatctgtattcagaccctgggtcaggaaattactgcccacttgtcaagttcagcccaccatctgtttgaacattatatgaagtttaaattctagtgtccataaataaagtttcagcggaacaca

SEQ ID NO: 370413 - DNA, 2573 bp, Homo sapiens
acgaagagtcaggggctgaggagcgagttgcggtagttgctgtgtaccatggtctcggaggtttctgtcccgcggcccgttaggtcctggtcgggttttcagcgaagcaggccgctcccctgcgtttcccagcgggcgtgctgtgccgcccaacaggctctgcctccaagtgccaaaaactcctagtaaagtttgcgcctcgcccgccgtccacaccccagcggccctgacgctgtcccctccgcgaccctcgcctctggaaaaagtgacaggcaaggccacgcccccgcgagggccggcctcgagcccgcagcccccagggcctgggacggtgaggggcgtgaatgcggcggggggcggggccgttgccgggggagggggccggggcgcatgcgcgctgcgcagcggggctgaatgtttcccaagtgtttgaaactggtatttgggttttccacgttggacaagtgcggctcggcggccagcggagcgcgccccttcccgctgcccgctccgctcctctcttctacccagcccagtgggcgagtgggcagcggcggccgcggcgctgggccctctcccgccggtgtgtgcgcgctcgtacgcgcggcccccggcgccagccccgccgcctgagagggggcctgcgccgccggccggggcgtgcgcccgggagccaccgccaccgcggcccgcgccctcaggcgctggggtccccgcggacccggaggcggcggacgggctcggcagatgtagccgccgggccgaagcaggagccggcgggggggcgccgggagagcgagggctttgcattttgcagtgctattttttgaggggggcggggggtggaggaagcggaaagccgcgccgagtcgccggggacctccggggtgaaccatgttgagtcctgccaacggggagcagctccacctggtgaactatgtggaggactacctggactccatcgagtccctgcctttcgacttgcagagaaatgtctcgctgatgcgggagatcgacgcgaaataccaagagatcctgaaggagctagacgagtgctacgagcgcttcagtcgcgagacagacggggcgcagaagcggcggatgctgcactgtgtgcagcgcgcgctgatccgcagccaggagctgggcgacgagaagatccagatcgtgagccagatggtggagctggtggagaaccgcacgcggcaggtggacagccacgtggagctgttcgaggcgcagcaggagctgggcgacacagcgggcaacagcggcaaggctggcgcggacaggcccaaaggcgaggcggcagcgcaggctgacaagcccaacagcaagcgctcacggcggcagcgcaacaacgagaaccgtgagaacgcgtccagcaaccacgaccacgacgacggcgcctcgggcacacccaaggagaagaaggccaagacctccaagaagaagaagcgctccaaggccaaggcggagcgagaggcgtcccctgccgacctccccatcgaccccaacgaacccacgtactgtctgtgcaaccaggtctcctatggggagatgatcggctgcgacaacgacgagtgccccatcgagtggttccacttctcgtgcgtggggctcaatcataaacccaagggcaagtggtactgtcccaagtgccggggggagaacgagaagaccatggacaaagccctggagaaatccaaaaaagagagggcttacaacaggtagtttgtggacaggcgcctggtgtgaggaggacaaaataaaccgtgtatttattacattgctgcctttgttgaggtgcaaggagtgtaaaatgtatatttttaaagaatgttagaaaaggaaccattcctttcatagggatggcagtgattctgtttgccttttgttttcattggtacacgtgtaacaagaaagtggtctgtggatcagcattttagaaactacaaatataggtttgattcaacacttaagtctcagactgatttcttgcgggaggagggggactaaactcaacctaacacattaaatgtggaaggaaaatatttcatttagcttttttattttaatacaagtaatattattactttatgaacaattttttttaattggccatgtcgccaaaaatacagcctatagtaaatgtgtttcttgctgccatgatgtatatccatataacaattcagtaacaaaggtttaaagtttgaagattattttttaaaaaggtaaatggttaaattttacatgacagatattttatctattggcctgttccccaaatggccattttaaaatgcttgggtacacttctcttaagtggtctagtcaaggaacctcaagtcatgcttttgctatcaccaatcatagtgtacccatctttaatttatatcaggtgtataaatgtacatttccaaatgaacttgcacttgttatattataattggaagtgcagtcagcagatgctgttgtgaagctaatgtcacaattatgtgcaaaggtgtgcttcctgctgtatgtgagctgtaaaaatgttacgtgaagaaataaatgaaacttggccagtt

SEQ ID NO: 370414 - DNA, 2088 bp, Homo sapiens
  misc_feature (22)..(22): n is a, c, g, or t
cctccgagaacggtgtccatgncacagggcgggaagagataaggcctagggaaggcgcccctcgggcctatccacctcttctggggctcggcactaggaagcagcttccctctcaggcccctttgtctccaagccgttccaaactgagtaccgggagacgacacaaagggagggcggtgacggatggcgcaggcgcgggagccgcctaggctgctgggagtggtggtccggccgcggaatggagatcctgaaggagctagacgagtgctacgagcgcttcagtcgcgagacagacggggcgcagaagcggcggatgctgcactgtgtgcagcgcgcgctgatccgcagccaggagctgggcgacgagaagatccagatcgtgagccagatggtggagctggtggagaaccgcacgcggcaggtggacagccacgtggagctgttcgaggcgcagcaggagctgggcgacacagcgggcaacagcggcaaggctggcgcggacaggcccaaaggcgaggcggcagcgcaggctgacaagcccaacagcaagcgctcacggcggcagcgcaacaacgagaaccgtgagaacgcgtccagcaaccacgaccacgacgacggcgcctcgggcacacccaaggagaagaaggccaagacctccaagaagaagaagcgctccaaggccaaggcggagcgagaggcgtcccctgccgacctccccatcgaccccaacgaacccacgtactgtctgtgcaaccaggtctcctatggggagatgatcggctgcgacaacgacgagtgccccatcgagtggttccacttctcgtgcgtggggctcaatcataaacccaagggcaagtggtactgtcccaagtgccggggggagaacgagaagaccatggacaaagccctggagaaatccaaaaaagagagggcttacaacaggtagtttgtggacaggcgcctggtgtgaggaggacaaaataaaccgtgtatttattacattgctgcctttgttgaggtgcaaggagtgtaaaatgtatatttttaaagaatgttagaaaaggaaccattcctttcatagggatggcagtgattctgtttgccttttgttttcattggtacacgtgtaacaagaaagtggtctgtggatcagcattttagaaactacaaatataggtttgattcaacacttaagtctcagactgatttcttgcgggaggagggggactaaactcaacctaacacattaaatgtggaaggaaaatatttcatttagcttttttattttaatacaagtaatattattactttatgaacaattttttttaattggccatgtcgccaaaaatacagcctatagtaaatgtgtttcttgctgccatgatgtatatccatataacaattcagtaacaaaggtttaaagtttgaagattattttttaaaaaggtaaatggttaaattttacatgacagatattttatctattggcctgttccccaaatggccattttaaaatgcttgggtacacttctcttaagtggtctagtcaaggaacctcaagtcatgcttttgctatcaccaatcatagtgtacccatctttaatttatatcaggtgtataaatgtacatttccaaatgaacttgcacttgttatattataattggaagtgcagtcagcagatgctgttgtgaagctaatgtcacaattatgtgcaaaggtgtgcttcctgctgtatgtgagctgtaaaaatgttacgtgaagaaataaatgaaacttggccagtttgttcctctagtagtatatttaattttgacataagtaacttttaaaatttgtcttaaaaatttatacaccagcaatttagacaaagccttaagcaaattttgtattattgttctcacttattattaataatgaagtagaagttacttaattgccagcaaataaatacgtgtcaaaaaagaatctgtattcagaccctgggtcaggaaattactgcccacttgtcaagttcagcccaccatctgtttgaacattatatgaagtttaaattctagtgtccataaataaagtttcagcggaacaca

SEQ ID NO: 370415 - DNA, 2393 bp, Homo sapiens
agcggaggcggggaaggcgcccatctgcgctgcgctcgggggggcgcgggcagatcgctggcttggagaggactgtggcaggtgagaggacctgtgcgtcgttctctgcagacctggccgccccgggtgtcagagagaggtggcgagttcgtgtccgccgggaattgttggctgttggggaaactttcctgcgaggtcagtcaaggctttgggggctctgttttgaatgtggatcaccactcggagtttactaatgtttacaaggctgcgcagtagggaaacggaagagttgggtgggggcaaaaaaaaaaattgaccgctgtccccgaaagtactagacgcctctgccgggaaggcgcccctgcgcgttctatccgagacgtagcttcgcagcgaattttataggaacttcattagcatattatggaacgtcccgcctcagccccccagtagttggctgtgatgtccttcgtggaatgtccttatcattcccctgcggaacgattggtcgctgaggcggatgaaggcgggcctagcgcaataactgagatcctgaaggagctagacgagtgctacgagcgcttcagtcgcgagacagacggggcgcagaagcggcggatgctgcactgtgtgcagcgcgcgctgatccgcagccaggagctgggcgacgagaagatccagatcgtgagccagatggtggagctggtggagaaccgcacgcggcaggtggacagccacgtggagctgttcgaggcgcagcaggagctgggcgacacagcgggcaacagcggcaaggctggcgcggacaggcccaaaggcgaggcggcagcgcaggctgacaagcccaacagcaagcgctcacggcggcagcgcaacaacgagaaccgtgagaacgcgtccagcaaccacgaccacgacgacggcgcctcgggcacacccaaggagaagaaggccaagacctccaagaagaagaagcgctccaaggccaaggcggagcgagaggcgtcccctgccgacctccccatcgaccccaacgaacccacgtactgtctgtgcaaccaggtctcctatggggagatgatcggctgcgacaacgacgagtgccccatcgagtggttccacttctcgtgcgtggggctcaatcataaacccaagggcaagtggtactgtcccaagtgccggggggagaacgagaagaccatggacaaagccctggagaaatccaaaaaagagagggcttacaacaggtagtttgtggacaggcgcctggtgtgaggaggacaaaataaaccgtgtatttattacattgctgcctttgttgaggtgcaaggagtgtaaaatgtatatttttaaagaatgttagaaaaggaaccattcctttcatagggatggcagtgattctgtttgccttttgttttcattggtacacgtgtaacaagaaagtggtctgtggatcagcattttagaaactacaaatataggtttgattcaacacttaagtctcagactgatttcttgcgggaggagggggactaaactcaacctaacacattaaatgtggaaggaaaatatttcatttagcttttttattttaatacaagtaatattattactttatgaacaattttttttaattggccatgtcgccaaaaatacagcctatagtaaatgtgtttcttgctgccatgatgtatatccatataacaattcagtaacaaaggtttaaagtttgaagattattttttaaaaaggtaaatggttaaattttacatgacagatattttatctattggcctgttccccaaatggccattttaaaatgcttgggtacacttctcttaagtggtctagtcaaggaacctcaagtcatgcttttgctatcaccaatcatagtgtacccatctttaatttatatcaggtgtataaatgtacatttccaaatgaacttgcacttgttatattataattggaagtgcagtcagcagatgctgttgtgaagctaatgtcacaattatgtgcaaaggtgtgcttcctgctgtatgtgagctgtaaaaatgttacgtgaagaaataaatgaaacttggccagtttgttcctctagtagtatatttaattttgacataagtaacttttaaaatttgtcttaaaaatttatacaccagcaatttagacaaagccttaagcaaattttgtattattgttctcacttattattaataatgaagtagaagttacttaattgccagcaaataaatacgtgtcaaaaaagaatctgtattcagaccctgggtcaggaaattactgcccacttgtcaagttcagcccaccatctgtttgaacattatatgaagtttaaattctagtgtccataaataaagtttcagcggaacaca

SEQ ID NO: 370416 - DNA, 547 bp, Homo sapiens
aagcactggtatcaacgcagagtggcattacggccgttgttttcagatccatagcatggaaaataaaatgagctttatagtacatacaaaacaggctggtctcgtggtaaaactgttaatgaagctaaatggacagttaatgcccactgaaagaaattcatgaaagagaagtaactgttactcaagccaccacattttgtaatgcagagttttttttccgtgaaagatttcttaaaattagctgtggtgggagatcgcttaaacccaggaggtggaggttgtagtgagccaagattgcaccacggcacgctagcctgggtgacacagcaagactccatctcaaaaaaaaaaaaaaatttcctttcaacaaggcattatagtctctgtgtaatatatttctgtttacctattactttgtccagaatctgtacttatgttgggtgtgtaatataccaattagtttatataatatcctcataagctattctaattttggagagaaacacaaaaggttatagcatggatacgtctgtatacattttagaca

SEQ ID NO: 370417 - DNA, 1036 bp, Homo sapiens
actcagcaatatttcactatatggatttgttcagaaaacctcagccttcaactcaaaccatatcataaacccttgcaacatgttcgtgactggccagaaatacttgctgaattgactaatctggatcctcaaagggaaacacctcagctttttctaagaagagatgtgagacttcccttggaagttgaaaaacagattgaagacccactagctattcttattctctttgatgaagccagatataatttattgaagggcttttatacagctcctgatgctaagctgataacattggcaagtctgcttttgcaaatagtctatggaaattatgagagtaaaaaacacaagcaaggtttcctaaatgaagaaaatctaaaatccatcgtacctgttaccaaactgaaaagtaaggcacctcactggacaaatcgcatacttcatgaatacaagaatctcagtacaagtgaaggtgtcagtaaagaaatgcatcaccttcagcgcatgttcttacagaattgctgggaaattcctacttatggagcagcatttttcacaggacagatatttacaaaggcaagccccagcaatcataaagtcatccctgtgtatgtaggagtgaatataaaaggacttcatctcctcaacatggaaactaaggctttactcatcagtcttaagtatggttgttttatgtggcaattgggagatactgatacttgttttcagatccatagcatggaaaataaaatgagctttatagtacatacaaaacaggctggtctcgtggtaaaactgttaatgaagctaaatggacagttaatgcccactgaaagaaattcatgaaagagaagtaactgttactcaagccaccacattttgtaatgcagagttttttttccgtgaaagatttcttaaaatattacttttggccgagcatggtggctcacccctggtaattccagcactttgggaggctggggcaggcggatcacctgaagtcagagttcaagaccagcctggccaacatggtgaaacc

SEQ ID NO: 370418 - DNA, 3914 bp, Homo sapiens
acactgcgtccggggccagacgacgatatcagcgcggggtccccacaacgccatggggcagagccaactctcgagcgcgtgatcgaagcccgcagttttttcgcccccgtcacttccgggtgcgacaatctcttctgtccggccagccgctggagtcgttaggtgccgccttgcttctgacgagccacacgtttgcttcttccctgtgttcccagctggagggacatgagtgtccctgggccgtcgtctccggacggggccctgacacggccaccctactgcctggaggccggggagccgacgcctggtttaagtgacacttctccagatgaagggttaatagaggacttgactatagaagacaaagcagtggagcaactggcagaaggattgctttctcattatttgccagatctgcagagatcaaaacaagccctccaggaactcacacagaaccaagttgtattgttagacacactggaacaagagatttcaaaatttaaagaatgtcattctatgttggatattaatgctttgtttgctgaggctaaacactatcatgccaagttggtgaatataagaaaagagatgctgatgcttcatgaaaaaacatcaaagttaaaaaaaagagcacttaaactgcagcagaagaggcaaaaagaagagttggaaagggagcagcaacgagagaaggagtttgaaagagaaaagcagttaactgccagaccagccaaaaggatgtgaaaagttgtgtttgtgtgttttcttctcctgtcccatatttgggttatgatgactcaagtgtagactgaagttgaggtagtgccttatgccattatgtcatatgttgaaatccttattccggtattactgtgtctccatgccttttttccaagtagcagacgtcatgttgcatggtttttgatatttatatgtaagtttttcaaattttgcttaattttaaaatttattattttgatcttgaattatttataaactggaaagtggtttgattattgtgagtcaaaactctaagtggttaaaaattagtatgaattttttagcttcttaatgaatatggatttaaaactctccagttcttattttatgaaatgacttgcctttctggtaatacaatgctgattttttagtaattgccttttcattactttgttaagaagaaatgccagctgtttaatcacacctacccctggaaaagaggtaaaccttttgaacagttgaatttcatcagaagctctatagctttttggtgagaggaagtgatactctttattacaagaaacaaggaattaacaaaaataaggaacttgttgctacctttcttttctgttgaacattaaaaataatttggtttgtggactgggcatggtggcttatggaaaagaggtgagcctttgtgaagaacataatggaaaagtgcatgtacgggaaataacagcactttaggtgtagttcaggtgagcaagatgccagatagtttctactaaccatatactctttctgcttcttagcgtcgttgtcactgcttctgtggcttttgggttcaaagtagattatatatattcctaaagcttggtggaggtagtggagctatcacacactcaaatgagcttgtatatttataatacaatatagtattatagtaacagttatcatacactgagatatagtttctgtgcttgtaaaaaattcttgaagtgaggccgggtgcggtggctcatgcctgtaatcccaacgctttgggacgccgaggcgggtggatcatgaggtcaaaagattgagaccatcctggccaacatggtgaaaccccgtctctactagaaatacaaaaattagctgggtgtgggggcgtgcgcctgtagtcccagctacttgggaggctgaggttgcagtaagccaagatcgtgccactgcactccagccttggtgacagagcaagactccgtctccaaaaaaaagaaaaaaaaatttcttgaagtggaatgatgtacaccaaatacccactttatagataattacagggatggtgaaaaattagtaaatagcttcacaaaagaggcagcgtgatacctttagtgttttctagaatttttttctggatattatatgtaagaatttattgtttgagggaaatacgaggtttcattgtttaaaatcaagagtgtattgtttactgttttacagtattatttaatatccaactggtctccaatctccattacatagggactgtacagagcctgtgaagatgtatgaatggtatcttttataatccacaatacatttctggtaagatggaatcactacctctgatcacatatcaggctaacgatagagaaagcattaggtttaagttgagggctaagaactggtttgtttaaaggtttaaattgttggaaaagagcatttgccttctttaatgaatgatggtctcacaattcagttgactttgacctaatatttaagaatataaatatattttatttgaaaggctgagtgttgccctcaaacacttgctaaaactgcctagggcaggattcattagggcttgcagacaatgtcacctaaattgctgaatgtactcattataatatgatatctgacaaaggtagtacagcgtttctgagtcatttgggaccaactgcagtggttgtttaaaatgctggttcctgcacacaattctctatctactgaagcacatctgttttctttgtttgttttgctttgctttttgtttttaaagtttcccccagtgattccagtgcacctgaaaagttgagaaccacaggcttagtggtacgttggggtttcccacgctaggctgcatagcattataacctgggaacgttaaaaaaaatacagacattcttgattcttagtgtagttatgatgtggatcctacgtattttttaaaaaactctccagataattttgatgtcacgagtcactagtatagactatctatctagtgagttgtattataagcgatgaaatactttaaaagctacccagtaactcttgggattaattttatgaaataaattctgagctgctgcttttgatatagtcagacttaagactgaaccccagtagacaggcaatagatatagaattctggttagctaattgaacttttgtgacctgtttaaaaacaaatcaaatttattgaacaaatgacaaggcacaaatactttcagaattgtatttcagttttgaagatttaaaaaaaatgtgaaaataaatatatattagtatcctttattttaaagtcaattgtaaaccagaagtactgttattttggtgattaaaatccaaaactttagctgtatttcagtaacaaaaacataccttactagactgtgatggctcacacctgtaatcccagtgctttgggaggctgaggtgggaagattctttgagcccaggagttcaaggctgcagtgaattctgatcgcaccactgaactccagcccgtatgacagagtgagaccctgtttctaaaaacaaaacaaacaaacaaacaaacaacgtatcttactgactaaactggaatggaaatcttataattagtgttgtatttttctgcaaaatagtgaattggtacttgggagacttctgttctttgttgaaaaaaattgcctttgttttgaaattatatcacctgtgttctgaactaaaatgatgggagttcattttgtatttactttgcagtaagtatcatgtaaatatgcaaatgttgaatgtaatatagattgtgtcctcattgagtttttgggtgatacagtttataaatataacaattatacaccctcatacattcgtctgattttgagcttgtaagatgagaactgctttttacacatttaataaaaaaaggtctctgaattatctga

SEQ ID NO: 370419 - DNA, 3543 bp, Homo sapiens
acactgcgtccggggccagacgacgatatcagcgcggggtccccacaacgccatggggcagagccaactctcgagcgcgtgatcgaagcccgcagttttttcgcccccgtcacttccgggtgcgacaatctcttctgtccggccagccgctggagtcgttaggtgccgccttgcttctgacgagccacacgtttgcttcttccctgtgttcccagctggagggacatgagtgtccctgggccgtcgtctccggacggggccctgacacggccaccctactgcctggaggccggggagccgacgcctggtttaagtgacacttctccagatgaagggttaatagaggacttgactatagaagacaaagcagtggagcaactggcagaaggattgctttctcattatttgccagatctgcagagatcaaaacaagccctccaggaactcacacagaaccaagttgtattgttagacacactggaacaagagatttcaaaatttaaagaatgtcattctatgttggatattaatgctttgtttgctgaggctaaacactatcatgccaagttggtgaatataagaaaagagatgctgatgcttcatgaaaaaacatcaaagttaaaaaaaagagcacttaaactgcagcagaagaggcaaaaagaagagttggaaagggagcagcaacgagagaaggagtttgaaagagaaaagcagttaactgccagaccagccaaaaggatgtgaaaagttgtgtttgtgtgttttcttctcctgtcccatatttgggttatgatgactcaagtgtagactgaagttgaggtagtgccttatgccattatgtcatatgttgaaatccttattccgttggtgagaggaagtgatactctttattacaagaaacaaggaattaacaaaaataaggaacttgttgctacctttcttttctgttgaacattaaaaataatttggtttgtggactgggcatggtggcttatggaaaagaggtgagcctttgtgaagaacataatggaaaagtgcatgtacgggaaataacagcactttaggtgtagttcaggtgagcaagatgccagatagtttctactaaccatatactctttctgcttcttagcgtcgttgtcactgcttctgtggcttttgggttcaaagtagattatatatattcctaaagcttggtggaggtagtggagctatcacacactcaaatgagcttgtatatttataatacaatatagtattatagtaacagttatcatacactgagatatagtttctgtgcttgtaaaaaattcttgaagtgaggccgggtgcggtggctcatgcctgtaatcccaacgctttgggacgccgaggcgggtggatcatgaggtcaaaagattgagaccatcctggccaacatggtgaaaccccgtctctactagaaatacaaaaattagctgggtgtgggggcgtgcgcctgtagtcccagctacttgggaggctgaggcaggagaattgcttgaacccaggaggcagaggttgcagtaagccaagatcgtgccactgcactccagccttggtgacagagcaagactccgtctccaaaaaaaagaaaaaaaaatttcttgaagtggaatgatgtacaccaaatacccactttatagataattacagggatggtgaaaaattagtaaatagcttcacaaaagaggcagcgtgatacctttagtgttttctagaatttttttctggatattatatgtaagaatttattgtttgagggaaatacgaggtttcattgtttaaaatcaagagtgtattgtttactgttttacagtattatttaatatccaactggtctccaatctccattacatagggactgtacagagcctgtgaagatgtatgaatggtatcttttataatccacaatacatttctggtaagatggaatcactacctctgatcacatatcaggctaacgatagagaaagcattaggtttaagttgagggctaagaactggtttgtttaaaggtttaaattgttggaaaagagcatttgccttctttaatgaatgatggtctcacaattcagttgactttgacctaatatttaagaatataaatatattttatttgaaaggctgagtgttgccctcaaacacttgctaaaactgcctagggcaggattcattagggcttgcagacaatgtcacctaaattgctgaatgtactcattataatatgatatctgacaaaggtagtacagcgtttctgagtcatttgggaccaactgcagtggttgtttaaaatgctggttcctgcacacaattctctatctactgaagcacatctgttttctttgtttgttttgctttgctttttgtttttaaagtttcccccagtgattccagtgcacctgaaaagttgagaaccacaggcttagtggtacgttggggtttcccacgctaggctgcatagcattataacctgggaacgttaaaaaaaatacagacattcttgattcttagtgtagttatgatgtggatcctacgtattttttaaaaaactctccagataattttgatgtcacgagtcactagtatagactatctatctagtgagttgtattataagcgatgaaatactttaaaagctacccagtaactcttgggattaattttatgaaataaattctgagctgctgcttttgatatagtcagacttaagactgaaccccagtagacaggcaatagatatagaattctggttagctaattgaacttttgtgacctgtttaaaaacaaatcaaatttattgaacaaatgacaaggcacaaatactttcagaattgtatttcagttttgaagatttaaaaaaaatgtgaaaataaatatatattagtatcctttattttaaagtcaattgtaaaccagaagtactgttattttggtgattaaaatccaaaactttagctgtatttcagtaacaaaaacataccttactagactgtgatggctcacacctgtaatcccagtgctttgggaggctgaggtgggaagattctttgagcccaggagttcaaggctgcagtgaattctgatcgcaccactgaactccagcccgtatgacagagtgagaccctgtttctaaaaacaaaacaaacaaacaaacaaacaacgtatcttactgactaaactggaatggaaatcttataattagtgttgtatttttctgcaaaatagtgaattggtacttgggagacttctgttctttgttgaaaaaaattgcctttgttttgaaattatatcacctgtgttctgaactaaaatgatgggagttcattttgtatttactttgcagtaagtatcatgtaaatatgcaaatgttgaatgtaatatagattgtgtcctcattgagtttttgggtgatacagtttataaatataacaattatacaccctcatacattcgtctgattttgagcttgtaagatgagaactgctttttacacatttaataaaaaaaggtctctgaattatctga

SEQ ID NO: 370420 - DNA, 3823 bp, Homo sapiens
acactgcgtccggggccagacgacgatatcagcgcggggtccccacaacgccatggggcagagccaactctcgagcgcgtgatcgaagcccgcagttttttcgcccccgtcacttccgggtgcgacaatctcttctgtccggccagccgctggagtcgttaggtgccgccttgcttctgacgagccacacgtttgcttcttccctgtgttcccagctggagggacatgagtgtccctgggccgtcgtctccggacggggccctgacacggccaccctactgcctggaggccggggagccgacgcctgtgtgtgtttttgtttcagaacagaaccaagttgtattgttagacacactggaacaagagatttcaaaatttaaagaatgtcattctatgttggatattaatgctttgtttgctgaggctaaacactatcatgccaagttggtgaatataagaaaagagatgctgatgcttcatgaaaaaacatcaaagttaaaaaaaagagcacttaaactgcagcagaagaggcaaaaagaagagttggaaagggagcagcaacgagagaaggagtttgaaagagaaaagcagttaactgccagaccagccaaaaggatgtgaaaagttgtgtttgtgtgttttcttctcctgtcccatatttgggttatgatgactcaagtgtagactgaagttgaggtagtgccttatgccattatgtcatatgttgaaatccttattccggtattactgtgtctccatgccttttttccaagtagcagacgtcatgttgcatggtttttgatatttatatgtaagtttttcaaattttgcttaattttaaaatttattattttgatcttgaattatttataaactggaaagtggtttgattattgtgagtcaaaactctaagtggttaaaaattagtatgaattttttagcttcttaatgaatatggatttaaaactctccagttcttattttatgaaatgacttgcctttctggtaatacaatgctgattttttagtaattgccttttcattactttgttaagaagaaatgccagctgtttaatcacacctacccctggaaaagaggtaaaccttttgaacagttgaatttcatcagaagctctatagctttttggtgagaggaagtgatactctttattacaagaaacaaggaattaacaaaaataaggaacttgttgctacctttcttttctgttgaacattaaaaataatttggtttgtggactgggcatggtggcttatggaaaagaggtgagcctttgtgaagaacataatggaaaagtgcatgtacgggaaataacagcactttaggtgtagttcaggtgagcaagatgccagatagtttctactaaccatatactctttctgcttcttagcgtcgttgtcactgcttctgtggcttttgggttcaaagtagattatatatattcctaaagcttggtggaggtagtggagctatcacacactcaaatgagcttgtatatttataatacaatatagtattatagtaacagttatcatacactgagatatagtttctgtgcttgtaaaaaattcttgaagtgaggccgggtgcggtggctcatgcctgtaatcccaacgctttgggacgccgaggcgggtggatcatgaggtcaaaagattgagaccatcctggccaacatggtgaaaccccgtctctactagaaatacaaaaattagctgggtgtgggggcgtgcgcctgtagtcccagctacttgggaggctgaggcaggagaattgcttgaacccaggaggcagaggttgcagtaagccaagatcgtgccactgcactccagccttggtgacagagcaagactccgtctccaaaaaaaagaaaaaaaaatttcttgaagtggaatgatgtacaccaaatacccactttatagataattacagggatggtgaaaaattagtaaatagcttcacaaaagaggcagcgtgatacctttagtgttttctagaatttttttctggatattatatgtaagaatttattgtttgagggaaatacgaggtttcattgtttaaaatcaagagtgtattgtttactgttttacagtattatttaatatccaactggtctccaatctccattacatagggactgtacagagcctgtgaagatgtatgaatggtatcttttataatccacaatacatttctggtaagatggaatcactacctctgatcacatatcaggctaacgatagagaaagcattaggtttaagttgagggctaagaactggtttgtttaaaggtttaaattgttggaaaagagcatttgccttctttaatgaatgatggtctcacaattcagttgactttgacctaatatttaagaatataaatatattttatttgaaaggctgagtgttgccctcaaacacttgctaaaactgcctagggcaggattcattagggcttgcagacaatgtcacctaaattgctgaatgtactcattataatatgatatctgacaaaggtagtacagcgtttctgagtcatttgggaccaactgcagtggttgtttaaaatgctggttcctgcacacaattctctatctactgaagcacatctgttttctttgtttgttttgctttgctttttgtttttaaagtttcccccagtgattccagtgcacctgaaaagttgagaaccacaggcttagtggtacgttggggtttcccacgctaggctgcatagcattataacctgggaacgttaaaaaaaatacagacattcttgattcttagtgtagttatgatgtggatcctacgtattttttaaaaaactctccagataattttgatgtcacgagtcactagtatagactatctatctagtgagttgtattataagcgatgaaatactttaaaagctacccagtaactcttgggattaattttatgaaataaattctgagctgctgcttttgatatagtcagacttaagactgaaccccagtagacaggcaatagatatagaattctggttagctaattgaacttttgtgacctgtttaaaaacaaatcaaatttattgaacaaatgacaaggcacaaatactttcagaattgtatttcagttttgaagatttaaaaaaaatgtgaaaataaatatatattagtatcctttattttaaagtcaattgtaaaccagaagtactgttattttggtgattaaaatccaaaactttagctgtatttcagtaacaaaaacataccttactagactgtgatggctcacacctgtaatcccagtgctttgggaggctgaggtgggaagattctttgagcccaggagttcaaggctgcagtgaattctgatcgcaccactgaactccagcccgtatgacagagtgagaccctgtttctaaaaacaaaacaaacaaacaaacaaacaacgtatcttactgactaaactggaatggaaatcttataattagtgttgtatttttctgcaaaatagtgaattggtacttgggagacttctgttctttgttgaaaaaaattgcctttgttttgaaattatatcacctgtgttctgaactaaaatgatgggagttcattttgtatttactttgcagtaagtatcatgtaaatatgcaaatgttgaatgtaatatagattgtgtcctcattgagtttttgggtgatacagtttataaatataacaattatacaccctcatacattcgtctgattttgagcttgtaagatgagaactgctttttacacatttaataaaaaaaggtctctgaattatctga

SEQ ID NO: 370421 - DNA, 3858 bp, Homo sapiens
acactgcgtccggggccagacgacgatatcagcgcggggtccccacaacgccatggggcagagccaactctcgagcgcgtgatcgaagcccgcagttttttcgcccccgtcacttccgggtgcgacaatctcttctgtccggccagccgctggagtcgttaggtgccgccttgcttctgacgagccacacgtttgcttcttccctgtgttcccagctggagggacatgagtgtccctgggccgtcgtctccggacggggccctgacacggccaccctactgcctggaggccggggagccgacgcctggtttaagtgacacttctccagatgaagggttaatagaggacttgactatagaagacaaagcagtggagcaactggcagaaggattgctttctcattatttgccagatctgcagagatcaaaacaagccctccaggaactcactttgctgaggctaaacactatcatgccaagttggtgaatataagaaaagagatgctgatgcttcatgaaaaaacatcaaagttaaaaaaaagagcacttaaactgcagcagaagaggcaaaaagaagagttggaaagggagcagcaacgagagaaggagtttgaaagagaaaagcagttaactgccagaccagccaaaaggatgtgaaaagttgtgtttgtgtgttttcttctcctgtcccatatttgggttatgatgactcaagtgtagactgaagttgaggtagtgccttatgccattatgtcatatgttgaaatccttattccggtattactgtgtctccatgccttttttccaagtagcagacgtcatgttgcatggtttttgatatttatatgtaagtttttcaaattttgcttaattttaaaatttattattttgatcttgaattatttataaactggaaagtggtttgattattgtgagtcaaaactctaagtggttaaaaattagtatgaattttttagcttcttaatgaatatggatttaaaactctccagttcttattttatgaaatgacttgcctttctggtaatacaatgctgattttttagtaattgccttttcattactttgttaagaagaaatgccagctgtttaatcacacctacccctggaaaagaggtaaaccttttgaacagttgaatttcatcagaagctctatagctttttggtgagaggaagtgatactctttattacaagaaacaaggaattaacaaaaataaggaacttgttgctacctttcttttctgttgaacattaaaaataatttggtttgtggactgggcatggtggcttatggaaaagaggtgagcctttgtgaagaacataatggaaaagtgcatgtacgggaaataacagcactttaggtgtagttcaggtgagcaagatgccagatagtttctactaaccatatactctttctgcttcttagcgtcgttgtcactgcttctgtggcttttgggttcaaagtagattatatatattcctaaagcttggtggaggtagtggagctatcacacactcaaatgagcttgtatatttataatacaatatagtattatagtaacagttatcatacactgagatatagtttctgtgcttgtaaaaaattcttgaagtgaggccgggtgcggtggctcatgcctgtaatcccaacgctttgggacgccgaggcgggtggatcatgaggtcaaaagattgagaccatcctggccaacatggtgaaaccccgtctctactagaaatacaaaaattagctgggtgtgggggcgtgcgcctgtagtcccagctacttgggaggctgaggcaggagaattgcttgaacccaggaggcagaggttgcagtaagccaagatcgtgccactgcactccagccttggtgacagagcaagactccgtctccaaaaaaaagaaaaaaaaatttcttgaagtggaatgatgtacaccaaatacccactttatagataattacagggatggtgaaaaattagtaaatagcttcacaaaagaggcagcgtgatacctttagtgttttctagaatttttttctggatattatatgtaagaatttattgtttgagggaaatacgaggtttcattgtttaaaatcaagagtgtattgtttactgttttacagtattatttaatatccaactggtctccaatctccattacatagggactgtacagagcctgtgaagatgtatgaatggtatcttttataatccacaatacatttctggtaagatggaatcactacctctgatcacatatcaggctaacgatagagaaagcattaggtttaagttgagggctaagaactggtttgtttaaaggtttaaattgttggaaaagagcatttgccttctttaatgaatgatggtctcacaattcagttgactttgacctaatatttaagaatataaatatattttatttgaaaggctgagtgttgccctcaaacacttgctaaaactgcctagggcaggattcattagggcttgcagacaatgtcacctaaattgctgaatgtactcattataatatgatatctgacaaaggtagtacagcgtttctgagtcatttgggaccaactgcagtggttgtttaaaatgctggttcctgcacacaattctctatctactgaagcacatctgttttctttgtttgttttgctttgctttttgtttttaaagtttcccccagtgattccagtgcacctgaaaagttgagaaccacaggcttagtggtacgttggggtttcccacgctaggctgcatagcattataacctgggaacgttaaaaaaaatacagacattcttgattcttagtgtagttatgatgtggatcctacgtattttttaaaaaactctccagataattttgatgtcacgagtcactagtatagactatctatctagtgagttgtattataagcgatgaaatactttaaaagctacccagtaactcttgggattaattttatgaaataaattctgagctgctgcttttgatatagtcagacttaagactgaaccccagtagacaggcaatagatatagaattctggttagctaattgaacttttgtgacctgtttaaaaacaaatcaaatttattgaacaaatgacaaggcacaaatactttcagaattgtatttcagttttgaagatttaaaaaaaatgtgaaaataaatatatattagtatcctttattttaaagtcaattgtaaaccagaagtactgttattttggtgattaaaatccaaaactttagctgtatttcagtaacaaaaacataccttactagactgtgatggctcacacctgtaatcccagtgctttgggaggctgaggtgggaagattctttgagcccaggagttcaaggctgcagtgaattctgatcgcaccactgaactccagcccgtatgacagagtgagaccctgtttctaaaaacaaaacaaacaaacaaacaaacaacgtatcttactgactaaactggaatggaaatcttataattagtgttgtatttttctgcaaaatagtgaattggtacttgggagacttctgttctttgttgaaaaaaattgcctttgttttgaaattatatcacctgtgttctgaactaaaatgatgggagttcattttgtatttactttgcagtaagtatcatgtaaatatgcaaatgttgaatgtaatatagattgtgtcctcattgagtttttgggtgatacagtttataaatataacaattatacaccctcatacattcgtctgattttgagcttgtaagatgagaactgctttttacacatttaataaaaaaaggtctctgaattatctga

SEQ ID NO: 370422 - DNA, 3482 bp, Homo sapiens
attggttatttgtcatacggcagtggtgggggatggatttaccagaaagatgatcagcttataattcagagagtttgctgaggctaaacactatcatgccaagttggtgaatataagaaaagagatgctgatgcttcatgaaaaaacatcaaagttaaaaaaaagagcacttaaactgcagcagaagaggcaaaaagaagagttggaaagggagcagcaacgagagaaggagtttgaaagagaaaagcagttaactgccagaccagccaaaaggatgtgaaaagttgtgtttgtgtgttttcttctcctgtcccatatttgggttatgatgactcaagtgtagactgaagttgaggtagtgccttatgccattatgtcatatgttgaaatccttattccggtattactgtgtctccatgccttttttccaagtagcagacgtcatgttgcatggtttttgatatttatatgtaagtttttcaaattttgcttaattttaaaatttattattttgatcttgaattatttataaactggaaagtggtttgattattgtgagtcaaaactctaagtggttaaaaattagtatgaattttttagcttcttaatgaatatggatttaaaactctccagttcttattttatgaaatgacttgcctttctggtaatacaatgctgattttttagtaattgccttttcattactttgttaagaagaaatgccagctgtttaatcacacctacccctggaaaagaggtaaaccttttgaacagttgaatttcatcagaagctctatagctttttggtgagaggaagtgatactctttattacaagaaacaaggaattaacaaaaataaggaacttgttgctacctttcttttctgttgaacattaaaaataatttggtttgtggactgggcatggtggcttatggaaaagaggtgagcctttgtgaagaacataatggaaaagtgcatgtacgggaaataacagcactttaggtgtagttcaggtgagcaagatgccagatagtttctactaaccatatactctttctgcttcttagcgtcgttgtcactgcttctgtggcttttgggttcaaagtagattatatatattcctaaagcttggtggaggtagtggagctatcacacactcaaatgagcttgtatatttataatacaatatagtattatagtaacagttatcatacactgagatatagtttctgtgcttgtaaaaaattcttgaagtgaggccgggtgcggtggctcatgcctgtaatcccaacgctttgggacgccgaggcgggtggatcatgaggtcaaaagattgagaccatcctggccaacatggtgaaaccccgtctctactagaaatacaaaaattagctgggtgtgggggcgtgcgcctgtagtcccagctacttgggaggctgaggcaggagaattgcttgaacccaggaggcagaggttgcagtaagccaagatcgtgccactgcactccagccttggtgacagagcaagactccgtctccaaaaaaaagaaaaaaaaatttcttgaagtggaatgatgtacaccaaatacccactttatagataattacagggatggtgaaaaattagtaaatagcttcacaaaagaggcagcgtgatacctttagtgttttctagaatttttttctggatattatatgtaagaatttattgtttgagggaaatacgaggtttcattgtttaaaatcaagagtgtattgtttactgttttacagtattatttaatatccaactggtctccaatctccattacatagggactgtacagagcctgtgaagatgtatgaatggtatcttttataatccacaatacatttctggtaagatggaatcactacctctgatcacatatcaggctaacgatagagaaagcattaggtttaagttgagggctaagaactggtttgtttaaaggtttaaattgttggaaaagagcatttgccttctttaatgaatgatggtctcacaattcagttgactttgacctaatatttaagaatataaatatattttatttgaaaggctgagtgttgccctcaaacacttgctaaaactgcctagggcaggattcattagggcttgcagacaatgtcacctaaattgctgaatgtactcattataatatgatatctgacaaaggtagtacagcgtttctgagtcatttgggaccaactgcagtggttgtttaaaatgctggttcctgcacacaattctctatctactgaagcacatctgttttctttgtttgttttgctttgctttttgtttttaaagtttcccccagtgattccagtgcacctgaaaagttgagaaccacaggcttagtggtacgttggggtttcccacgctaggctgcatagcattataacctgggaacgttaaaaaaaatacagacattcttgattcttagtgtagttatgatgtggatcctacgtattttttaaaaaactctccagataattttgatgtcacgagtcactagtatagactatctatctagtgagttgtattataagcgatgaaatactttaaaagctacccagtaactcttgggattaattttatgaaataaattctgagctgctgcttttgatatagtcagacttaagactgaaccccagtagacaggcaatagatatagaattctggttagctaattgaacttttgtgacctgtttaaaaacaaatcaaatttattgaacaaatgacaaggcacaaatactttcagaattgtatttcagttttgaagatttaaaaaaaatgtgaaaataaatatatattagtatcctttattttaaagtcaattgtaaaccagaagtactgttattttggtgattaaaatccaaaactttagctgtatttcagtaacaaaaacataccttactagactgtgatggctcacacctgtaatcccagtgctttgggaggctgaggtgggaagattctttgagcccaggagttcaaggctgcagtgaattctgatcgcaccactgaactccagcccgtatgacagagtgagaccctgtttctaaaaacaaaacaaacaaacaaacaaacaacgtatcttactgactaaactggaatggaaatcttataattagtgttgtatttttctgcaaaatagtgaattggtacttgggagacttctgttctttgttgaaaaaaattgcctttgttttgaaattatatcacctgtgttctgaactaaaatgatgggagttcattttgtatttactttgcagtaagtatcatgtaaatatgcaaatgttgaatgtaatatagattgtgtcctcattgagtttttgggtgatacagtttataaatataacaattatacaccctcatacattcgtctgattttgagcttgtaagatgagaactgctttttacacatttaataaaaaaaggtctctgaattatctga

SEQ ID NO: 370423 - DNA, 3408 bp, Homo sapiens
aaaatattggtttgactggcatgtggctatgaaaagagtgaaataagaaagagattctatgcttcatgtattacatcaaagttaaaaaaagagcacttaaactgcagcagaagaggcaaaaagaagagttggaaagggagcagcaacgagagaaggagtttgaaagagaaaagcagttaactgccagaccagccaaaaggatgtgaaaagttgtgtttgtgtgttttcttctcctgtcccatatttgggttatgatgactcaagtgtagactgaagttgaggtagtgccttatgccattatgtcatatgttgaaatccttattccggtattactgtgtctccatgccttttttccaagtagcagacgtcatgttgcatggtttttgatatttatatgtaagtttttcaaattttgcttaattttaaaatttattattttgatcttgaattatttataaactggaaagtggtttgattattgtgagtcaaaactctaagtggttaaaaattagtatgaattttttagcttcttaatgaatatggatttaaaactctccagttcttattttatgaaatgacttgcctttctggtaatacaatgctgattttttagtaattgccttttcattactttgttaagaagaaatgccagctgtttaatcacacctacccctggaaaagaggtaaaccttttgaacagttgaatttcatcagaagctctatagctttttggtgagaggaagtgatactctttattacaagaaacaaggaattaacaaaaataaggaacttgttgctacctttcttttctgttgaacattaaaaataatttggtttgtggactgggcatggtggcttatggaaaagaggtgagcctttgtgaagaacataatggaaaagtgcatgtacgggaaataacagcactttaggtgtagttcaggtgagcaagatgccagatagtttctactaaccatatactctttctgcttcttagcgtcgttgtcactgcttctgtggcttttgggttcaaagtagattatatatattcctaaagcttggtggaggtagtggagctatcacacactcaaatgagcttgtatatttataatacaatatagtattatagtaacagttatcatacactgagatatagtttctgtgcttgtaaaaaattcttgaagtgaggccgggtgcggtggctcatgcctgtaatcccaacgctttgggacgccgaggcgggtggatcatgaggtcaaaagattgagaccatcctggccaacatggtgaaaccccgtctctactagaaatacaaaaattagctgggtgtgggggcgtgcgcctgtagtcccagctacttgggaggctgaggcaggagaattgcttgaacccaggaggcagaggttgcagtaagccaagatcgtgccactgcactccagccttggtgacagagcaagactccgtctccaaaaaaaagaaaaaaaaatttcttgaagtggaatgatgtacaccaaatacccactttatagataattacagggatggtgaaaaattagtaaatagcttcacaaaagaggcagcgtgatacctttagtgttttctagaatttttttctggatattatatgtaagaatttattgtttgagggaaatacgaggtttcattgtttaaaatcaagagtgtattgtttactgttttacagtattatttaatatccaactggtctccaatctccattacatagggactgtacagagcctgtgaagatgtatgaatggtatcttttataatccacaatacatttctggtaagatggaatcactacctctgatcacatatcaggctaacgatagagaaagcattaggtttaagttgagggctaagaactggtttgtttaaaggtttaaattgttggaaaagagcatttgccttctttaatgaatgatggtctcacaattcagttgactttgacctaatatttaagaatataaatatattttatttgaaaggctgagtgttgccctcaaacacttgctaaaactgcctagggcaggattcattagggcttgcagacaatgtcacctaaattgctgaatgtactcattataatatgatatctgacaaaggtagtacagcgtttctgagtcatttgggaccaactgcagtggttgtttaaaatgctggttcctgcacacaattctctatctactgaagcacatctgttttctttgtttgttttgctttgctttttgtttttaaagtttcccccagtgattccagtgcacctgaaaagttgagaaccacaggcttagtggtacgttggggtttcccacgctaggctgcatagcattataacctgggaacgttaaaaaaaatacagacattcttgattcttagtgtagttatgatgtggatcctacgtattttttaaaaaactctccagataattttgatgtcacgagtcactagtatagactatctatctagtgagttgtattataagcgatgaaatactttaaaagctacccagtaactcttgggattaattttatgaaataaattctgagctgctgcttttgatatagtcagacttaagactgaaccccagtagacaggcaatagatatagaattctggttagctaattgaacttttgtgacctgtttaaaaacaaatcaaatttattgaacaaatgacaaggcacaaatactttcagaattgtatttcagttttgaagatttaaaaaaaatgtgaaaataaatatatattagtatcctttattttaaagtcaattgtaaaccagaagtactgttattttggtgattaaaatccaaaactttagctgtatttcagtaacaaaaacataccttactagactgtgatggctcacacctgtaatcccagtgctttgggaggctgaggtgggaagattctttgagcccaggagttcaaggctgcagtgaattctgatcgcaccactgaactccagcccgtatgacagagtgagaccctgtttctaaaaacaaaacaaacaaacaaacaaacaacgtatcttactgactaaactggaatggaaatcttataattagtgttgtatttttctgcaaaatagtgaattggtacttgggagacttctgttctttgttgaaaaaaattgcctttgttttgaaattatatcacctgtgttctgaactaaaatgatgggagttcattttgtatttactttgcagtaagtatcatgtaaatatgcaaatgttgaatgtaatatagattgtgtcctcattgagtttttgggtgatacagtttataaatataacaattatacaccctcatacattcgtctgattttgagcttgtaagatgagaactgctttttacacatttaataaaaaaaggtctctgaattatctga

SEQ ID NO: 370424 - DNA, 2986 bp, Homo sapiens
acactgcgtccggggccagacgacgatatcagcgcggggtccccacaacgccatggggcagagccaactctcgagcgcgtgatcgaagcccgcagttttttcgcccccgtcacttccgggtgcgacaatctcttctgtccggccagccgctggagtcgttaggtgccgccttgcttctgacgagccacacgtttgcttcttccctgtgttcccagctggagggacatgagtgtccctgggccgtcgtctccggacggggccctgacacggccaccctactgcctggaggccggggagccgacgcctggtttaagtgacacttctccagatgaagggttaatagaggacttgactatagaagacaaagcagtggagcaactggcagaaggattgctttctcattatttgccagatctgcagagatcaaaacaagccctccaggaactcacacagaaccaagttgtattgttagacacactggaacaagagatttcaaaatttaaagaatgtcattctatgttggatattaatgctttgtttgctgaggctaaacactatcatgccaagttggtgaatataagaaaagagatgctgatgcttcatgaaaaaacatcaaagttaaaaaaaagagcacttaaactgcagcagaagaggcaaaaagaagagttggaaagggagcagcaacgagagaaggagtttgaaagagaaaagcagttaactgccagaccagccaaaaggatgtgaaaagttgtgtttgtgtgttttcttctcctgtcccatatttgggttatgatgactcaagtgtagactgaagttgaggtagtgccttatgccattatgtcatatgttgaaatccttattccggtattactgtgtctccatgccttttttccaagtagcagacgtcatgttgcatggtttttgatatttatatgtaagtttttcaaattttgcttaattttaaaatttattattttgatcttgaattatttataaactggaaagtggtttgattattgtgagtcaaaactctaagtggttaaaaattagtatgaattttttagcttcttaatgaatatggatttaaaactctccagttcttattttatgaaatgacttgcctttctggtaatacaatgctgattttttagtaattgccttttcattactttgttaagaagaaatgccagctgtttaatcacacctacccctggaaaagaggtaaaccttttgaacagttgaatttcatcagaagctctatagctttttggtgagaggaagtgatactctttattacaagaaacaaggaattaacaaaaataaggaacttgttgctacctttcttttctgttgaacattaaaaataatttggtttgtggactgggcatggtggcttatggaaaagaggtgagcctttgtgaagaacataatggaaaagtgcatgtacgggaaataacagcactttaggtgtagttcaggtgagcaagatgccagatagtttctactaaccatatactctttctgcttcttagcgtcgttgtcactgcttctgtggcttttgggttcaaagtagattatatatattcctaaagcttggtggaggtagtggagctatcacacactcaaatgagcttgtatatttataatacaatatagtattatagtaacagttatcatacactgagatatagtttctgtgcttgtaaaaaattcttgaagtgaggccgggtgcggtggctcatgcctgtaatcccaacgctttgggacgccgaggcgggtggatcatgaggtcaaaagattgagaccatcctggccaacatggtgaaaccccgtctctactagaaatacaaaaattagctgggtgtgggggcgtgcgcctgtagtcccagctacttgggaggctgaggcaggagaattgcttgaacccaggaggcagaggttgcagtaagccaagatcgtgccactgcactccagccttggtgacagagcaagactccgtctccaaaaaaaagaaaaaaaaatttcttgaagtggaatgatgtacaccaaatacccactttatagataattacagggatggtgaaaaattagtaaatagcttcacaaaagaggcagcgtgatacctttagtgttttctagaatttttttctggatattatatgtaagaatttattgtttgagggaaatacgaggtttcattgtttaaaatcaagagtgtattgtttactgttttacagtattatttaatatccaactggtctccaatctccattacatagggactgtacagagcctgtgaagatgtatgaatggtatcttttataatccacaatacatttctggtaagatggaatcactacctctgatcacatatcaggctaacgatagagaaagcattaggtttaagttgagggctaagaactggtttgtttaaaggtttaaattgttggaaaagagcatttgccttctttaatgaatgatggtctcacaattcagttgactttgacctaatatttaagaatataaatatattttatttgaaaggctgagtgttgccctcaaacacttgctaaaactgcctagggcaggattcattagggcttgcagacaatgtcacctaaattgctgaatgtactcattataatatgatatctgacaaaggtagtacagcgtttctgagtcatttgggaccaactgcagtggttgtttaaaatgctggttcctgcacacaattctctatctactgaagcacatctgttctgctttaggataaggtaagtagactttagactataaacaggttatctaacaagtttacccccctaggtgaatatccaaagttgcaacccttgcaaaaacagttctgacgaacccaccaaggcctctactggctacccagtaggacgagtatatccccagcgcttagggcatgacatagcgcattcatataccatggacaccggtacactcaacagcataacgcgaa

SEQ ID NO: 370425 - DNA, 932 bp, Homo sapiens
acactgcgtccggggccagacgacgatatcagcgcggggtccccacaacgccatggggcagagccaactctcgagcgcgtgatcgaagcccgcagttttttcgcccccgtcacttccgggtgcgacaatctcttctgtccggccagccgctggagtcgttaggtgccgccttgcttctgacgagccacacgtttgcttcttccctgtgttcccagctggagggacatgagtgtccctgggccgtcgtctccggacggggccctgacacggccaccctactgcctggaggccggggagccgacgcctggtttaagtgacacttctccagatgaagggttaatagaggacttgactatagaagacaaagcagtggagcaactggcagaaggattgctttctcattatttgccagatctgcagagatcaaaacaagccctccaggaactcacacagaaccaagttgtattgttagacacactggaacaagagatttcaaaatttaaagaatgtcattctatgttggatattaatgctttgtttgctgaggctaaacactatcatgccaagttggtgaatataagaaaagagatgctgatgcttcatgaaaaaacatcaaagttaaaagaattcaaggacgaagatatcaatgaccagcacagagatgtaatcttcctctcggccacacacctgggtgtttcccttatttttttgctgcgtgtttccttcatgtcgtccaatttcttttcttattctcatatttggctagatttttaataccagatctatgtcagctccttctcaaacctaaaattcagagccccagctctgttgagcgtgtattatatttcagttgctttatacatgttatctcataacagcaaccttaggaggtaactattgttattaccattttacaggtgaggaagctgaga

SEQ ID NO: 370426 - DNA, 3946 bp, Homo sapiens
acactgcgtccggggccagacgacgatatcagcgcggggtccccacaacgccatggggcagagccaactctcgagcgcgtgatcgaagcccgcagttttttcgcccccgtcacttccgggtgcgacaatctcttctgtccggccagccgctggagtcgttaggtgccgccttgcttctgacgagccacacgtttgcttcttccctgtgttcccagctggagggacatgagtgtccctgggccgtcgtctccggacggggccctgacacggccaccctactgcctggaggccggggagccgacgcctggtttaagtgacacttctccagatgaagggttaatagaggacttgactatagaagacaaagcagtggagcaactggcagaaggattgctttctcattatttgccagatctgcagagatcaaaacaagccctccaggaactcacacagaaccaagttgtattgttagacacactggaacaagagatttcaaaatttaaagaatgtcattctatgttggatattaatgctttgtttgctgaggctaaacactatcatgccaagttggtgaatataagaaaagagatgctgatgcttcatgaaaaaacatcaaagttaaaaaaaagagcacttaaactgcagcagaagaggcaaaaagaagagttggaaagggagcagcaacgagagaaggagtttgaaagagaaaagcagttaactgccagaccagccaaaaggatgtgaaaagttgtgtttgtgtgttttcttctcctgtcccatatttgggttatgatgactcaagtgtagactgaagttgaggtagtgccttatgccattatgtcatatgttgaaatccttattccggtattactgtgtctccatgccttttttccaagtagcagacgtcatgttgcatggtttttgatatttatatgtaagtttttcaaattttgcttaattttaaaatttattattttgatcttgaattatttataaactggaaagtggtttgattattgtgagtcaaaactctaagtggttaaaaattagtatgaattttttagcttcttaatgaatatggatttaaaactctccagttcttattttatgaaatgacttgcctttctggtaatacaatgctgattttttagtaattgccttttcattactttgttaagaagaaatgccagctgtttaatcacacctacccctggaaaagaggtaaaccttttgaacagttgaatttcatcagaagctctatagctttttggtgagaggaagtgatactctttattacaagaaacaaggaattaacaaaaataaggaacttgttgctacctttcttttctgttgaacattaaaaataatttggtttgtggactgggcatggtggcttatggaaaagaggtgagcctttgtgaagaacataatggaaaagtgcatgtacgggaaataacagcactttaggtgtagttcaggtgagcaagatgccagatagtttctactaaccatatactctttctgcttcttagcgtcgttgtcactgcttctgtggcttttgggttcaaagtagattatatatattcctaaagcttggtggaggtagtggagctatcacacactcaaatgagcttgtatatttataatacaatatagtattatagtaacagttatcatacactgagatatagtttctgtgcttgtaaaaaattcttgaagtgaggccgggtgcggtggctcatgcctgtaatcccaacgctttgggacgccgaggcgggtggatcatgaggtcaaaagattgagaccatcctggccaacatggtgaaaccccgtctctactagaaatacaaaaattagctgggtgtgggggcgtgcgcctgtagtcccagctacttgggaggctgaggcaggagaattgcttgaacccaggaggcagaggttgcagtaagccaagatcgtgccactgcactccagccttggtgacagagcaagactccgtctccaaaaaaaagaaaaaaaaatttcttgaagtggaatgatgtacaccaaatacccactttatagataattacagggatggtgaaaaattagtaaatagcttcacaaaagaggcagcgtgatacctttagtgttttctagaatttttttctggatattatatgtaagaatttattgtttgagggaaatacgaggtttcattgtttaaaatcaagagtgtattgtttactgttttacagtattatttaatatccaactggtctccaatctccattacatagggactgtacagagcctgtgaagatgtatgaatggtatcttttataatccacaatacatttctggtaagatggaatcactacctctgatcacatatcaggctaacgatagagaaagcattaggtttaagttgagggctaagaactggtttgtttaaaggtttaaattgttggaaaagagcatttgccttctttaatgaatgatggtctcacaattcagttgactttgacctaatatttaagaatataaatatattttatttgaaaggctgagtgttgccctcaaacacttgctaaaactgcctagggcaggattcattagggcttgcagacaatgtcacctaaattgctgaatgtactcattataatatgatatctgacaaaggtagtacagcgtttctgagtcatttgggaccaactgcagtggttgtttaaaatgctggttcctgcacacaattctctatctactgaagcacatctgttttctttgtttgttttgctttgctttttgtttttaaagtttcccccagtgattccagtgcacctgaaaagttgagaaccacaggcttagtggtacgttggggtttcccacgctaggctgcatagcattataacctgggaacgttaaaaaaaatacagacattcttgattcttagtgtagttatgatgtggatcctacgtattttttaaaaaactctccagataattttgatgtcacgagtcactagtatagactatctatctagtgagttgtattataagcgatgaaatactttaaaagctacccagtaactcttgggattaattttatgaaataaattctgagctgctgcttttgatatagtcagacttaagactgaaccccagtagacaggcaatagatatagaattctggttagctaattgaacttttgtgacctgtttaaaaacaaatcaaatttattgaacaaatgacaaggcacaaatactttcagaattgtatttcagttttgaagatttaaaaaaaatgtgaaaataaatatatattagtatcctttattttaaagtcaattgtaaaccagaagtactgttattttggtgattaaaatccaaaactttagctgtatttcagtaacaaaaacataccttactagactgtgatggctcacacctgtaatcccagtgctttgggaggctgaggtgggaagattctttgagcccaggagttcaaggctgcagtgaattctgatcgcaccactgaactccagcccgtatgacagagtgagaccctgtttctaaaaacaaaacaaacaaacaaacaaacaacgtatcttactgactaaactggaatggaaatcttataattagtgttgtatttttctgcaaaatagtgaattggtacttgggagacttctgttctttgttgaaaaaaattgcctttgttttgaaattatatcacctgtgttctgaactaaaatgatgggagttcattttgtatttactttgcagtaagtatcatgtaaatatgcaaatgttgaatgtaatatagattgtgtcctcattgagtttttgggtgatacagtttataaatataacaattatacaccctcatacattcgtctgattttgagcttgtaagatgagaactgctttttacacatttaataaaaaaaggtctctgaattatctga

SEQ ID NO: 370427 - DNA, 3716 bp, Homo sapiens
acactgcgtccggggccagacgacgatatcagcgcggggtccccacaacgccatggggcagagccaactctcgagcgcgtgatcgaagcccgcagttttttcgcccccgtcacttccgggtgcgacaatctcttctgtccggccagccgctggagtcgttaggtgccgccttgcttctgacgagccacacgtttgcttcttccctgtgttcccagctggagggacatgagtgtccctgggccgtcgtctccggacggggccctgacacggccaccctactgcctggaggccggggagccgacgcctgtttgctgaggctaaacactatcatgccaagttggtgaatataagaaaagagatgctgatgcttcatgaaaaaacatcaaagttaaaaaaaagagcacttaaactgcagcagaagaggcaaaaagaagagttggaaagggagcagcaacgagagaaggagtttgaaagagaaaagcagttaactgccagaccagccaaaaggatgtgaaaagttgtgtttgtgtgttttcttctcctgtcccatatttgggttatgatgactcaagtgtagactgaagttgaggtagtgccttatgccattatgtcatatgttgaaatccttattccggtattactgtgtctccatgccttttttccaagtagcagacgtcatgttgcatggtttttgatatttatatgtaagtttttcaaattttgcttaattttaaaatttattattttgatcttgaattatttataaactggaaagtggtttgattattgtgagtcaaaactctaagtggttaaaaattagtatgaattttttagcttcttaatgaatatggatttaaaactctccagttcttattttatgaaatgacttgcctttctggtaatacaatgctgattttttagtaattgccttttcattactttgttaagaagaaatgccagctgtttaatcacacctacccctggaaaagaggtaaaccttttgaacagttgaatttcatcagaagctctatagctttttggtgagaggaagtgatactctttattacaagaaacaaggaattaacaaaaataaggaacttgttgctacctttcttttctgttgaacattaaaaataatttggtttgtggactgggcatggtggcttatggaaaagaggtgagcctttgtgaagaacataatggaaaagtgcatgtacgggaaataacagcactttaggtgtagttcaggtgagcaagatgccagatagtttctactaaccatatactctttctgcttcttagcgtcgttgtcactgcttctgtggcttttgggttcaaagtagattatatatattcctaaagcttggtggaggtagtggagctatcacacactcaaatgagcttgtatatttataatacaatatagtattatagtaacagttatcatacactgagatatagtttctgtgcttgtaaaaaattcttgaagtgaggccgggtgcggtggctcatgcctgtaatcccaacgctttgggacgccgaggcgggtggatcatgaggtcaaaagattgagaccatcctggccaacatggtgaaaccccgtctctactagaaatacaaaaattagctgggtgtgggggcgtgcgcctgtagtcccagctacttgggaggctgaggcaggagaattgcttgaacccaggaggcagaggttgcagtaagccaagatcgtgccactgcactccagccttggtgacagagcaagactccgtctccaaaaaaaagaaaaaaaaatttcttgaagtggaatgatgtacaccaaatacccactttatagataattacagggatggtgaaaaattagtaaatagcttcacaaaagaggcagcgtgatacctttagtgttttctagaatttttttctggatattatatgtaagaatttattgtttgagggaaatacgaggtttcattgtttaaaatcaagagtgtattgtttactgttttacagtattatttaatatccaactggtctccaatctccattacatagggactgtacagagcctgtgaagatgtatgaatggtatcttttataatccacaatacatttctggtaagatggaatcactacctctgatcacatatcaggctaacgatagagaaagcattaggtttaagttgagggctaagaactggtttgtttaaaggtttaaattgttggaaaagagcatttgccttctttaatgaatgatggtctcacaattcagttgactttgacctaatatttaagaatataaatatattttatttgaaaggctgagtgttgccctcaaacacttgctaaaactgcctagggcaggattcattagggcttgcagacaatgtcacctaaattgctgaatgtactcattataatatgatatctgacaaaggtagtacagcgtttctgagtcatttgggaccaactgcagtggttgtttaaaatgctggttcctgcacacaattctctatctactgaagcacatctgttttctttgtttgttttgctttgctttttgtttttaaagtttcccccagtgattccagtgcacctgaaaagttgagaaccacaggcttagtggtacgttggggtttcccacgctaggctgcatagcattataacctgggaacgttaaaaaaaatacagacattcttgattcttagtgtagttatgatgtggatcctacgtattttttaaaaaactctccagataattttgatgtcacgagtcactagtatagactatctatctagtgagttgtattataagcgatgaaatactttaaaagctacccagtaactcttgggattaattttatgaaataaattctgagctgctgcttttgatatagtcagacttaagactgaaccccagtagacaggcaatagatatagaattctggttagctaattgaacttttgtgacctgtttaaaaacaaatcaaatttattgaacaaatgacaaggcacaaatactttcagaattgtatttcagttttgaagatttaaaaaaaatgtgaaaataaatatatattagtatcctttattttaaagtcaattgtaaaccagaagtactgttattttggtgattaaaatccaaaactttagctgtatttcagtaacaaaaacataccttactagactgtgatggctcacacctgtaatcccagtgctttgggaggctgaggtgggaagattctttgagcccaggagttcaaggctgcagtgaattctgatcgcaccactgaactccagcccgtatgacagagtgagaccctgtttctaaaaacaaaacaaacaaacaaacaaacaacgtatcttactgactaaactggaatggaaatcttataattagtgttgtatttttctgcaaaatagtgaattggtacttgggagacttctgttctttgttgaaaaaaattgcctttgttttgaaattatatcacctgtgttctgaactaaaatgatgggagttcattttgtatttactttgcagtaagtatcatgtaaatatgcaaatgttgaatgtaatatagattgtgtcctcattgagtttttgggtgatacagtttataaatataacaattatacaccctcatacattcgtctgattttgagcttgtaagatgagaactgctttttacacatttaataaaaaaaggtctctgaattatctga

SEQ ID NO: 370428 - DNA, 3815 bp, Homo sapiens
ggtttttggcggctgcggcccccgggccctgccccgagtgcagaaatggggaaccgcgccggcccctctgcccagcgcaatgggcggaactgaagtcccgaggggaagctttgtattgggggtgcaattgaaggcggttgatggtgaagccattctgagtttatgtgttgactccggtttaagtgacacttctccagatgaagggttaatagaggacttgactatagaagacaaagcagtggagcaactggcagaaggattgctttctcattatttgccagatctgcagagatcaaaacaagccctccaggaactcacacagaaccaagttgtattgttagacacactggaacaagagatttcaaaatttaaagaatgtcattctatgttggatattaatgctttgtttgctgaggctaaacactatcatgccaagttggtgaatataagaaaagagatgctgatgcttcatgaaaaaacatcaaagttaaaaaaaagagcacttaaactgcagcagaagaggcaaaaagaagagttggaaagggagcagcaacgagagaaggagtttgaaagagaaaagcagttaactgccagaccagccaaaaggatgtgaaaagttgtgtttgtgtgttttcttctcctgtcccatatttgggttatgatgactcaagtgtagactgaagttgaggtagtgccttatgccattatgtcatatgttgaaatccttattccggtattactgtgtctccatgccttttttccaagtagcagacgtcatgttgcatggtttttgatatttatatgtaagtttttcaaattttgcttaattttaaaatttattattttgatcttgaattatttataaactggaaagtggtttgattattgtgagtcaaaactctaagtggttaaaaattagtatgaattttttagcttcttaatgaatatggatttaaaactctccagttcttattttatgaaatgacttgcctttctggtaatacaatgctgattttttagtaattgccttttcattactttgttaagaagaaatgccagctgtttaatcacacctacccctggaaaagaggtaaaccttttgaacagttgaatttcatcagaagctctatagctttttggtgagaggaagtgatactctttattacaagaaacaaggaattaacaaaaataaggaacttgttgctacctttcttttctgttgaacattaaaaataatttggtttgtggactgggcatggtggcttatggaaaagaggtgagcctttgtgaagaacataatggaaaagtgcatgtacgggaaataacagcactttaggtgtagttcaggtgagcaagatgccagatagtttctactaaccatatactctttctgcttcttagcgtcgttgtcactgcttctgtggcttttgggttcaaagtagattatatatattcctaaagcttggtggaggtagtggagctatcacacactcaaatgagcttgtatatttataatacaatatagtattatagtaacagttatcatacactgagatatagtttctgtgcttgtaaaaaattcttgaagtgaggccgggtgcggtggctcatgcctgtaatcccaacgctttgggacgccgaggcgggtggatcatgaggtcaaaagattgagaccatcctggccaacatggtgaaaccccgtctctactagaaatacaaaaattagctgggtgtgggggcgtgcgcctgtagtcccagctacttgggaggctgaggcaggagaattgcttgaacccaggaggcagaggttgcagtaagccaagatcgtgccactgcactccagccttggtgacagagcaagactccgtctccaaaaaaaagaaaaaaaaatttcttgaagtggaatgatgtacaccaaatacccactttatagataattacagggatggtgaaaaattagtaaatagcttcacaaaagaggcagcgtgatacctttagtgttttctagaatttttttctggatattatatgtaagaatttattgtttgagggaaatacgaggtttcattgtttaaaatcaagagtgtattgtttactgttttacagtattatttaatatccaactggtctccaatctccattacatagggactgtacagagcctgtgaagatgtatgaatggtatcttttataatccacaatacatttctggtaagatggaatcactacctctgatcacatatcaggctaacgatagagaaagcattaggtttaagttgagggctaagaactggtttgtttaaaggtttaaattgttggaaaagagcatttgccttctttaatgaatgatggtctcacaattcagttgactttgacctaatatttaagaatataaatatattttatttgaaaggctgagtgttgccctcaaacacttgctaaaactgcctagggcaggattcattagggcttgcagacaatgtcacctaaattgctgaatgtactcattataatatgatatctgacaaaggtagtacagcgtttctgagtcatttgggaccaactgcagtggttgtttaaaatgctggttcctgcacacaattctctatctactgaagcacatctgttttctttgtttgttttgctttgctttttgtttttaaagtttcccccagtgattccagtgcacctgaaaagttgagaaccacaggcttagtggtacgttggggtttcccacgctaggctgcatagcattataacctgggaacgttaaaaaaaatacagacattcttgattcttagtgtagttatgatgtggatcctacgtattttttaaaaaactctccagataattttgatgtcacgagtcactagtatagactatctatctagtgagttgtattataagcgatgaaatactttaaaagctacccagtaactcttgggattaattttatgaaataaattctgagctgctgcttttgatatagtcagacttaagactgaaccccagtagacaggcaatagatatagaattctggttagctaattgaacttttgtgacctgtttaaaaacaaatcaaatttattgaacaaatgacaaggcacaaatactttcagaattgtatttcagttttgaagatttaaaaaaaatgtgaaaataaatatatattagtatcctttattttaaagtcaattgtaaaccagaagtactgttattttggtgattaaaatccaaaactttagctgtatttcagtaacaaaaacataccttactagactgtgatggctcacacctgtaatcccagtgctttgggaggctgaggtgggaagattctttgagcccaggagttcaaggctgcagtgaattctgatcgcaccactgaactccagcccgtatgacagagtgagaccctgtttctaaaaacaaaacaaacaaacaaacaaacaacgtatcttactgactaaactggaatggaaatcttataattagtgttgtatttttctgcaaaatagtgaattggtacttgggagacttctgttctttgttgaaaaaaattgcctttgttttgaaattatatcacctgtgttctgaactaaaatgatgggagttcattttgtatttactttgcagtaagtatcatgtaaatatgcaaatgttgaatgtaatatagattgtgtcctcattgagtttttgggtgatacagtttataaatataacaattatacaccctcatacattcgtctgattttgagcttgtaagatgagaactgctttttacacatttaataaaaaaaggtctctgaattatctga

SEQ ID NO: 370429 - DNA, 3859 bp, Homo sapiens
acactgcgtccggggccagacgacgatatcagcgcggggtccccacaacgccatggggcagagccaactctcgagcgcgtgatcgaagcccgcagttttttcgcccccgtcacttccgggtgcgacaatctcttctgtccggccagccgctggagtcgttaggtgccgccttgcttctgacgagccacacgtttgcttcttccctgtgttcccagctggagggacatgagtgtccctgggccgtcgtctccggacggggccctgacacggccaccctactgcctggaggccggggagccgacgcctggtttaagtgacacttctccagatgaagggttaatagaggacttgactatagaagacaaagcagtggagcaactggcagaaggattgctttctcattatttgccagatctgcagagatcaaaacaagccctccaggaactcacacagaaccaagttgtattgttagacacactggaacaagagatttcaaaatttaaagaatgtcattctatgttggatattaatgctttgaaaagagcacttaaactgcagcagaagaggcaaaaagaagagttggaaagggagcagcaacgagagaaggagtttgaaagagaaaagcagttaactgccagaccagccaaaaggatgtgaaaagttgtgtttgtgtgttttcttctcctgtcccatatttgggttatgatgactcaagtgtagactgaagttgaggtagtgccttatgccattatgtcatatgttgaaatccttattccggtattactgtgtctccatgccttttttccaagtagcagacgtcatgttgcatggtttttgatatttatatgtaagtttttcaaattttgcttaattttaaaatttattattttgatcttgaattatttataaactggaaagtggtttgattattgtgagtcaaaactctaagtggttaaaaattagtatgaattttttagcttcttaatgaatatggatttaaaactctccagttcttattttatgaaatgacttgcctttctggtaatacaatgctgattttttagtaattgccttttcattactttgttaagaagaaatgccagctgtttaatcacacctacccctggaaaagaggtaaaccttttgaacagttgaatttcatcagaagctctatagctttttggtgagaggaagtgatactctttattacaagaaacaaggaattaacaaaaataaggaacttgttgctacctttcttttctgttgaacattaaaaataatttggtttgtggactgggcatggtggcttatggaaaagaggtgagcctttgtgaagaacataatggaaaagtgcatgtacgggaaataacagcactttaggtgtagttcaggtgagcaagatgccagatagtttctactaaccatatactctttctgcttcttagcgtcgttgtcactgcttctgtggcttttgggttcaaagtagattatatatattcctaaagcttggtggaggtagtggagctatcacacactcaaatgagcttgtatatttataatacaatatagtattatagtaacagttatcatacactgagatatagtttctgtgcttgtaaaaaattcttgaagtgaggccgggtgcggtggctcatgcctgtaatcccaacgctttgggacgccgaggcgggtggatcatgaggtcaaaagattgagaccatcctggccaacatggtgaaaccccgtctctactagaaatacaaaaattagctgggtgtgggggcgtgcgcctgtagtcccagctacttgggaggctgaggcaggagaattgcttgaacccaggaggcagaggttgcagtaagccaagatcgtgccactgcactccagccttggtgacagagcaagactccgtctccaaaaaaaagaaaaaaaaatttcttgaagtggaatgatgtacaccaaatacccactttatagataattacagggatggtgaaaaattagtaaatagcttcacaaaagaggcagcgtgatacctttagtgttttctagaatttttttctggatattatatgtaagaatttattgtttgagggaaatacgaggtttcattgtttaaaatcaagagtgtattgtttactgttttacagtattatttaatatccaactggtctccaatctccattacatagggactgtacagagcctgtgaagatgtatgaatggtatcttttataatccacaatacatttctggtaagatggaatcactacctctgatcacatatcaggctaacgatagagaaagcattaggtttaagttgagggctaagaactggtttgtttaaaggtttaaattgttggaaaagagcatttgccttctttaatgaatgatggtctcacaattcagttgactttgacctaatatttaagaatataaatatattttatttgaaaggctgagtgttgccctcaaacacttgctaaaactgcctagggcaggattcattagggcttgcagacaatgtcacctaaattgctgaatgtactcattataatatgatatctgacaaaggtagtacagcgtttctgagtcatttgggaccaactgcagtggttgtttaaaatgctggttcctgcacacaattctctatctactgaagcacatctgttttctttgtttgttttgctttgctttttgtttttaaagtttcccccagtgattccagtgcacctgaaaagttgagaaccacaggcttagtggtacgttggggtttcccacgctaggctgcatagcattataacctgggaacgttaaaaaaaatacagacattcttgattcttagtgtagttatgatgtggatcctacgtattttttaaaaaactctccagataattttgatgtcacgagtcactagtatagactatctatctagtgagttgtattataagcgatgaaatactttaaaagctacccagtaactcttgggattaattttatgaaataaattctgagctgctgcttttgatatagtcagacttaagactgaaccccagtagacaggcaatagatatagaattctggttagctaattgaacttttgtgacctgtttaaaaacaaatcaaatttattgaacaaatgacaaggcacaaatactttcagaattgtatttcagttttgaagatttaaaaaaaatgtgaaaataaatatatattagtatcctttattttaaagtcaattgtaaaccagaagtactgttattttggtgattaaaatccaaaactttagctgtatttcagtaacaaaaacataccttactagactgtgatggctcacacctgtaatcccagtgctttgggaggctgaggtgggaagattctttgagcccaggagttcaaggctgcagtgaattctgatcgcaccactgaactccagcccgtatgacagagtgagaccctgtttctaaaaacaaaacaaacaaacaaacaaacaacgtatcttactgactaaactggaatggaaatcttataattagtgttgtatttttctgcaaaatagtgaattggtacttgggagacttctgttctttgttgaaaaaaattgcctttgttttgaaattatatcacctgtgttctgaactaaaatgatgggagttcattttgtatttactttgcagtaagtatcatgtaaatatgcaaatgttgaatgtaatatagattgtgtcctcattgagtttttgggtgatacagtttataaatataacaattatacaccctcatacattcgtctgattttgagcttgtaagatgagaactgctttttacacatttaataaaaaaaggtctctgaattatctga

SEQ ID NO: 370430 - DNA, 2059 bp, Homo sapiens
acactgcgtccggggccagacgacgatatcagcgcggggtccccacaacgccatggggcagagccaactctcgagcgcgtgatcgaagcccgcagttttttcgcccccgtcacttccgggtgcgacaatctcttctgtccggccagccgctggagtcgttaggtgccgccttgcttctgacgagccacacgtttgcttcttccctgtgttcccagctggagggacatgagtgtccctgggccgtcgtctccggacggggccctgacacggccaccctactgcctggaggccggggagccgacgcctggtttaagtgacacttctccagatgaagggttaatagaggacttgactatagaagacaaagcagtggagcaactggcagaaggattgctttctcattatttgccagatctgcagagatcaaaacaagccctccaggaactcacacagaaccaagttgtattgttagacacactggaacaagagatttcaaaatttaaagaatgtcattctatgttggatattaatgctttgtttgctgaggctaaacactatcatgccaagttggtgaatataagaaaagagatgctgatgcttcatgaaaaaacatcaaagttaaaaaaaagagcacttaaactgcagcagaagaggcaaaaagaagagttggaaagggagcagcaacgagagaaggagtttgaaagagaaaagcagttaactgccagaccagccaaaaggatgtgaaaagttgtgtttgtgtgttttcttctcctgtcccatatttgggttatgatgactcaagtgtagactgaagttgaggtagtgccttatgccattatgtcatatgttgaaatccttattccggtattactgtgtctccatgccttttttccaagtagcagacgtcatgttgcatggtttttgatatttatatgtaagtttttcaaattttgcttaattttaaaatttattattttgatcttgaattatttataaactggaaagtggtttgattattgtgagtcaaaactctaagtggttaaaaattagtatgaattttttagcttcttaatgaatatggatttaaaactctccagttcttattttatgaaatgacttgcctttctggtaatacaatgctgattttttagtaattgccttttcattactttgttaagaagaaatgccagctgtttaatcacacctacccctggaaaagaggtaaaccttttgaacagttgaatttcatcagaagctctatagctttttggtgagaggaagtgatactctttattacaagaaacaaggaattaacaaaaataaggaacttgttgctacctttcttttctgttgaacattaaaaataatttggtttgtggactgggcatggtggcttatggaaaagaggtgagcctttgtgaagaacataatggaaaagtgcatgtacgggaaataacagcactttaggtgtagttcaggtgagcaagatgccagatagtttctactaaccatatactctttctgcttcttagcgtcgttgtcactgcttctgtggcttttgggttcaaagtagattatatatattcctaaagcttggtggaggtagtggagctatcacacactcaaatgagcttgtatatttataatacaatatagtattatagtaacagttatcatacactgagatatagtttctgtgcttgtaaaaaattcttgaagtgaggccgggtgcggtggctcatgcctgtaatcccaacgctttgggacgccgaggcggggtttctccatgttggtcaggctgatctcaaactcctgacctcagatgatccacccgccttggcctcccaaactgctgggattacaggtgtgagccaccgcgcctggcctattctgagttaatttttgtggaggcttgtaaggtctgtgtctattaatagatgcatttctttgcgcatggatatccagttgcttcagcaccatttattgttgttgttgttgtttgagacagggtctcactccagccttggtgacagagcaagactccgtctccaaaaaaaaa

SEQ ID NO: 370431 - DNA, 1164 bp, Homo sapiens
acactgcgtccggggccagacgacgatatcagcgcggggtccccacaacgccatggggcagagccaactctcgagcgcgtgatcgaagcccgcagttttttcgcccccgtcacttccgggtgcgacaatctcttctgtccggccagccgctggagtcgttaggtgccgccttgcttctgacgagccacacgtttgcttcttccctgtgttcccagctggagggacatgagtgtccctgggccgtcgtctccggacggggccctgacacggccaccctactgcctggaggccggggagccgacgcctgtttgctgaggctaaacactatcatgccaagttggtgaatataagaaaagagatgctgatgcttcatgaaaaaacatcaaagttaaaaaaaagagcacttaaactgcagcagaagaggcaaaaagaagagttggaaagggagcagcaacgagagaaggagtttgaaagagaaaagcagttaactgccagaccagccaaaaggatgtgaaaagttgtgtttgtgtgttttcttctcctgtcccatatttgggttatgatgactcaagtgtagactgaagttgaggtagtgccttatgccattatgtcatatgttgaaatccttattccggtattactgtgtctccatgccttttttccaagtagcagacgtcatgttgcatggtttttgatatttatatgtaagtttttcaaattttgcttaattttaaaatttattattttgatcttgaattatttataaactggaaagtggtttgattattgtgagtcaaaactctaagtggttaaaaattagtatgaattttttagcttcttaatgaatatggatttaaaactctccagttcttattttatgaaatgacttgcctttctggtaatacaatgctgattttttagtaattgccttttcattactttgttaagaagaaatgccagctgtttaatcacacctacccctggaaaagaggtaaaccttttgaacagttgaatttcatcagaagctctatagctttgggggagaaggggaccctttttccgaacaggggttccacatagggcgggggccccctttcgggcgctacaaagggtggggcgggggggcggaaaaggggtgggacaaaaagggcggcgaccctgttg

SEQ ID NO: 370432 - DNA, 727 bp, Homo sapiens
gttctcagagagagcaagggtcaacattatctccctggggagaagttttgacacctctagcaagctcttctgttactcacttaagtagtaaacaggaagaatatgttaaggttgccaaaacactttttactgatgaagcattaaaaccttgcccaaggtgccagtcccctgctaagtaccagccatataagaaaaggggactgtgtagccgaacagcctgtggttttgacttttgtgtgttatgtctgtgtgcttatcatgggtctgaagaatgtagtagaggagcagcaaagccaagaaatagaaaagatgctctcccaggaagtgcccagagtaagcggaatttaaaacgcctctgaagagactaaatatagaactcccccatgcagtgttctatttatctgacttaaaattatgaatattttgaatacatgcaaatcttcccattaatgacaggtgatgattaatttcctattttgtatatattataatcgatgtcattgtatgttttctttaaagttgttttgaaaaaattttattttactatgtcattttacccattttaataacttggtattttaaataaagaattttcattgttgttatatgtatgtactttattgttttatgtaacattttaaatttgtgcatttcatcactcttgacatgttcttcaatccttttttaaaaaatagtttttcagataatattaaagattttgaactct

SEQ ID NO: 370433 - DNA, 790 bp, Homo sapiens
gttctcagagagagcaagggtcaacattatctccctggggagaagttttgacacctctagcaagctcttctgttactcacttaagtagtaaacaggaagaatatgttaaggttgccaaaacactttttactgatgaagcattaaaaccttgcccaaggtgccagtcccctgctaagtaccagccatataagaaaaggggactgtgtagccgaacagcctgtggttttgacttttgtgtgttatgtctgtgtgcttatcatgggtctgaagaatgtagtagaggagcagcaaagccaagaaatagaaaagatgctctcccaggaagtgcccagagtaagcggaatttaaaacgcctctgaagagactaaatatagaactcccccatgcagtgttctatttatctgacttaaaattatgaatattttgaatacatgcaaatcttcccattaatgacaggtgatgattaatttcctattttgtatatattataatcgatgtcattgtatgttttctttaaagttgttttgaaaaaattttattttactatgtcattttacccattttaataacttggtattttaaataaagaattttcattgttgttatatgtatgtactttattgttttatgtaacattttaaatttgtgcatttcatcactcttgacatgttcttcaatccttttttaaaaaatagtttttcagataatattaaagattttgaactctagacagatggccttatagatttggaaaatgagtacttgactgaaatgaaatataaataaaata

SEQ ID NO: 370434 - DNA, 673 bp, Homo sapiens
gttctcagagagagcaagggtcaacattatctccctggggagaagttttgacacctctagcaagctcttctgttactcacttaagtagtaaacaggaagaatatgttaaggttgccaaaacactttttactgatgaagcattaaaaccttgcccaaggtgccagtcccctgctaagtaccagccatataagaaaaggggactgtgtagccgaacagcctgtggttttgacttttgtgtgttatgtctgtgtgcttatcatgggtctgaagaatgtagtagaggagcagcaaagccaagaaatagaaaagatgctctcccaggaagtgcccagagtaagcggaatttaaaacgcctctgaagagactaaatagaatacatgcaaatcttcccattaatgacaggtgatgattaatttcctattttgtatatattataatcgatgtcattgtatgttttctttaaagttgttttgaaaaaattttattttactatgtcattttacccattttaataacttggtattttaaataaagaattttcattgttgttatatgtatgtactttattgttttatgtaacattttaaatttgtgcatttcatcactcttgacatgttcttcaatccttttttaaaaaatagtttttcagataatattaaagattttgaactct

SEQ ID NO: 370435 - DNA, 605 bp, Homo sapiens
gttctcagagagagcaagggtcaacattatctccctggggagaagttttgacacctctagcaagctcttctgttactcacttaagtagtaaacaggaagaatatgttaaggttgccaaaacactttttactgatgaagcattaaaaccttgcccaaggtgccagtcccctgctaagtaccagccatataagaaaaggggactgtgtagccgaacagcctgtggttttgacttttgtgtgttatgtctgtgtgcttatcatgggtctgaagaatgtagtagaggagcagcaaagccaagaaatagaaaagatgctctcccaggaagtgcccagagtaagcggaatttaaaacgcctctgaagagactaaatatagaactcccccatgcagtgttctatttatctgacttaaaattatgaatattttgaatacatgcaaatcttcccattaatgacaggtgatgattaatttcctattttgtatatattataatcgatgtcattgtatgttttctttaaagttgttttgaaaaaattttattttactatgtcattttacccattttaataacttggtattttaaataaagaattttcattgttgtta

SEQ ID NO: 370436 - DNA, 3170 bp, Homo sapiens
cggcggcttcccactcccactggatgtccagcccgcggccccacggctgggtgagcccgtcctctcctcgtttctgtctccggacccaccgtgtggccccagaccctccagtgaggacctcccgtatttcttcagagcagcccttgcgtgctggaggcctgggcttcagtgtgtccctgggtgccctggggcatgttctgtgacctcccagctcctcgcctcatggggccgctgtatcaagtgacacagtttgtgtgctgcgtaccatgcctggcacccatttgaggtgttgcaaggaggccatgtttgctcgatgagagcagcctaagatctacaaactgttgttcgagtggatgggaacttgatgctattttcaggctgaatgacaagactccgcgatgcttctcggcctgggctgcacaacggaatctaccagggaggttttaaaaacactggtacttgctggaggtggtggcgcctgtctgtaattgcagctgctcccgcctcagcctcctgagtgtctgcttctggttttcatgatgacctggggcccaggcatactacacttgtgctgttcaggggccagtcctgcaccaggagcccatcagccacagctccgccgagaagcactgatatgcagagctaagcagctttgtttccacgtggatcctgcgtaggttttcttggtccatccgtagacaccgcactcctgcagaggatcttctcgggatgccccactgtctctgttttccctcttcactgaacactcagtcggggctcgccatgatgcctctgtgtctgctggcttctcccccattggaacagccttcttggcacgccacactgctagctgctgggcactgtgctttctgcctttaccgttctgccgtgatgttgccaaaatagcagcaacaacaacaacaacaaaggctgggcacctggctcatgcctgtattcccagcagttcgagatcagcctgggcaacatggtgagaccctatctctacaaaaataaaaaatgaaatgagctgggtggggtggcgcatgcatgcctgtggtcccagctacttgggaggctgaggtcggaagatcgctggagcttaaccttgaggtcaaggttgcagtgagccgagattacatcactgcactccagcgtgggagacagagaccctgtattaacaaacaaaaacacaaaccacaaagggcaggtctgaaactgccatttaaaaaaaaatttaataaacttaaaaaaatatatatccacagatgcaggtgaagaacctgttgtcttcctcaagcctctttttcacccatgggtggaaatggtgccctggacacccaggcccacgaggtctttgcgtggggtccctacacagggctttagcttacactgtgctgccctcctgtcccccgagttcccagtctgtcaaaatccaacctggtctcccaggcccagggcaaatgccacctcctccatgaagcctgccacatcctttgcacacccttgggcgctgaccttgttctcccagcgcacaggcacgggtagtttgcccctgtagtagtaactcaggcacaaaacgaactcttgctgaggctcggccgcgcagagctgagggttgccgcttccaggttcaagtgcattttgagtttcattcccagcttccttctttttctggtctttaatttcttctccggattaggtcccactcaatgctttccttctcaatttccaaaagagtatggtcagagccagcagcacaccaccttccccatgggtgggggggggccagcctgtggcgggggtgcgggtcccatcttttcgaaggaattgacccacagtgggcgggtccacctttgaccttgccccagggagcgcagacagaaaaaagatccttgcttagtttgaggggccgctggggtgctcggtttgtcttcagaggcctgtctgtaacaccaatgccaacccggtggcactgactggtcaccctgaaggccacggccagtgtcctaggaagggactcaatttctagctgtgccacctgagattctggggttaggctggttgtgcttctgaagttccactgtgctcaaagtgcttggtgaaagttagcgaaggtgattttacaaaaatagatgcataaaatgtctaggaaacacaaaaaatcctcattactcttctctccaaatattttttaagccccaactggaccctaggcaaaagtgagtggcactcctctgccaggactccaggcaagccccggcatcttcttgctgccgtcccagacaacagaagttaccagatgaacagacttggatgggccacgggggtggagagctggaaagcttggctgtgcctctcgatgatgattaagatttcaatatttacagcaaaaccacaaagcaaatgatagaataaagcaaaacaatggaaaatctgagttcactcgtgagagaggtacgtatgtgagctctgaggaaattacagagggaacgcatgcagcgggacagctctcccaatcgcagcgtgcaaagtagacatccatagtgtcttttgaaaaatgaaaaacacattactttgaacagccaagaaaaaaattgcaatttattaagattcaataaagcgttgtactttcgaaagcaactttcgatgcatgttcttcaacagtcacattctatgaggaaaacattaagagccacgaacttgttgtttaatctcagagttacagacatattaagttcaaaataaaaggtaaaaaaaacaaaaaacaaacaaacaaaaaacccctcaaacccaacaaaacccaaaaacaaacaaacatattcttgacttccatccccaattttaaaacaacagtttttctacaactcaatgctcgccggcagcacgggaagtggtatgtcggacgcacatacgcacacgcatgctcacacgcacacatattggatatacatacgcaggtgtatgtccatcgaatatatagaacgcatgtaatggcaatgagatgcagtcactctgaggaaggttggtttttctaaatatcctactaaacttgagaaaaaaagtcttgaacccagtttgtgcatagttcatgatcctctataaaaccagcttttgtggatctgcagtcttgcaggacttttttttttttttttgtattttttttgttttat

SEQ ID NO: 370437 - DNA, 2688 bp, Homo sapiens
ttggcaggacactagtgcttggcaggacactagtgcttggcaggacactagtgcttggcaggacactagtgcttggcaggacacttgtgctgttcaggggccagtcctgcaccaggagcccatcagccacagctccgccgagaagcactgatatgcagagctaagcagctttgtttccacgtggatcctgcgtaggttttcttggtccatccgtagacaccgcactcctgcagaggatcttctcgggatgccccactgtctctgttttccctcttcactgaacactcagtcggggctcgccatgatgcctctgtgtctgctggcttctcccccattggaacagccttcttggcacgccacactgctagctgctgggcactgtgctttctgcctttaccgttctgccgtgatgttgccaaaatagcagcaacaacaacaacaacaaaggctgggcacctggctcatgcctgtattcccagcagttcgagatcagcctgggcaacatggtgagaccctatctctacaaaaataaaaaatgaaatgagctgggtggggtggcgcatgcatgcctgtggtcccagctacttgggaggctgaggtcggaagatcgctggagcttaaccttgaggtcaaggttgcagtgagccgagattacatcactgcactccagcgtgggagacagagaccctgtattaacaaacaaaaacacaaaccacaaagggcaggtctgaaactgccatttaaaaaaaaatttaataaacttaaaaaaatatatatccacagatgcaggtgaagaacctgttgtcttcctcaagcctctttttcacccatgggtggaaatggtgccctggacacccaggcccacgaggtctttgcgtggggtccctacacagggctttagcttacactgtgctgccctcctgtcccccgagttcccagtctgtcaaaatccaacctggtctcccaggcccagggcaaatgccacctcctccatgaagcctgccacatcctttgcacacccttgggcgctgaccttgttctcccagcgcacaggcacgggtagtttgcccctgtagtagtaactcaggcacaaaacgaactcttgctgaggctcggccgcgcagagctgagggttgccgcttccaggttcaagtgcattttgagtttcattcccagcttccttctttttctggtctttaatttcttctccggattaggtcccactcaatgctttccttctcaatttccaaaagagtatggtcagagccagcagcacaccaccttccccatgggtgggggggggccagcctgtggcgggggtgcgggtcccatcttttcgaaggaattgacccacagtgggcgggtccacctttgaccttgccccagggagcgcagacagaaaaaagatccttgcttagtttgaggggccgctggggtgctcggtttgtcttcagaggcctgtctgtaacaccaatgccaacccggtggcactgactggtcaccctgaaggccacggccagtgtcctaggaagggactcaatttctagctgtgccacctgagattctggggttaggctggttgtgcttctgaagttccactgtgctcaaagtgcttggtgaaagttagcgaaggtgattttacaaaaatagatgcataaaatgtctaggaaacacaaaaaatcctcattactcttctctccaaatattttttaagccccaactggaccctaggcaaaagtgagtggcactcctctgccaggactccaggcaagccccggcatcttcttgctgccgtcccagacaacagaagttaccagatgaacagacttggatgggccacgggggtggagagctggaaagcttggctgtgcctctcgatgatgattaagatttcaatatttacagcaaaaccacaaagcaaatgatagaataaagcaaaacaatggaaaatctgagttcactcgtgagagaggtacgtatgtgagctctgaggaaattacagagggaacgcatgcagcgggacagctctcccaatcgcagcgtgcaaagtagacatccatagtgtcttttgaaaaatgaaaaacacattactttgaacagccaagaaaaaaattgcaatttattaagattcaataaagcgttgtactttcgaaagcaactttcgatgcatgttcttcaacagtcacattctatgaggaaaacattaagagccacgaacttgttgtttaatctcagagttacagacatattaagttcaaaataaaaggtaaaaaaaacaaaaaacaaacaaacaaaaaacccctcaaacccaacaaaacccaaaaacaaacaaacatattcttgacttccatccccaattttaaaacaacagtttttctacaactcaatgctcgccggcagcacgggaagtggtatgtcggacgcacatacgcacacgcatgctcacacgcacacatattggatatacatacgcaggtgtatgtccatcgaatatatagaacgcatgtaatggcaatgagatgcagtcactctgaggaaggttggtttttctaaatatcctactaaacttgagaaaaaaagtcttgaacccagtttgtgcatagttcatgatcctctataaaaccagcttttgtggatctgcagtcttgcaggacttttttttttttttttgtattttttttgttttat

SEQ ID NO: 370438 - DNA, 2474 bp, Homo sapiens
tggaggtgacttagaggatccgatcttctcgggatgccccactgtctctgttttccctcttcactgaacactcagtcggggctcgccatgatgcctctgtgtctgctggcttctcccccattggaacagccttcttggcacgccacactgctagctgctgggcactgtgctttctgcctttaccgttctgccgtgatgttgccaaaatagcagcaacaacaacaacaacaaaggctgggcacctggctcatgcctgtattcccagcagttcgagatcagcctgggcaacatggtgagaccctatctctacaaaaataaaaaatgaaatgagctgggtggggtggcgcatgcatgcctgtggtcccagctacttgggaggctgaggtcggaagatcgctggagcttaaccttgaggtcaaggttgcagtgagccgagattacatcactgcactccagcgtgggagacagagaccctgtattaacaaacaaaaacacaaaccacaaagggcaggtctgaaactgccatttaaaaaaaaatttaataaacttaaaaaaatatatatccacagatgcaggtgaagaacctgttgtcttcctcaagcctctttttcacccatgggtggaaatggtgccctggacacccaggcccacgaggtctttgcgtggggtccctacacagggctttagcttacactgtgctgccctcctgtcccccgagttcccagtctgtcaaaatccaacctggtctcccaggcccagggcaaatgccacctcctccatgaagcctgccacatcctttgcacacccttgggcgctgaccttgttctcccagcgcacaggcacgggtagtttgcccctgtagtagtaactcaggcacaaaacgaactcttgctgaggctcggccgcgcagagctgagggttgccgcttccaggttcaagtgcattttgagtttcattcccagcttccttctttttctggtctttaatttcttctccggattaggtcccactcaatgctttccttctcaatttccaaaagagtatggtcagagccagcagcacaccaccttccccatgggtgggggggggccagcctgtggcgggggtgcgggtcccatcttttcgaaggaattgacccacagtgggcgggtccacctttgaccttgccccagggagcgcagacagaaaaaagatccttgcttagtttgaggggccgctggggtgctcggtttgtcttcagaggcctgtctgtaacaccaatgccaacccggtggcactgactggtcaccctgaaggccacggccagtgtcctaggaagggactcaatttctagctgtgccacctgagattctggggttaggctggttgtgcttctgaagttccactgtgctcaaagtgcttggtgaaagttagcgaaggtgattttacaaaaatagatgcataaaatgtctaggaaacacaaaaaatcctcattactcttctctccaaatattttttaagccccaactggaccctaggcaaaagtgagtggcactcctctgccaggactccaggcaagccccggcatcttcttgctgccgtcccagacaacagaagttaccagatgaacagacttggatgggccacgggggtggagagctggaaagcttggctgtgcctctcgatgatgattaagatttcaatatttacagcaaaaccacaaagcaaatgatagaataaagcaaaacaatggaaaatctgagttcactcgtgagagaggtacgtatgtgagctctgaggaaattacagagggaacgcatgcagcgggacagctctcccaatcgcagcgtgcaaagtagacatccatagtgtcttttgaaaaatgaaaaacacattactttgaacagccaagaaaaaaattgcaatttattaagattcaataaagcgttgtactttcgaaagcaactttcgatgcatgttcttcaacagtcacattctatgaggaaaacattaagagccacgaacttgttgtttaatctcagagttacagacatattaagttcaaaataaaaggtaaaaaaaacaaaaaacaaacaaacaaaaaacccctcaaacccaacaaaacccaaaaacaaacaaacatattcttgacttccatccccaattttaaaacaacagtttttctacaactcaatgctcgccggcagcacgggaagtggtatgtcggacgcacatacgcacacgcatgctcacacgcacacatattggatatacatacgcaggtgtatgtccatcgaatatatagaacgcatgtaatggcaatgagatgcagtcactctgaggaaggttggtttttctaaatatcctactaaacttgagaaaaaaagtcttgaacccagtttgtgcatagttcatgatcctctataaaaccagcttttgtggatctgcagtcttgcaggacttttttttttttttttgtattttttttgttttat

SEQ ID NO: 370439 - DNA, 4155 bp, Homo sapiens
cggcggcttcccactcccactggatgtccagcccgcggccccacggctgggtgagcccgtcctctcctcgtttctgtctccggacccaccgtgtggccccagaccctccagtgaggacctcccgtatttcttcagagcagcccttgcgtgctggaggcctgggcttcagtgtgtccctgggtgccctggggcatgttctgtgacctcccagctcctcgcctcatggggccgctgtatcaagtgacacagtttgtgtgctgcgtaccatgcctggcacccatttgaggtgttgcaaggaggccatgtttgctcgatgagagcagcctaagatctacaaactgttgttcgagtggatgggaacttgatgctattttcaggctgaatgacaagactccgcgatgcttctcggcctgggctgcacaacggaatctaccagggaggttttaaaaacactggtacttgctggaggtggtggcgcctgtctgtaattgcagctgctccagaggctgaggcggaggattgcttgagcccaagagtttcggtttatttgctttttcagagtcttgctcttgcccaggctggagtgcagttccatgatctcggctcactgcctcagcctcccaagtagctgggattacaggtgcatacaaccaggcctggctgatcttcgtatttttagtagagatggggtttcaccatgatggtcaggctggtcaagatctcctgacctcaagtgatctgcccgcctcggcctcccaaagtgctgggattacagacatgaaccacaacacctgccgagcccaggtgttttgaatccagcacgggcaatggcaagaccctgtcccaacaaacaaaaaaacactggtgcctgaggcccaccccgagagattctgattgagttgatttggatttgaattatctttaaaattttggatgtgaattttttttttttttcttggaatggagtttcactcttgttccccaggctggagtgcaacgggacgatcttggctcaccgcaacctccgcctactgggttcaagccattctcctgcctcagcttcccaagtagctgggattacaggcatgtgctaccatgcccagctaattttgtatttttagtagagacagggtttctccatgttgctcaggctggtcttgaactcctgacctcaggtgatccgcccgcctcggactcccaaagtgctgggattacaggcatgagccaccatgcctggccggatgtgaattatcttaaaaattttcaggtaattctaatgggccaaggttgagaacccctgctctgggcccatccgagcaccaggctgtcacaaacgcatgcatgcactcacgcccgtgggcttggggggcttcggaaatgtgcttctgcttttttgagatggggtctttctgttgcccatcccggagcacagtggcacgatcacagctcactgcagcctcgacctcctgggctcaggtgatcctcccgcctcagcctcctgagtgtctgcttctggttttcatgatgacctggggcccaggcatactacacttgtgctgttcaggggccagtcctgcaccaggagcccatcagccacagctccgccgagaagcactgatatgcagagctaagcagctttgtttccacgtggatcctgcgtaggttttcttggtccatccgtagacaccgcactcctgcagaggatcttctcgggatgccccactgtctctgttttccctcttcactgaacactcagtcggggctcgccatgatgcctctgtgtctgctggcttctcccccattggaacagccttcttggcacgccacactgctagctgctgggcactgtgctttctgcctttaccgttctgccgtgatgttgccaaaatagcagcaacaacaacaacaacaaaggctgggcacctggctcatgcctgtattcccagcagttcgagatcagcctgggcaacatggtgagaccctatctctacaaaaataaaaaatgaaatgagctgggtggggtggcgcatgcatgcctgtggtcccagctacttgggaggctgaggtcggaagatcgctggagcttaaccttgaggtcaaggttgcagtgagccgagattacatcactgcactccagcgtgggagacagagaccctgtattaacaaacaaaaacacaaaccacaaagggcaggtctgaaactgccatttaaaaaaaaatttaataaacttaaaaaaatatatatccacagatgcaggtgaagaacctgttgtcttcctcaagcctctttttcacccatgggtggaaatggtgccctggacacccaggcccacgaggtctttgcgtggggtccctacacagggctttagcttacactgtgctgccctcctgtcccccgagttcccagtctgtcaaaatccaacctggtctcccaggcccagggcaaatgccacctcctccatgaagcctgccacatcctttgcacacccttgggcgctgaccttgttctcccagcgcacaggcacgggtagtttgcccctgtagtagtaactcaggcacaaaacgaactcttgctgaggctcggccgcgcagagctgagggttgccgcttccaggttcaagtgcattttgagtttcattcccagcttccttctttttctggtctttaatttcttctccggattaggtcccactcaatgctttccttctcaatttccaaaagagtatggtcagagccagcagcacaccaccttccccatgggtgggggggggccagcctgtggcgggggtgcgggtcccatcttttcgaaggaattgacccacagtgggcgggtccacctttgaccttgccccagggagcgcagacagaaaaaagatccttgcttagtttgaggggccgctggggtgctcggtttgtcttcagaggcctgtctgtaacaccaatgccaacccggtggcactgactggtcaccctgaaggccacggccagtgtcctaggaagggactcaatttctagctgtgccacctgagattctggggttaggctggttgtgcttctgaagttccactgtgctcaaagtgcttggtgaaagttagcgaaggtgattttacaaaaatagatgcataaaatgtctaggaaacacaaaaaatcctcattactcttctctccaaatattttttaagccccaactggaccctaggcaaaagtgagtggcactcctctgccaggactccaggcaagccccggcatcttcttgctgccgtcccagacaacagaagttaccagatgaacagacttggatgggccacgggggtggagagctggaaagcttggctgtgcctctcgatgatgattaagatttcaatatttacagcaaaaccacaaagcaaatgatagaataaagcaaaacaatggaaaatctgagttcactcgtgagagaggtacgtatgtgagctctgaggaaattacagagggaacgcatgcagcgggacagctctcccaatcgcagcgtgcaaagtagacatccatagtgtcttttgaaaaatgaaaaacacattactttgaacagccaagaaaaaaattgcaatttattaagattcaataaagcgttgtactttcgaaagcaactttcgatgcatgttcttcaacagtcacattctatgaggaaaacattaagagccacgaacttgttgtttaatctcagagttacagacatattaagttcaaaataaaaggtaaaaaaaacaaaaaacaaacaaacaaaaaacccctcaaacccaacaaaacccaaaaacaaacaaacatattcttgacttccatccccaattttaaaacaacagtttttctacaactcaatgctcgccggcagcacgggaagtggtatgtcggacgcacatacgcacacgcatgctcacacgcacacatattggatatacatacgcaggtgtatgtccatcgaatatatagaacgcatgtaatggcaatgagatgcagtcactctgaggaaggttggtttttctaaatatcctactaaacttgagaaaaaaagtcttgaacccagtttgtgcatagttcatgatcctctataaaaccagcttttgtggatctgcagtcttgcaggacttttttttttttttttgtattttttttgttttat

SEQ ID NO: 370440 - DNA, 3179 bp, Homo sapiens
cggcggcttcccactcccactggatgtccagcccgcggccccacggctgggtgagcccgtcctctcctcgtttctgtctccggacccaccgtgtggccccagaccctccagtgaggacctcccgtatttcttcagagcagcccttgcgtgctggaggcctgggcttcagtgtgtccctgggtgccctggggcatgttctgtgacctcccagctcctcgcctcatggggccgctgtatcaagtgacacagtttgtgtgctgcgtaccatgcctggcacccatttgaggtgttgcaaggaggccatgtttgctcgatgagagcagcctaagatctacaaactgttgttcgagtggatgggaacttgatgctattttcaggctgaatgacaagactccgcgatgcttctcggcctgggctgcacaacggaatctaccagggaggttttaaaaacactggtacttgctggaggtggtggcgcctgtctgtaattgcagctgctccagaggctgaggcggaggattgcttgagcccaagagtttcggtttatttgctttttcagagtcttgctcttgcccaggctggagtgcagttccatgatctcggctcactgcctcagcctcccaagtagctgggattacaggtgcatacaaccaggcctggctgatcttcgtatttttagtagagatggggtttcaccatgatggtcaggctggtcaagatctcctgacctcaagtgatctgcccgcctcggcctcccaaagtgctgggattacagacatgaaccacaacacctgccgagcccaggtgttttgaatccagcacgggcaatggcaagaccctgtcccaacaaacaaaaaaacactggtgcctgaggcccaccccgagagattctgattgagttgatttggatttgaattatctttaaaattttggatgtgaattttttttttttttcttggaatggagtttcactcttgttccccaggctggagtgcaacgggacgatcttggctcaccgcaacctccgcctactgggttcaagccattctcctgcctcagcttcccaagtaggctacttgggaggctgaggtcggaagatcgctggagcttaaccttgaggtcaaggttgcagtgagccgagattacatcactgcactccagcgtgggagacagagaccctgtattaacaaacaaaaacacaaaccacaaagggcaggtctgaaactgccatttaaaaaaaaatttaataaacttaaaaaaatatatatccacagatgcaggtgaagaacctgttgtcttcctcaagcctctttttcacccatgggtggaaatggtgccctggacacccaggcccacgaggtctttgcgtggggtccctacacagggctttagcttacactgtgctgccctcctgtcccccgagttcccagtctgtcaaaatccaacctggtctcccaggcccagggcaaatgccacctcctccatgaagcctgccacatcctttgcacacccttgggcgctgaccttgttctcccagcgcacaggcacgggtagtttgcccctgtagtagtaactcaggcacaaaacgaactcttgctgaggctcggccgcgcagagctgagggttgccgcttccaggttcaagtgcattttgagtttcattcccagcttccttctttttctggtctttaatttcttctccggattaggtcccactcaatgctttccttctcaatttccaaaagagtatggtcagagccagcagcacaccaccttccccatgggtgggggggggccagcctgtggcgggggtgcgggtcccatcttttcgaaggaattgacccacagtgggcgggtccacctttgaccttgccccagggagcgcagacagaaaaaagatccttgcttagtttgaggggccgctggggtgctcggtttgtcttcagaggcctgtctgtaacaccaatgccaacccggtggcactgactggtcaccctgaaggccacggccagtgtcctaggaagggactcaatttctagctgtgccacctgagattctggggttaggctggttgtgcttctgaagttccactgtgctcaaagtgcttggtgaaagttagcgaaggtgattttacaaaaatagatgcataaaatgtctaggaaacacaaaaaatcctcattactcttctctccaaatattttttaagccccaactggaccctaggcaaaagtgagtggcactcctctgccaggactccaggcaagccccggcatcttcttgctgccgtcccagacaacagaagttaccagatgaacagacttggatgggccacgggggtggagagctggaaagcttggctgtgcctctcgatgatgattaagatttcaatatttacagcaaaaccacaaagcaaatgatagaataaagcaaaacaatggaaaatctgagttcactcgtgagagaggtacgtatgtgagctctgaggaaattacagagggaacgcatgcagcgggacagctctcccaatcgcagcgtgcaaagtagacatccatagtgtcttttgaaaaatgaaaaacacattactttgaacagccaagaaaaaaattgcaatttattaagattcaataaagcgttgtactttcgaaagcaactttcgatgcatgttcttcaacagtcacattctatgaggaaaacattaagagccacgaacttgttgtttaatctcagagttacagacatattaagttcaaaataaaaggtaaaaaaaacaaaaaacaaacaaacaaaaaacccctcaaacccaacaaaacccaaaaacaaacaaacatattcttgacttccatccccaattttaaaacaacagtttttctacaactcaatgctcgccggcagcacgggaagtggtatgtcggacgcacatacgcacacgcatgctcacacgcacacatattggatatacatacgcaggtgtatgtccatcgaatatatagaacgcatgtaatggcaatgagatgcagtcactctgaggaaggttggtttttctaaatatcctactaaacttgagaaaaaaagtcttgaacccagtttgtgcatagttcatgatcctctataaaaccagcttttgtggatctgcagtcttgcaggacttttttttttttttttgtattttttttgttttat

SEQ ID NO: 370441 - DNA, 2947 bp, Homo sapiens
cggcggcttcccactcccactggatgtccagcccgcggccccacggctgggtgagcccgtcctctcctcgtttctgtctccggacccaccgtgtggccccagaccctccagtgaggacctcccgtatttcttcagagcagcccttgcgtgctggaggcctgggcttcagtgtgtccctgggtgccctggggcatgttctgtgacctcccagctcctcgcctcatggggccgctgtatcaagtgacacagtttgtgtgctgcgtaccatgcctggcacccatttgaggtgttgcaaggaggccatgtttgctcgatgagagcagcctaagatctacaaactgttgttcgagtggatgggaacttgatgctattttcaggctgaatgacaagactccgcgatgcttctcggcctgggctgcacaacggaatctaccagggaggttttaaaaacactggtacttgctggaggtggtggcgcctgtctgtaattgcagctgctccagaggctgaggcggaggattgcttgagcccaagagtttcggtttatttgctttttcagagtcttgctcttgcccaggctggagtgcagttccatgatctcggctcactgcctcagcctcccaagtagctgggattacaggtgcatacaaccaggcctggctgatcttcgtatttttagtagagatggggtttcaccatgatggtcaggctggtcaagatctcctgacctcaagtgatctgcccgcctcggcctcccaaagtgctgggattacagacatgaaccacaacacctgccgagcccaggtgttttgaatccagcacgggcaatggcaagaccctgtcccaacaaacaaaaaaacactggtgcctgaggcccaccccgagagattctgattgagttgatttggatttgaattatctttaaaattttggatgtgaattttttttttttttcttggaatggagtttcactcttgttccccaggctggagtgcaacgggacgatcttggctcaccgcaacctccgcctactgggttcaagccattctcctgcctcagcttcccaagtagctgggattacaggcatgtgctaccatgcccagctaattttgtatttttagtagagacagggtttctccatgttgctcaggctggtcttgaactcctgacctcaggtgatccgcccgcctcggactcccaaagtgctgggattacaggcatgagccaccatgcctggccggatgtgaattatcttaaaaattttcaggtaattctaatgggccaaggttgagaacccctgctctgggcccatccgagcaccaggctgtcacaaacgcatgcatgcactcacgcccgtgggcttggggggcttcggaaatgtgcttctgcttttttgagatggggtctttctgttgcccatcccggagcacagtggcacgatcacagctcactgcagcctcgacctcctgggctcaggtgatcctcccgcctcagcctcctgagtgtctgcttctggttttcatgatgacctggggcccaggcatactacacttgtgctgttcaggggccagtcctgcaccaggagcccatcagccacagctccgccgagaagcactgatatgcagagctaagcagctttgtttccacgtggatcctgcgtaggttttcttggtccatccgtagacaccgcactcctgcagaggatcttctcgggatgccccactgtctctgttttccctcttcactgaacactcagtcggggctcgccatgatgcctctgtgtctgctggcttctcccccattggaacagccttcttggcacgccacactgctagctgctgggcactgtgctttctgcctttaccgttctgccgtgatgttgccaaaatagcagcaacaacaacaacaacaaaggctgggcacctggctcatgcctgtattcccagcagttcgagatcagcctgggcaacatgccccaactggaccctaggcaaaagtgagtggcactcctctgccaggactccaggcaagccccggcatcttcttgctgccgtcccagacaacagaagttaccagatgaacagacttggatgggccacgggggtggagagctggaaagcttggctgtgcctctcgatgatgattaagatttcaatatttacagcaaaaccacaaagcaaatgatagaataaagcaaaacaatggaaaatctgagttcactcgtgagagaggtacgtatgtgagctctgaggaaattacagagggaacgcatgcagcgggacagctctcccaatcgcagcgtgcaaagtagacatccatagtgtcttttgaaaaatgaaaaacacattactttgaacagccaagaaaaaaattgcaatttattaagattcaataaagcgttgtactttcgaaagcaactttcgatgcatgttcttcaacagtcacattctatgaggaaaacattaagagccacgaacttgttgtttaatctcagagttacagacatattaagttcaaaataaaaggtaaaaaaaacaaaaaacaaacaaacaaaaaacccctcaaacccaacaaaacccaaaaacaaacaaacatattcttgacttccatccccaattttaaaacaacagtttttctacaactcaatgctcgccggcagcacgggaagtggtatgtcggacgcacatacgcacacgcatgctcacacgcacacatattggatatacatacgcaggtgtatgtccatcgaatatatagaacgcatgtaatggcaatgagatgcagtcactctgaggaaggttggtttttctaaatatcctactaaacttgagaaaaaaagtcttgaacccagtttgtgcatagttcatgatcctctataaaaccagcttttgtggatctgcagtcttgcaggacttttttttttttttttgtattttttttgttttat

SEQ ID NO: 370442 - DNA, 3619 bp, Homo sapiens
cggcggcttcccactcccactggatgtccagcccgcggccccacggctgggtgagcccgtcctctcctcgtttctgtctccggacccaccgtgtggccccagaccctccagtgaggacctcccgtatttcttcagagcagcccttgcgtgctggaggcctgggcttcagtgtgtccctgggtgccctggggcatgttctgtgacctcccagctcctcgcctcatggggccgctgtatcaagtgacacagtttgtgtgctgcgtaccatgcctggcacccatttgaggtgttgcaaggaggccatgtttgctcgatgagagcagcctaagatctacaaactgttgttcgagtggatgggaacttgatgctattttcaggctgaatgacaagactccgcgatgcttctcggcctgggctgcacaacggaatctaccagggaggttttaaaaacactggtacttgctggaggtggtggcgcctgtctgtaattgcagctgctccagaggctgaggcggaggattgcttgagcccaagagtttcggtttatttgctttttcagagtcttgctcttgcccaggctggagtgcagttccatgatctcggctcactgcctcagcctcccaagtagctgggattacaggtgcatacaaccaggcctggctgatcttcgtatttttagtagagatggggtttcaccatgatggtcaggctggtcaagatctcctgacctcaagtgatctgcccgcctcggcctcccaaagtgctgggattacagacatgaaccacaacacctgccgagcccaggtgttttgaatccagcacgggcaatggcaagaccctgtcccaacaaacaaaaaaacactggtgcctgaggcccaccccgagagattctgattgagttgatttggatttgaattatctttaaaattttggatgtgaattttttttttttttcttggaatggagtttcactcttgttccccaggctggagtgcaacgggacgatcttggctcaccgcaacctccgcctactgggttcaagccattctcctgcctcagcttcccaagtagctgggattacaggcatgtgctaccatgcccagctaattttgtatttttagtagagacagggtttctccatgttgctcaggctggtcttgaactcctgacctcaggtgatccgcccgcctcggactcccaaagtgctgggattacaggcatgagccaccatgcctggccggatgtgaattatcttaaaaattttcaggtaattctaatgggccaaggttgagaacccctgctctgggcccatccgagcaccaggctgtcacaaacgcatgcatgcactcacgcccgtgggcttggggggcttcggaaatgtgcttctgcttttttgagatggggtctttctgttgcccatcccggagcacagtggcacgatcacagctcactgcagcctcgacctcctgggctcaggtgatcctcccgcctcagcctcctgagtgtctgcttctggttttcatgatgacctggggcccaggcatactacacttgtgctgttcaggggccagtcctgcaccaggagcccatcagccacagctccgccgagaagcactgatatgcagagctaagcagctttgtttccacgtggatcctgcgtaggttttcttggtccatccgtagacaccgcactcctgcagaggatcttctcgggatgccccactgtctctgttttccctcttcactgaacactcagtcggggctcgccatgatgcctctgtgtctgctggcttctcccccattggaacagccttcttggcacgccacactgctagctgctgggcactgtgctttctgcctttaccgttctgccgtgatgttgccaaaatagcagcaacaacaacaacaacaaaggctgggcacctggctcatgcctgtattcccagcagttcgagatcagcctgggcaacatggtgagaccctatctctacaaaaataaaaaatgaaatgagctgggtggggtggcgcatgcatgcctgtggtcccagctacttgggaggctgaggtcggaagatcgctggagcttaaccttgaggtcaaggttgcagtgagccgagattacatcactgcactccagcgtgggagacagagaccctgtattaacaaacaaaaacacaaaccacaaagggcaggtctgaaactgccatttaaaaaaaaatttaataaacttaaaaaaatatatatccacagatgcaggtgaagaacctgttgtcttcctcaagcctctttttcacccatgggtggaaatggtgccctggacacccaggcccacgaggtctttgcgtggggtccctacacagggctttagcttacactgtgctgccctcctgtcccccgagttcccagtctgtcaaaatccaacctggtctcccaggcccagggcaaatgccacctcctccatgaagcctgccacatcctttgcacacccttgggcgctgaccttgttctcccagcgcacaggcacgggtagtttgcccctgtagtagtaactcaggcacaaaacgaactcttgctgaggctcggccgcgcagagctgagggttgccgcttccaggttcaagtgcattttgagtttcattcccagcttccttctttttctggtctttaatttcttctccggattaggtcccactcaatgctttccttctcaatttccaaaagagtatggtcagagccagcagcacaccaccttccccatgggtgggggggggccagcctgtggcgggggtgcgggtcccatcttttcgaaggaattgacccacagtgggcgggtccacctttgaccttgccccagggagcgcagacagaaaaaagatccttgcttagtttgaggggccgctggggtgctcggtttgtcttcagaggcctgtctgtaacaccaatgccaacccggtggcactgactggtcaccctgaaggccacggccagtgtcctaggaagggactcaatttctagctgtgccacctgagattctggggttaggctggttgtgcttctgaagttccactgtgctcaaagtgcttggtgaaagttagcgaaggtgattttacaaaaatagatgcataaaatgtctaggaaacacaaaaaatcctcattactcttctctccaaatattttttaagccccaactggaccctaggcaaaagtgagtggcactcctctgccaggactccaggcaagccccggcatcttcttgctgccgtcccagacaacagaagttaccagatgaacagacttggatgggccacgggggtggagagctggaaagcttggctgtgcctctcgatgatgattaagatttcaatatttacagcaaaaccacaaagcaaatgatagaataaagcaaaacaatggaaaatctgagttcactcgtgagagaggtacgtatgtgagctctgaggaaattacagagggaacgcatgcagcgggacagctctcccaatcgcagcgtgcaaagtagacatccatagtgtcttttgaaaaatgaaaaacacattactttgaacagccaagaaaaaaattgcaatttattaagattcaataaagcgttgtactttcga

SEQ ID NO: 370443 - DNA, 577 bp, Homo sapiens
ccagggtgggagggtgcttcgggccaatcttgaagcattggcttccagctgttgaggtcctgggggtactgagatggtacttgtttcctaacaaaacattttttataagtgcattcaccaatagagggcccacctattctggtggagagaattggaaaaggttccagaatccgggcagaagcctggctgttcccggtgagggctctcccttgctagcactccctcccaccctcactctgagcaacacagctgctcatgtccctggagaggacagctttggccaagttgttaaacatctctgagcctgtcttcccatcttggaaatgggggcagttgtcccaatgccgagataattgagtgtgaagccctcccctgtcccatgctgccagggcttcatccctgtgaaggcacagggcctgctagtgggcacaggggtggctagttggggcctggggcagaggagggctgcaccaggcgtcctggggaatgtgctcagtgaagacgacactgggctttgcacagcctggtgtcgctgtacagaaactgtcaagggaataaagtgttctttgttttttaa

SEQ ID NO: 370444 - DNA, 717 bp, Homo sapiens
ccagggtgggagggtgcttcgggccaatcttgaagcattggcttccagctgttgaggtcctgggggtactgagatggtacttgtttcctaacaaaacattttttataagtgcattcaccaatagagggcccacctattctggtggagagaattggaaaaggttccagaatccgggcagaagcctggctgttcccggtgagggctctcccttgctagcactccctcccaccctcactctgagcaacacagctgctcatgtccctggagaggacagctttggccaagttgttaaacatctctgagcctgtcttcccatcttggaaatgggggcagttgtcccaatgccgagataattgagtgtgaagccctcccctgtcccatgctgcctagtaccgaaggcacttgctctgtggccctggctgtaagaatgatcatttctgagtcagacctagggaaccagcccctgagaatgtgacttgacctagtttatccccagcaaacggtgcctcccaggcattctcagtgccagggcttcatccctgtgaaggcacagggcctgctagtgggcacaggggtggctagttggggcctggggcagaggagggctgcaccaggcgtcctggggaatgtgctcagtgaagacgacactgggctttgcacagcctggtgtcgctgtacagaaactgtcaagggaataaagtgttctttgttttttaa

SEQ ID NO: 370445 - DNA, 2330 bp, Homo sapiens
ggcgcgcggcccgaattgagggatgcgggccggaggggatccagcgagtcagctgccgccgagggaccagcgcgggtctagctgctgccgccatccccaccatccctgaccgcgcctgcccgggctccgcgccaggaggagcggccaggcccagccccggcaccgcgcgctcggggaccccgacggcgcccagcccggcgaggggcctcagggggaggacgaggaggaaaggcggcctcgccggggacccggccatggcgctggacttcttggctggatgcgcggggggtgtggcaggcgtgcttgtgggacacccgtttgacacggtcaaggtacggcttcaggtccagagcgtggagaagcctcagtaccgcgggacgttgcactgcttcaagtccatcatcaagcaagagagcgtgctgggcctgtacaagggcctgggctcgccgctcatggggctcaccttcatcaacgcgctggtgttcggggtgcagggcaacaccctccgggccctgggccacgactcgcccctcaaccagttcctggcaggtgcggcggcgggcgccatccagtgcgtcatctgctgccccatggagctggccaagacgcggctgcagctgcaggacgcgggcccagcgcgcacctacaagggctcgctggactgcctcgcgcagatctacgggcacgagggtctgcgtggcgtcaaccggggcatggtgtccacgttgctgcgtgagactcccagcttcggcgtctacttcctcacctatgacgctctcacgcgggcgctgggctgcgagccgggcgaccgcctgctggtgcccaagctgctgttggcgggcggtacgtcaggcatcgtgtcctggctctctacctatcctgtggacgtggtcaagtcgcggctgcaggcggacggactgcggggcgccccgcgctaccgcggcatcctggactgcgtgcaccagagctaccgcgccgagggctggcgcgtcttcacacgggggctggcgtccacgctgctgcgcgccttccccgtcaacgctgccaccttcgccaccgtcacggtggtgctcacctacgcgcgcggcgaggaggccgggcccgagggcgaggctgtgcccgccgcccctgcggggcctgccctggcgcagcctccagcctgtgacgctcacccggcctccttcccagggctccttctcagaaacctgggacataaattggcccctgagtcgattgccctgcttcctgctgggatgctgcgagctgtggagtctatcagacgtgggctgaattttgctgatcagctgggtagttttggccgagaactgcacttgcctcagtgttctcatctatgaaataaggaccctcatgcccacactgtagagtcacgaagctcagagattattcccagcagcagccagcacctggcctggctgaggccattgcaccgttatcctggaaactgaggcagacactccagcccctttctgggatcctggccacgtcattgtgctcctgccctgcaggctggctcccgggggtctctgatggccaaccaaggggccacccagggacctctaactccacacatcctccacccgggggggtggtgggccacccctctggtctgtgttagggacagaggaaaacttggtgtgcctcctggtgtcacagaactggatcctctgcataccccagcttctccacatgccactgctaggggtaccccagctgctgccactcctgctggagggtgaactggggaccctgcaccctccgggaagccatggagtctgctggaggcaccatatcagcctgcgggactagggtggggagcaaacaggccagcggtggaggtctggacagttcaagtgtgatgcagctgtggcaaggagaaatccttccgcctctgggcctcaggctgcctgtccataaaatggggacatggccagctgacggacaactgagtctccggcccacctaccaccgccagccaggatcccccaaagtgtgcagagggctcagcagagaacagtatgggaccccctcaccaggcctggaacacctccagccacaaagaagccaaaggtcagtccctctgctccccagcaaacggtgcctcccaggcattctcagtgccagggcttcatccctgtgaaggcacagggcctgctagtgggcacaggggtggctagttggggcctggggcagaggagggctgcaccaggcgtcctggggaatgtgctcagtgaagacgacactgggctttgcacagcctggtgtcgctgtacagaaactgtcaagggaataaagtgttctttgttttttaa

SEQ ID NO: 370446 - DNA, 2859 bp, Homo sapiens
ggttgttggctgttctcttgccaccactctattaactcataactgctgttctcacgagaggctactggcagagaccaggcaggagctcctggagccaaggtcattgcttttatttttatttatttatttattgagatggaatgttcctttctcgcccaggctggagtgcagtggcatgacctcactgcatcctctgcctcacgggttcaagcaattctcccacctcagcctcctgagtagcagggattacaggcgtatgccaccacactaggctaattttttttacagacacgatttcgccacgttggccaggctggtcttgaactcctgacctcaagtgatccacccacctcagcctcccaaagtgttgggattacaggcgtgagccactgcacctggccaggctcatcactttttgcgcctattgcctcgaagccagtctctgatgggacattagggcaggggcccttcagcctagtctgggacatgggccgctcactcagcagtatgacaagcatcacctggagaacgggccagtctcaggaggtcgttcatgccccactggcagtgcactgtgcagccatagtgtaaacaagaggcttaacctgaactggtctgagatcttggggaccccctaccctgtctccagcagcctgtccctttagctgtttgcctactggcaccccatcctgagaaggcatagatacccggcccaccctgccctggaattacaaaagtcttagactgtgcctgagtgcccggcctccttgggagaccctcctaggcagcctaagcaccagacccgggagctgggtgctctggtcctgcctgcctgcctctcactggaccctctccttccaggtacggcttcaggtccagagcgtggagaagcctcagtaccgcgggacgttgcactgcttcaagtccatcatcaagcaagagagcgtgctgggcctgtacaagggcctgggctcgccgctcatggggctcaccttcatcaacgcgctggtgttcggggtgcagggcaacaccctccgggccctgggccacgactcgcccctcaaccagttcctggcaggtgcggcggcgggcgccatccagtgcgtcatctgctgccccatggagctggccaagacgcggctgcagctgcaggacgcgggcccagcgcgcacctacaagggctcgctggactgcctcgcgcagatctacgggcacgagggtctgcgtggcgtcaaccggggcatggtgtccacgttgctgcgtgagactcccagcttcggcgtctacttcctcacctatgacgctctcacgcgggcgctgggctgcgagccgggcgaccgcctgctggtgcccaagctgctgttggcgggcggtacgtcaggcatcgtgtcctggctctctacctatcctgtggacgtggtcaagtcgcggctgcaggcggacggactgcggggcgccccgcgctaccgcggcatcctggactgcgtgcaccagagctaccgcgccgagggctggcgcgtcttcacacgggggctggcgtccacgctgctgcgcgccttccccgtcaacgctgccaccttcgccaccgtcacggtggtgctcacctacgcgcgcggcgaggaggccgggcccgagggcgaggctgtgcccgccgcccctgcggggcctgccctggcgcagcctccagcctgtgacgctcacccggcctccttcccagggctccttctcagaaacctgggacataaattggcccctgagtcgattgccctgcttcctgctgggatgctgcgagctgtggagtctatcagacgtgggctgaattttgctgatcagctgggtagttttggccgagaactgcacttgcctcagtgttctcatctatgaaataaggaccctcatgcccacactgtagagtcacgaagctcagagattattcccagcagcagccagcacctggcctggctgaggccattgcaccgttatcctggaaactgaggcagacactccagcccctttctgggatcctggccacgtcattgtgctcctgccctgcaggctggctcccgggggtctctgatggccaaccaaggggccacccagggacctctaactccacacatcctccacccgggggggtggtgggccacccctctggtctgtgttagggacagaggaaaacttggtgtgcctcctggtgtcacagaactggatcctctgcataccccagcttctccacatgccactgctaggggtaccccagctgctgccactcctgctggagggtgaactggggaccctgcaccctccgggaagccatggagtctgctggaggcaccatatcagcctgcgggactagggtggggagcaaacaggccagcggtggaggtctggacagttcaagtgtgatgcagctgtggcaaggagaaatccttccgcctctgggcctcaggctgcctgtccataaaatggggacatggccagctgacggacaactgagtctccggcccacctaccaccgccagccaggatcccccaaagtgtgcagagggctcagcagagaacagtatgggaccccctcaccaggcctggaacacctccagccacaaagaagccaaaggtcagtccctctgctccccagcaaacggtgcctcccaggcattctcagtgccagggcttcatccctgtgaaggcacagggcctgctagtgggcacaggggtggctagttggggcctggggcagaggagggctgcaccaggcgtcctggggaatgtgctcagtgaagacgacactgggctttgcacagcctggtgtcgctgtacagaaactgtcaagggaataaagtgttctttgttttttaa

SEQ ID NO: 370447 - DNA, 2396 bp, Homo sapiens
  misc_feature (21)..(21): n is a, c, g, or t
gatagctgttccagaggatcnccagtccgttcgacatgagcagtatgacaagcatcacctggagaacgggccagtctcaggaggtcgttcatgccccactggcagtgcactgtgcagccatagtgtaaacaagaggcttaacctgaactggtctgagatcttggggaccccctaccctgtctccagcagcctgtccctttagctgtttgcctactggcaccccatcctgagaaggcatagatacccggcccaccctgccctggaattacaaaagtcttagactgtgcctgagtgcccggcctccttgggagaccctcctaggcagcctaagcaccagacccgggagctgggtgctctggtcctgcctgcctgcctctcactggaccctctccttccaggtacggcttcaggtccagagcgtggagaagcctcagtaccgcgggacgttgcactgcttcaagtccatcatcaagcaagagagcgtgctgggcctgtacaagggcctgggctcgccgctcatggggctcaccttcatcaacgcgctggtgttcggggtgcagggcaacaccctccgggccctgggccacgactcgcccctcaaccagttcctggcaggtgcggcggcgggcgccatccagtgcgtcatctgctgccccatggagctggccaagacgcggctgcagctgcaggacgcgggcccagcgcgcacctacaagggctcgctggactgcctcgcgcagatctacgggcacgagggtctgcgtggcgtcaaccggggcatggtgtccacgttgctgcgtgagactcccagcttcggcgtctacttcctcacctatgacgctctcacgcgggcgctgggctgcgagccgggcgaccgcctgctggtgcccaagctgctgttggcgggcggtacgtcaggcatcgtgtcctggctctctacctatcctgtggacgtggtcaagtcgcggctgcaggcggacggactgcggggcgccccgcgctaccgcggcatcctggactgcgtgcaccagagctaccgcgccgagggctggcgcgtcttcacacgggggctggcgtccacgctgctgcgcgccttccccgtcaacgctgccaccttcgccaccgtcacggtggtgctcacctacgcgcgcggcgaggaggccgggcccgagggcgaggctgtgcccgccgcccctgcggggcctgccctggcgcagcctccagcctgtgacgctcacccggcctccttcccagggctccttctcagaaacctgggacataaattggcccctgagtcgattgccctgcttcctgctgggatgctgcgagctgtggagtctatcagacgtgggctgaattttgctgatcagctgggtagttttggccgagaactgcacttgcctcagtgttctcatctatgaaataaggaccctcatgcccacactgtagagtcacgaagctcagagattattcccagcagcagccagcacctggcctggctgaggccattgcaccgttatcctggaaactgaggcagacactccagcccctttctgggatcctggccacgtcattgtgctcctgccctgcaggctggctcccgggggtctctgatggccaaccaaggggccacccagggacctctaactccacacatcctccacccgggggggtggtgggccacccctctggtctgtgttagggacagaggaaaacttggtgtgcctcctggtgtcacagaactggatcctctgcataccccagcttctccacatgccactgctaggggtaccccagctgctgccactcctgctggagggtgaactggggaccctgcaccctccgggaagccatggagtctgctggaggcaccatatcagcctgcgggactagggtggggagcaaacaggccagcggtggaggtctggacagttcaagtgtgatgcagctgtggcaaggagaaatccttccgcctctgggcctcaggctgcctgtccataaaatggggacatggccagctgacggacaactgagtctccggcccacctaccaccgccagccaggatcccccaaagtgtgcagagggctcagcagagaacagtatgggaccccctcaccaggcctggaacacctccagccacaaagaagccaaaggtcagtccctctgctccccagcaaacggtgcctcccaggcattctcagtgccagggcttcatccctgtgaaggcacagggcctgctagtgggcacaggggtggctagttggggcctggggcagaggagggctgcaccaggcgtcctggggaatgtgctcagtgaagacgacactgggctttgcacagcctggtgtcgctgtacagaaactgtcaagggaataaagtgttctttgttttttaa

SEQ ID NO: 370448 - DNA, 2698 bp, Homo sapiens
ggcgcgcggcccgaattgagggatgcgggccggaggggatccagcgagtcagctgccgccgagggaccagcgcgggtctagctgctgccgccatccccaccatccctgaccgcgcctgcccgggctccgcgccaggaggagcggccaggcccagccccggcaccgcgcgctcggggaccccgacggcgcccagcccggcgaggggcctcagggggaggacgaggaggaaaggcggcctcgccggggacccggccatggcgctggacttcttggctggatgcgcggggggtgtggcaggcgtgcttgtgggacacccgtttgacacggtcaaggcccttgggactgaaagaatccaagatctggatctcctctatagcgcccagaaccacagccaccgtcctgaagcacacggccttcacacgtttctacacgaagggagttttctgtcctgcttccttggacacagcaataatcagggagcagttgtcttgacctatgatgagggggtgaccggccatccctgggcatgggatggggagtgtgggtgggggctggctgtgggggctccgcgcctggatgtgatgttgaaattttgtgttgctttaaccgcctttactttctgagctaggggctgtctccatccatagcaaaagtgtaactttgttgtagatgggcgtaagcctcaccctggagagcgctagtacggcttcaggtccagagcgtggagaagcctcagtaccgcgggacgttgcactgcttcaagtccatcatcaagcaagagagcgtgctgggcctgtacaagggcctgggctcgccgctcatggggctcaccttcatcaacgcgctggtgttcggggtgcagggcaacaccctccgggccctgggccacgactcgcccctcaaccagttcctggcaggtgcggcggcgggcgccatccagtgcgtcatctgctgccccatggagctggccaagacgcggctgcagctgcaggacgcgggcccagcgcgcacctacaagggctcgctggactgcctcgcgcagatctacgggcacgagggtctgcgtggcgtcaaccggggcatggtgtccacgttgctgcgtgagactcccagcttcggcgtctacttcctcacctatgacgctctcacgcgggcgctgggctgcgagccgggcgaccgcctgctggtgcccaagctgctgttggcgggcggtacgtcaggcatcgtgtcctggctctctacctatcctgtggacgtggtcaagtcgcggctgcaggcggacggactgcggggcgccccgcgctaccgcggcatcctggactgcgtgcaccagagctaccgcgccgagggctggcgcgtcttcacacgggggctggcgtccacgctgctgcgcgccttccccgtcaacgctgccaccttcgccaccgtcacggtggtgctcacctacgcgcgcggcgaggaggccgggcccgagggcgaggctgtgcccgccgcccctgcggggcctgccctggcgcagcctccagcctgtgacgctcacccggcctccttcccagggctccttctcagaaacctgggacataaattggcccctgagtcgattgccctgcttcctgctgggatgctgcgagctgtggagtctatcagacgtgggctgaattttgctgatcagctgggtagttttggccgagaactgcacttgcctcagtgttctcatctatgaaataaggaccctcatgcccacactgtagagtcacgaagctcagagattattcccagcagcagccagcacctggcctggctgaggccattgcaccgttatcctggaaactgaggcagacactccagcccctttctgggatcctggccacgtcattgtgctcctgccctgcaggctggctcccgggggtctctgatggccaaccaaggggccacccagggacctctaactccacacatcctccacccgggggggtggtgggccacccctctggtctgtgttagggacagaggaaaacttggtgtgcctcctggtgtcacagaactggatcctctgcataccccagcttctccacatgccactgctaggggtaccccagctgctgccactcctgctggagggtgaactggggaccctgcaccctccgggaagccatggagtctgctggaggcaccatatcagcctgcgggactagggtggggagcaaacaggccagcggtggaggtctggacagttcaagtgtgatgcagctgtggcaaggagaaatccttccgcctctgggcctcaggctgcctgtccataaaatggggacatggccagctgacggacaactgagtctccggcccacctaccaccgccagccaggatcccccaaagtgtgcagagggctcagcagagaacagtatgggaccccctcaccaggcctggaacacctccagccacaaagaagccaaaggtcagtccctctgctccccagcaaacggtgcctcccaggcattctcagtgccagggcttcatccctgtgaaggcacagggcctgctagtgggcacaggggtggctagttggggcctggggcagaggagggctgcaccaggcgtcctggggaatgtgctcagtgaagacgacactgggctttgcacagcctggtgtcgctgtacagaaactgtcaagggaataaagtgttctttgttttttaa

SEQ ID NO: 370449 - DNA, 2462 bp, Homo sapiens
cggagtgactctacaggatcttatgtcatcccccttcgtgtgtgttctgaaagtagcccagcggggcccttcctcgctctttttccttggcccagggcaagctgtgagtggcaggcaccagaccagccttgtgcttgctggcagcgctacacgtggccgctcttcccactgagcaaaggcacagctgacggcaaggcaggatgcgcaccctgagctgggtttgcgggagacttccggtctccttttctggtgagcctaggcccttgggactgaaagaatccaagatctggatctcctctatagcgcccagaaccacagccaccgtcctgaagcacacggccttcacacgtttctacacgaagggagttttctgtcctgcttccttggacacagcaataatcagggagcagttgtcttgacctatgatgaggggatgggcgtaagcctcaccctggagagcgctagtacggcttcaggtccagagcgtggagaagcctcagtaccgcgggacgttgcactgcttcaagtccatcatcaagcaagagagcgtgctgggcctgtacaagggcctgggctcgccgctcatggggctcaccttcatcaacgcgctggtgttcggggtgcagggcaacaccctccgggccctgggccacgactcgcccctcaaccagttcctggcaggtgcggcggcgggcgccatccagtgcgtcatctgctgccccatggagctggccaagacgcggctgcagctgcaggacgcgggcccagcgcgcacctacaagggctcgctggactgcctcgcgcagatctacgggcacgagggtctgcgtggcgtcaaccggggcatggtgtccacgttgctgcgtgagactcccagcttcggcgtctacttcctcacctatgacgctctcacgcgggcgctgggctgcgagccgggcgaccgcctgctggtgcccaagctgctgttggcgggcggtacgtcaggcatcgtgtcctggctctctacctatcctgtggacgtggtcaagtcgcggctgcaggcggacggactgcggggcgccccgcgctaccgcggcatcctggactgcgtgcaccagagctaccgcgccgagggctggcgcgtcttcacacgggggctggcgtccacgctgctgcgcgccttccccgtcaacgctgccaccttcgccaccgtcacggtggtgctcacctacgcgcgcggcgaggaggccgggcccgagggcgaggctgtgcccgccgcccctgcggggcctgccctggcgcagcctccagcctgtgacgctcacccggcctccttcccagggctccttctcagaaacctgggacataaattggcccctgagtcgattgccctgcttcctgctgggatgctgcgagctgtggagtctatcagacgtgggctgaattttgctgatcagctgggtagttttggccgagaactgcacttgcctcagtgttctcatctatgaaataaggaccctcatgcccacactgtagagtcacgaagctcagagattattcccagcagcagccagcacctggcctggctgaggccattgcaccgttatcctggaaactgaggcagacactccagcccctttctgggatcctggccacgtcattgtgctcctgccctgcaggctggctcccgggggtctctgatggccaaccaaggggccacccagggacctctaactccacacatcctccacccgggggggtggtgggccacccctctggtctgtgttagggacagaggaaaacttggtgtgcctcctggtgtcacagaactggatcctctgcataccccagcttctccacatgccactgctaggggtaccccagctgctgccactcctgctggagggtgaactggggaccctgcaccctccgggaagccatggagtctgctggaggcaccatatcagcctgcgggactagggtggggagcaaacaggccagcggtggaggtctggacagttcaagtgtgatgcagctgtggcaaggagaaatccttccgcctctgggcctcaggctgcctgtccataaaatggggacatggccagctgacggacaactgagtctccggcccacctaccaccgccagccaggatcccccaaagtgtgcagagggctcagcagagaacagtatgggaccccctcaccaggcctggaacacctccagccacaaagaagccaaaggtcagtccctctgctccccagcaaacggtgcctcccaggcattctcagtgccagggcttcatccctgtgaaggcacagggcctgctagtgggcacaggggtggctagttggggcctggggcagaggagggctgcaccaggcgtcctggggaatgtgctcagtgaagacgacactgggctttgcacagcctggtgtcgctgtacagaaactgtcaagggaataaagtgttctttgttttttaa

SEQ ID NO: 370450 - DNA, 2391 bp, Homo sapiens
cggagtgactctacaggatcttatgtcatcccccttcgtgtgtgttctgaaagtagcccagcggggcccttcctcgctctttttccttggcccagggcaagctgtgagtggcaggcaccagaccagccttgtgcttgctggcagcgctacacgtggccgctcttcccactgagcaaaggcacagctgacggcaaggcaggatgcgcaccctgagctgggtttgcgggagacttccggtctccttttctggtgagcctaggcccttgggactgaaagaatccaagatctggatctcctctatagcgcccagaaccacagccaccgtcctgaagcacacggccttcacacgtttctacacgaagatgggcgtaagcctcaccctggagagcgctagtacggcttcaggtccagagcgtggagaagcctcagtaccgcgggacgttgcactgcttcaagtccatcatcaagcaagagagcgtgctgggcctgtacaagggcctgggctcgccgctcatggggctcaccttcatcaacgcgctggtgttcggggtgcagggcaacaccctccgggccctgggccacgactcgcccctcaaccagttcctggcaggtgcggcggcgggcgccatccagtgcgtcatctgctgccccatggagctggccaagacgcggctgcagctgcaggacgcgggcccagcgcgcacctacaagggctcgctggactgcctcgcgcagatctacgggcacgagggtctgcgtggcgtcaaccggggcatggtgtccacgttgctgcgtgagactcccagcttcggcgtctacttcctcacctatgacgctctcacgcgggcgctgggctgcgagccgggcgaccgcctgctggtgcccaagctgctgttggcgggcggtacgtcaggcatcgtgtcctggctctctacctatcctgtggacgtggtcaagtcgcggctgcaggcggacggactgcggggcgccccgcgctaccgcggcatcctggactgcgtgcaccagagctaccgcgccgagggctggcgcgtcttcacacgggggctggcgtccacgctgctgcgcgccttccccgtcaacgctgccaccttcgccaccgtcacggtggtgctcacctacgcgcgcggcgaggaggccgggcccgagggcgaggctgtgcccgccgcccctgcggggcctgccctggcgcagcctccagcctgtgacgctcacccggcctccttcccagggctccttctcagaaacctgggacataaattggcccctgagtcgattgccctgcttcctgctgggatgctgcgagctgtggagtctatcagacgtgggctgaattttgctgatcagctgggtagttttggccgagaactgcacttgcctcagtgttctcatctatgaaataaggaccctcatgcccacactgtagagtcacgaagctcagagattattcccagcagcagccagcacctggcctggctgaggccattgcaccgttatcctggaaactgaggcagacactccagcccctttctgggatcctggccacgtcattgtgctcctgccctgcaggctggctcccgggggtctctgatggccaaccaaggggccacccagggacctctaactccacacatcctccacccgggggggtggtgggccacccctctggtctgtgttagggacagaggaaaacttggtgtgcctcctggtgtcacagaactggatcctctgcataccccagcttctccacatgccactgctaggggtaccccagctgctgccactcctgctggagggtgaactggggaccctgcaccctccgggaagccatggagtctgctggaggcaccatatcagcctgcgggactagggtggggagcaaacaggccagcggtggaggtctggacagttcaagtgtgatgcagctgtggcaaggagaaatccttccgcctctgggcctcaggctgcctgtccataaaatggggacatggccagctgacggacaactgagtctccggcccacctaccaccgccagccaggatcccccaaagtgtgcagagggctcagcagagaacagtatgggaccccctcaccaggcctggaacacctccagccacaaagaagccaaaggtcagtccctctgctccccagcaaacggtgcctcccaggcattctcagtgccagggcttcatccctgtgaaggcacagggcctgctagtgggcacaggggtggctagttggggcctggggcagaggagggctgcaccaggcgtcctggggaatgtgctcagtgaagacgacactgggctttgcacagcctggtgtcgctgtacagaaactgtcaagggaataaagtgttctttgttttttaa

SEQ ID NO: 370451 - DNA, 1925 bp, Homo sapiens
ggcgcgcggcccgaattgagggatgcgggccggaggggatccagcgagtcagctgccgccgagggaccagcgcgggtctagctgctgccgccatccccaccatccctgaccgcgcctgcccgggctccgcgccaggaggagcggccaggcccagccccggcaccgcgcgctcggggaccccgacggcgcccagcccggcgaggggcctcagggggaggacgaggaggaaaggcggcctcgccggggacccggccatggcgctggacttcttggctggatgcgcggggggtgtggcaggcgtgcttgtgggacacccgtttgacacggtcaaggtacggcttcaggtccagagcgtggagaagcctcagtaccgcgggacgttgcactgcttcaagtccatcatcaagcaagagagcgtgctgggcctgtacaagggcctgggctcgccgctcatggggctcaccttcatcaacgcgctggtgttcggggtgcagggcaacaccctccgggccctgggccacgactcgcccctcaaccagttcctggcaggtgcggcggcgggcgccatccagtgcgtcatctgctgccccatggagctggccaagacgcggctgcagctgcaggacgcgggcccagcgcgcacctacaagggctcgctggactgcctcgcgcagatctacgggcacgagggtctgcgtggcgtcaaccggggcatggtgtccacgttgctgcgtgagactcccagcttcggcgtctacttcctcacctatgacgctctcacgcgggcgctgggctgcgagccgggcgaccgcctgctggtgcccaagctgctgttggcgggcggtacgtcaggcatcgtgtcctggctctctacctatcctgtggacgtggtcaagtcgcggctgcaggcggacggactgcggggcgccccgcgctaccgcggcatcctggactgcgtgcaccagagctaccgcgccgagggctggcgcgtcttcacacgggggctggcgtccacgctgctgcgcgccttccccgtcaacgctgccaccttcgccaccgtcacggtggtgctcacctacgcgcgcggcgaggaggccgggcccgagggcgaggctgtgcccgccgcccctgcggggcctgccctggcgcagcctccagcctgtgacgctcacccggcctccttcccagggctccttctcagaaacctgggacataaattggcccctgagtcgattgccctgcttcctgctgggatgctgcgagctgtggagtctatcagacgtgggctgaattttgctgatcagctgggtagttttggccgagaactgcacttgcctcagtgttctcatctatgaaataaggaccctcatgcccacactgtagagtcacgaagctcagagattattcccagcagcagccagcacctggcctggctgaggccattgcaccgttatcctggaaactgaggcagacactccagcccctttctgggatcctggccacgtcattgtgctcctgccctgtccataaaatggggacatggccagctgacggacaactgagtctccggcccacctaccaccgccagccaggatcccccaaagtgtgcagagggctcagcagagaacagtatgggaccccctcaccaggcctggaacacctccagccacaaagaagccaaaggtcagtccctctgctccccagcaaacggtgcctcccaggcattctcagtgccagggcttcatccctgtgaaggcacagggcctgctagtgggcacaggggtggctagttggggcctggggcagaggagggctgcaccaggcgtcctggggaatgtgctcagtgaagacgacactgggctttgcacagcctggtgtcgctgtacagaaactgtcaagggaataaagtgttctttgttttttaa

SEQ ID NO: 370452 - DNA, 2297 bp, Homo sapiens
ggcgcgcggcccgaattgagggatgcgggccggaggggatccagcgagtcagctgccgccgagggaccagcgcgggtctagctgctgccgccatccccaccatccctgaccgcgcctgcccgggctccgcgccaggaggagcggccaggcccagccccggcaccgcgcgctcggggaccccgacggcgcccagcccggcgaggggcctcagggggaggacgaggaggaaaggcggcctcgccggggacccggccatggcgctggacttcttggctggatgcgcggggggtgtggcaggcgtgcttgtgggacacccgtttgacacggtcaaggtacggcttcaggtccagagcgtggagaagcctcagtaccgcgggacgttgcactgcttcaagtccatcatcaagcaagagagcgtgctgggcctgtacaagggcctgggctcgccgctcatggggctcaccttcatcaacgcgctggtgttcggggtgcagggcaacaccctccgggccctgggccacgactcgcccctcaaccagttcctggcaggtgcggcggcgggcgccatccagtgcgtcatctgctgccccatggagctggccaagacgcggctgcagctgcaggacgcgggcccagcgcgcacctacaagggctcgctggactgcctcgcgcagatctacgggcacgagggtctgcgtggcgtcaaccggggcatggtgtccacgttgctgcgtgagactcccagcttcggcgtctacttcctcacctatgacgctctcacgcgggcgctgggctgcgagccgggcgaccgcctgctggtgcccaagctgctgttggcgggcggtacgtcaggcatcgtgtcctggctctctacctatcctgtggacgtggtcaagtcgcggctgcaggcggacggactgcggggcgccccgcgctaccgcggcatcctggactgcgtgcaccagagctaccgcgccgagggctggcgcgtcttcacacgggggctggcgtccacgctgctgcgcgccttccccgtcaacgctgccaccttcgccaccgtcacggtggtgctcacctacgcgcgcggcgaggaggccgggcccgagggcgaggctgtgcccgccgcccctgcggggcctgccctggcgcagcctccagcctgtgacgctcacccggcctccttcccagggctccttctcagaaacctgggacataaattggcccctgagtcgattgccctgcttcctgctgggatgctgcgagctgtggagtctatcagacgtgggctgaattttgctgatcagctgggtagttttggccgagaactgcacttgcctcagtgttctcatctatgaaataaggaccctcatgcccacactgtagagtcacgaagctcagagattattcccagcagcagccagcacctggcctggctgaggccattgcaccgttatcctggaaactgaggcagacactccagcccctttctgggatcctggccacgtcattgtgctcctgccctgcaggctggctcccgggggtctctgatggccaaccaaggggccacccagggacctctaactccacacatcctccacccgggggggtggtgggccacccctctggtctgtgttagggacagaggaaaacttggtgtgcctcctggtgtcacagaactggatcctctgcataccccagcttctccacatgccactgctaggggtaccccagctgctgccactcctgctggagggtgaactggggaccctgcaccctccgggaagccatggagtctgctggaggcaccatatcagcctgcgggactagggtggggagcaaacaggccagcggtggaggtctggacagttcaagtgtgatgcagctgtggcaaggagaaatccttccgcctctgggcctcaggctgcctgtccataaaatggggacatggccagctgacggacaactgagtctccggcccacctaccaccgccagccaggatcccccaaagtgtgcagagggctcagcagagaacagtatgggaccccctcaccaggcctggaacacctccagccacaaagaagccaaaggtcagtccctctgctccccagcaaacggtgcctcccaggcattctcagtgccagggcttcatccctgtgaaggcacagggcctggggcagaggagggctgcaccaggcgtcctggggaatgtgctcagtgaagacgacactgggctttgcacagcctggtgtcgctgtacagaaactgtcaagggaataaagtgttctttgttttttaa

SEQ ID NO: 370453 - DNA, 2712 bp, Homo sapiens
gtatcagccagtgcatcaggacctggggtcgtcactcccaaggggccattaccctgttcagtctccgtggccactctgggggagggaggtaaacctttacaggtaaggcccagagtgaggcccagagacagagtcatttgtgagcacgccaggctgatgagcggcagggggaaaattcaaatctggggagggtctgaccccaaagtccaacatctctggagcctcctgcccatgtcaggtgtttggattaatgggatatcccagaaatagtgtgtgcagcctcccagggacaacttctgctgtcagccacccagaccagtcagccgcggagagcagcagcctgcagatgggacaccagtgctgagtgggacaggtgctggcttggccttgggatgtcacatgcataccctcccagtggacgtgaggattccaggggctcatgggatctgcctgctgcacccacaggtgtggcaggcgtgcttgtgggacacccgtttgacacggtcaaggcccttgggactgaaagaatccaagatctggatctcctctatagcgcccagaaccacagccaccgtcctgaagcacacggccttcacacgtttctacacgaagggagttttctgtcctgcttccttggacacagcaataatcagggagcagttgtcttgacctatgatgaggggatgggcgtaagcctcaccctggagagcgctagtacggcttcaggtccagagcgtggagaagcctcagtaccgcgggacgttgcactgcttcaagtccatcatcaagcaagagagcgtgctgggcctgtacaagggcctgggctcgccgctcatggggctcaccttcatcaacgcgctggtgttcggggtgcagggcaacaccctccgggccctgggccacgactcgcccctcaaccagttcctggcaggtgcggcggcgggcgccatccagtgcgtcatctgctgccccatggagctggccaagacgcggctgcagctgcaggacgcgggcccagcgcgcacctacaagggctcgctggactgcctcgcgcagatctacgggcacgagggtctgcgtggcgtcaaccggggcatggtgtccacgttgctgcgtgagactcccagcttcggcgtctacttcctcacctatgacgctctcacgcgggcgctgggctgcgagccgggcgaccgcctgctggtgcccaagctgctgttggcgggcggtacgtcaggcatcgtgtcctggctctctacctatcctgtggacgtggtcaagtcgcggctgcaggcggacggactgcggggcgccccgcgctaccgcggcatcctggactgcgtgcaccagagctaccgcgccgagggctggcgcgtcttcacacgggggctggcgtccacgctgctgcgcgccttccccgtcaacgctgccaccttcgccaccgtcacggtggtgctcacctacgcgcgcggcgaggaggccgggcccgagggcgaggctgtgcccgccgcccctgcggggcctgccctggcgcagcctccagcctgtgacgctcacccggcctccttcccagggctccttctcagaaacctgggacataaattggcccctgagtcgattgccctgcttcctgctgggatgctgcgagctgtggagtctatcagacgtgggctgaattttgctgatcagctgggtagttttggccgagaactgcacttgcctcagtgttctcatctatgaaataaggaccctcatgcccacactgtagagtcacgaagctcagagattattcccagcagcagccagcacctggcctggctgaggccattgcaccgttatcctggaaactgaggcagacactccagcccctttctgggatcctggccacgtcattgtgctcctgccctgcaggctggctcccgggggtctctgatggccaaccaaggggccacccagggacctctaactccacacatcctccacccgggggggtggtgggccacccctctggtctgtgttagggacagaggaaaacttggtgtgcctcctggtgtcacagaactggatcctctgcataccccagcttctccacatgccactgctaggggtaccccagctgctgccactcctgctggagggtgaactggggaccctgcaccctccgggaagccatggagtctgctggaggcaccatatcagcctgcgggactagggtggggagcaaacaggccagcggtggaggtctggacagttcaagtgtgatgcagctgtggcaaggagaaatccttccgcctctgggcctcaggctgcctgtccataaaatggggacatggccagctgacggacaactgagtctccggcccacctaccaccgccagccaggatcccccaaagtgtgcagagggctcagcagagaacagtatgggaccccctcaccaggcctggaacacctccagccacaaagaagccaaaggtcagtccctctgctccccagcaaacggtgcctcccaggcattctcagtgccagggcttcatccctgtgaaggcacagggcctgctagtgggcacaggggtggctagttggggcctggggcagaggagggctgcaccaggcgtcctggggaatgtgctcagtgaagacgacactgggctttgcacagcctggtgtcgctgtacagaaactgtcaagggaataaagtgttctttgttttttaa

SEQ ID NO: 370454 - DNA, 2322 bp, Homo sapiens
  misc_feature (2223)..(2223): n is a, c, g, or t
ggcgcgcggcccgaattgagggatgcgggccggaggggatccagcgagtcagctgccgccgagggaccagcgcgggtctagctgctgccgccatccccaccatccctgaccgcgcctgcccgggctccgcgccaggaggagcggccaggcccagccccggcaccgcgcgctcggggaccccgacggcgcccagcccggcgaggggcctcagggggaggacgaggaggaaaggcggcctcgccggggacccggccatggcgctggacttcttggctggatgcgcggggggtgtggcaggcgtgcttgtgggacacccgtttgacacggtcaaggtacggcttcaggtccagagcgtggagaagcctcagtaccgcgggacgttgcactgcttcaagtccatcatcaagcaagagagcgtgctgggcctgtacaagggcctgggctcgccgctcatggggctcaccttcatcaacgcgctggtgttcggggtgcagggcaacaccctccgggccctgggccacgactcgcccctcaaccagttcctggcaggtgcggcggcgggcgccatccagtgcgtcatctgctgccccatggagctggccaagacgcggctgcagctgcaggacgcgggcccagcgcgcacctacaagggctcgctggactgcctcgcgcagatctacgggcacgagggtctgcgtggcgtcaaccggggcatggtgtccacgttgctgcgtgagactcccagcttcggcgtctacttcctcacctatgacgctctcacgcgggcgctgggctgcgagccgggcgaccgcctgctggtgcccaagctgctgttggcgggcggtacgtcaggcatcgtgtcctggctctctacctatcctgtggacgtggtcaagtcgcggctgcaggcggacggactgcggggcgccccgcgctaccgcggcatcctggactgcgtgcaccagagctaccgcgccgagggctggcgcgtcttcacacgggggctggcgtccacgctgctgcgcgccttccccgtcaacgctgccaccttcgccaccgtcacggtggtgctcacctacgcgcgcggcgaggaggccgggcccgagggcgaggctgtgcccgccgcccctgcggggcctgccctggcgcagcctccagcctgtgacgctcacccggcctccttcccagggctccttctcagaaacctgggacataaattggcccctgagtcgattgccctgcttcctgctgggatgctgcgagctgtggagtctatcagacgtgggctgaattttgctgatcagctgggtagttttggccgagaactgcacttgcctcagtgttctcatctatgaaataaggaccctcatgcccacactgtagagtcacgaagctcagagattattcccagcagcagccagcacctggcctggctgaggccattgcaccgttatcctggaaactgaggcagacactccagcccctttctgggatcctggccacgtcattgtgctcctgccctgcaggctggctcccgggggtctctgatggccaaccaaggggccacccagggacctctaactccacacatcctccacccgggggggtggtgggccacccctctggtctgtgttagggacagaggaaaacttggtgtgcctcctggtgtcacagaactggatcctctgcataccccagcttctccacatgccactgctaggggtaccccagctgctgccactcctgctggagggtgaactggggaccctgcaccctccgggaagccatggagtctgctggaggcaccatatcagcctgcgggactagggtggggagcaaacaggccagcggtggaggtctggacagttcaagtgtgatgcagctgtggcaaggagaaatccttccgcctctgggcctcaggctgcctgtccataaaatggggacatggccagctgacggacaactgagtctccggcccacctaccaccgccagccaggatcccccaaagtgtgcagagggctcagcagagaacagtatgggaccccctcaccaggcctggaacacctccagccacaaagaagccaaaggtcagtccctctgctccccagcaaacggtgcctcccaggcattctcagtgccagggaccgtcatctcactgttgatcagtatcaagggcactcgctaagttggtgcatcacggggctgagatatgattgagcgcnattgcgagacagatgtgatgggtcatgatacacaggcgttctataggggaactgtgtctcagtgttagtaaaacatcggagctttgacacagcacactg

SEQ ID NO: 370455 - DNA, 1520 bp, Homo sapiens
ggcgcgcggcccgaattgagggatgcgggccggaggggatccagcgagtcagctgccgccgagggaccagcgcgggtctagctgctgccgccatccccaccatccctgaccgcgcctgcccgggctccgcgccaggaggagcggccaggcccagccccggcaccgcgcgctcggggaccccgacggcgcccagcccggcgaggggcctcagggggaggacgaggaggaaaggcggcctcgccggggacccggccatggcgctggacttcttggctggatgcgcggggggtgtggcaggcgtgcttgtgggacacccgtttgacacggtcaaggtacggcttcaggtccagagcgtggagaagcctcagtaccgcgggacgttgcactgcttcaagtccatcatcaagcaagagagcgtgctgggcctgtacaagggcctgggctcgccgctcatggggctcaccttcatcaacgcgctggtgttcggggtgcagggcaacaccctccgggccctgggccacgactcgcccctcaaccagttcctggcaggtgcggcggcgggcgccatccagtgcgtcatctgctgccccatggagctggccaagacgcggctgcagctgcaggacgcgggcccagcgcgcacctacaagggctcgctggactgcctcgcgcagatctacgggcacgagggtctgcgtggcgtcaaccggggcatggtgtccacgttgctgcgtgagactcccagcttcggcgtctacttcctcacctatgacgctctcacgcgggcgctgggctgcgagccgggcgaccgcctgctggtgcccaagctgctgttggcgggcggtacgtcaggcatcgtgtcctggctctctacctatcctgtggacgtggtcaagtcgcggctgcaggcggacggactgcggggcgccccgcgctaccgcggcatcctggactgcgtgcaccagagctaccgcgccgagggctggcgcgtcttcacacgggggctggcgtccacgctgctgcgcgccttccccgtcaacgctgccaccttcgccaccgtcacggtggtgctcacctacgcgcgcggcgaggaggccgggcccgagggcgaggctgtgcccgccgcccctgcggggcctgccctggcgcagcctccagcctgtgacgctcacccggcctccttcccagggctccttctcagaaacctgggacataaattggcccctgagtcgattgccctgcttcctgctgggatgctgcgagctgtggagtctatcagacgtgggctgaattttgctgatcagctgggtagttttggccgagaactgcacttgcctcagtgttctcatctatgaaataaggaccctcatgcccacactgtagagtcacgaagctcagagattattcccagcagcagccagcacctggcctggctgaggccattgcaccgttatcctggaaactgaggcagaccacaggacgggttgatccggccgcgaatttagtagtagtagtagacc

SEQ ID NO: 370456 - DNA, 329 bp, Homo sapiens
ttctcccatctttaaaactccagtttaacttccttgaagatcactgtgagctccacttccctcagtagcttctgctttccctaactcccattccacttctctttggtaccacatggaaggcttatagttatttatgcatctttagttacttaattatgttcatcctaagtatacagtaagcccccttggaaggagcaactatgtgttatacttctcttgaattcagtgaatatatgtttaaaaggggttttaagaaattgttattaaaactgctcaatgattagtgcattattttagcatttgcaaaaataggggattcttttgaccca

SEQ ID NO: 370457 - DNA, 1082 bp, Homo sapiens
cttagctatgagctcacatttgccaatgtagtgttccagacagttttatcatccacattgctgacctggaagatgcatcattgtctatgatatctgcaatggaaatgatcactaggcaatttcagccttgcaaatctaactgtggcgtgtggaaagaagaggaaccagaaaagaatgtttgtgaagttctggcttgaatctcgtgccgggagtgtgaagaaggtccttgcttccccttcaccttctgccatgattctaagtttcctgacgcctcccagccgtgcttcctgttaagcctgtgaaactcctttggaatgagtacacatccaggagtgaagaagacaagctcaactgccattctctgagcagttcaaggcatactgagttgcgggagttgtgtggtggtccactctgactgcaagcacccctttcttgaaccgaacagagtcaagtggaatcaaaggacattacctgttgattcttgggcaaggcccagaatttggtggacatacttaaagaagaaaggaatcttcagctaaagtgtctacgatcaattcagatttggagggcatggatcttctgacagtaggggccattctaggattttttggttgaagagatgaacttcaacttggttccagatgggtggtccagctattctgctgacaacatttttcagggcaaggcttttgctactggaatgatttaaggaagatccctcagtgtttcagagtaaagatatttctaaagaagtacctgtgtcattgcccatcttgaagattgacttttatggattgctcaaatactgatatcagctcaatgtcaatatatactcctacatataaaatccatcttctaatcataatcactaggtaagatgctagtgcaagttgaagttcttaaaggagatgacctgaacagccttcttagtgtaccagggagaccagattgagtttaaactatgtttaccctgcactcagacacgcctaggtgtgtctgggagattagtagatggtgttcaacaaggatctatttaaacaagggagacattaatttggattcctttggttgtaaatttccaa

SEQ ID NO: 370458 - DNA, 677 bp, Homo sapiens
cttagctatgagctcacatttgccaatgtagtgttccagacagttttatcatccacattgctgacctggaagatgcatcattgtctatgatatctgcaatggaaatgatcactaggcaatttcagccttgcaaatctaactatgaacagtgacggacaggctgagagcggagagactttcccttggacccttgcctcagtaacttttaatacatgtaagacggatcatctgactttggactttctgaagcaataacatcggaaagttaatcagagttggcgttctgggaattcaagggcagagataagtgtttcctccagatacttcactgtatttcagcaaatgacctgaggaaagaagtcaaaacttcatcacgaaatagaagactgttcattttcaatatttcttccttggcctctatgtggcactcccttgctgtctgtcctgttgacttctatggcttccacccaagggaggacagcattatagtgggtgaatccagcacaccccaaactgcccctgctcccctctcccccgggcatgtgggccctcgaaggcaggcttctccaaaccagcagcatgtgaaccctgccagaagtgaggaagagctctaggagagcagccagcagcatctgttttgcatacaaagggcagcaacaatcaaatctcttctagaa

SEQ ID NO: 370459 - DNA, 606 bp, Homo sapiens
acgcctcccagccgtgcttcctgttaagcctgtgaaactgtgagtcaatcaaacccttttcttcataaattacccagtttcaggtagctctttatagcagtgtgaaaatggactaatacagaaaattggtaccagagaggtggggcattcctataaagatacctgaagatgtagaagcaattttggaatttgggtaatgggcagaggttacaacaatttggagggctcagaagataggaagatgaggggaagtttggaacttcctagagacttgttcaatggttttgaccaaaatactgatagtgatgaatagtgaagtccaggctgaggtggtctcagatggaaatgaggaacttactgggaattggagcaaaggtcactcttgctatgctttagcaaagagactggtggcatggtgcccctgctctagggatctgtggaaagaaatttctaggcagtaaagtgttcaagatgtgatctggctgcttctaacagtgtatagtcatatgtattcataaagagatgttctgaaattggaacttacattaaaaagggaagctgaatataaaagtttggaaactttgcagcctgaccatgtggtacaaa

SEQ ID NO: 370460 - DNA, 1415 bp, Homo sapiens
agcccggaagcggacgggggcggtggcggaggagcctcgggtgggccggggttgctgcgccgtcctccactactggctactggcgctgcagccatgcagcccccgcccccgggcccgctgggcgactgcctgcgggactgggaggatctacagcaggacttccagaacatccaggagacccatcggctctaccgcctgaagctggaggagctgaccaaacttcagaacaattgcaccagctccatcacgcggcagaagaagcggctccaggagctggccctcgccctgaagaaatgcaaaccctccctcccagcagaggccgagggggccgcacaggagctggagaaccagatgaaagagcgccaaggcctcttctttgacatggaggcctatttgcctaagaagaatggattgtacctgagcctggttctggggaacgtcaacgtcacgctcctgagcaagcaggctaagtttgcctacaaggacgagtatgagaagttcaagctctacctcaccatcatcctcatcctcatctccttcacttgccgcttcctgctcaactccagggtgacagatgctgccttcaacttcctgctggtctggtactactgcaccctgaccatccgggagagcatcctcatcaacaacggctcccggtgggcagggcgggccctgagggaggggagcatggaatggggtgccaggaccctccgggaagcaggaacaggcgctgggggtgatggtggctctctgctccaggatcaaaggctggtgggtgttccatcactacgtgtccaccttcctgtcgggagtcatgctgacgtggcccgacggtctcatgtaccagaaattccggaaccaattcctctccttttccatgtaccagagcttcgtgcagtttctccagtactactaccagagcggctgcctctaccgcctgcgggcgctgggcgagcggcacaccatggacctcactgtggagggcttccagtcctggatgtggcggggcctcaccttcctgctgccttttcttttctttggacacttctggcagctttttaacgcgctgacgttgttcaacctggcccaggaccctcagtgcaaggagtggcaggtgcttatgtgcggctttcccttcctcctccttttcctcggcaatttcttcaccaccctgagggttgtgcaccacaagtttcacagtcagcggcacgggagcaagaaggattgaggctgggccttcccctgccggcccagaggggcttctgtcctgtgtgttgtgggaggggatgggaggcgcccctcgagtgtgcgtgtatcagggggtctcttctattctcccttgggttttatgggcgctgtgggccctgaaggaagacctgggcccagtgccctcaataaagagaggcccagagggg

SEQ ID NO: 370461 - DNA, 1461 bp, Homo sapiens
ctagaatgggatcacacccttgcctcatccccagcgcttcctgccatccaccccttgaaacagattttctttccctgctccccactcatttctgcctggctgtgttcaccaaggagagattctcaccccctcccccatctccctatccacgtttctagaaattcctaaggtcttaaaagttttccttttttttaccccctttccttttttttggaggcacggtcttgctgtgtctctcaggctggagtgcagtggcgcaatcatggctcactgcagcctcaacttccctgggctcaagcgatcctcccacctcaacctcctgagagacccatcggctctaccgcctgaagctggaggagctgaccaaacttcagaacaattgcaccagctccatcacgcggcagaagaagcggctccaggagctggccctcgccctgaagaaatgcaaaccctccctcccagcagaggccgagggggccgcacaggagctggagaaccagatgaaagagcgccaaggcctcttctttgacatggaggcctatttgcctaagaagaatggattgtacctgagcctggttctggggaacgtcaacgtcacgctcctgagcaagcaggctaagtttgcctacaaggacgagtatgagaagttcaagctctacctcaccatcatcctcatcctcatctccttcacttgccgcttcctgctcaactccagggtgacagatgctgccttcaacttcctgctggtctggtactactgcaccctgaccatccgggagagcatcctcatcaacaacggctcccggatcaaaggctggtgggtgttccatcactacgtgtccaccttcctgtcgggagtcatgctgacgtggcccgacggtctcatgtaccagaaattccggaaccaattcctctccttttccatgtaccagagcttcgtgcagtttctccagtactactaccagagcggctgcctctaccgcctgcgggcgctgggcgagcggcacaccatggacctcactgtggagggcttccagtcctggatgtggcggggcctcaccttcctgctgccttttcttttctttggacacttctggcagctttttaacgcgctgacgttgttcaacctggcccaggaccctcagtgcaaggagtggcaggtgcttatgtgcggctttcccttcctcctccttttcctcggcaatttcttcaccaccctgagggttgtgcaccacaagtttcacagtcagcggcacgggagcaagaaggattgaggctgggccttcccctgccggcccagaggggcttctgtcctgtgtgttgtgggaggggatgggaggcgcccctcgagtgtgcgtgtatcagggggtctcttctattctcccttgggttttatgggcgctgtgggccctgaaggaagacctgggcccagtgccctcaataaagagaggcccagagggg

SEQ ID NO: 370462 - DNA, 1357 bp, Homo sapiens
agcccggaagcggacgggggcggtggcggaggagcctcgggtgggccggggttgctgcgccgtcctccactactggctactggcgctgcagccatgcagcccccgcccccgggcccgctgggcgactgcctgcgggactgggaggatctacagcaggacttccagaacatccaggagacccatcggctctaccgcctgaagctggaggagctgaccaaacttcagaacaattgcaccagctccatcacgcggcagaagaagcggctccaggagctggccctcgccctgaagaaatgcaaaccctccctcccagcagaggccgagggggccgcacaggagctggagaaccagatgaaagagcgccaaggcctcttctttgacatggaggcctatttgcctaagaagaatggattgtacctgagcctggttctggggaacgtcaacgtcacgctcctgagcaagcaggctaagtttgcctacaaggacgagtatgagaagttcaagctctacctcaccatcatcctcatcctcatctccttcacttgccgcttcctgctcaactccagggtgacagatgctgccttcaacttcctgctggtctggtactactgcaccctgaccatccgggagagcatcctcatcaacaacggctcccggatcaaaggctggtgggtgttccatcactacgtgtccaccttcctgtcgggagtcatgctgacgtggcccgacggtctcatgtaccagaaattccggaaccaattcctctccttttccatgtaccagagcttcgtgcagtttctccagtactactaccagagcggctgcctctaccgcctgcgggcgctgggcgagcggcacaccatggacctcactgtggagggcttccagtcctggatgtggcggggcctcaccttcctgctgccttttcttttctttggacacgtaagtcgtgcctctgtgtccctgcctgtctgtccgtcctctgcgccggtttcgggctccagcagggactgggtacttctgagtaaaatgcctcctccctgcttagtttctggcagctttttaacgcgctgacgttgttcaacctggcccaggaccctcagtgcaaggagtggcagggttgtgcaccacaagtttcacagtcagcggcacgggagcaagaaggattgaggctgggccttcccctgccggcccagaggggcttctgtcctgtgtgttgtgggaggggatgggaggcgcccctcgagtgtgcgtgtatcagggggtctcttctattctcccttgggttttatgggcgctgtgggccctgaaggaagacctgggcccagtgccctcaataaagagaggcccagagggg

SEQ ID NO: 370463 - DNA, 1219 bp, Homo sapiens
agcccggaagcggacgggggcggtggcggaggagcctcgggtgggccggggttgctgcgccgtcctccactactggctactggcgctgcagccatgcagcccccgcccccgggcccgctgggcgactgcctgcgggactgggaggatctacagcaggacttccagaacatccaggagacccatcggctctaccgcctgaagctggaggagctgaccaaacttcagaacaattgcaccagctccatcacgcggcagaagaagcggctccaggagctggccctcgccctgaagaaatgcaaaccctccctcccagcagaggccgagggggccgcacaggagctggagaaccagatgaaagagcgccaaggcctcttctttgacatggaggcctatttgcctaagaagaatggattgtacctgagcctggttctggggaacgtcaacgtcacgctcctgagcaagcaggctaagtttgcctacaaggacgagtatgagaagttcaagctctacctcaccatcatcctcatcctcatctccttcacttgccgcttcctgctcaactccagggtgacagatgctgccttcaacttcctgctggtctggtactactgcaccctgaccatccgggagagcatcctcatcaacaacggctcccggatcaaaggctggtgggtgttccatcactacgtgtccaccttcctgtcgggagtcatgctgacgtggcccgacggtctcatgtaccagaaattccggaaccaattcctctccttttccatgtaccagagcttcgtgcagtttctccagtactactaccagagcggctgcctctaccgcctgcgggcgctgggcgagcggcacaccatggacctcactgtggagggcttccagtcctggatgtggcggggcctcaccttcctgctgccttttcttttctttggacacttctggcagctttttaacgcgctgacgttgttcaacctggcctatttgcctaagaagaatggattgtacctgagcctggttttggggaacgtcaacgtcacgctcctgagcaagcaggctaagtttgcctacaaggacgagtatgagaagttcaagcgcccctcgagtgtgcgtgtatcagggggtctcttctattctcccttgggttttatgggcgctgtgggccctgaaggaagacctgggcccagtgccctcaataaagagaggcccagagggg

SEQ ID NO: 370464 - DNA, 1513 bp, Homo sapiens
agcccggaagcggacgggggcggtggcggaggagcctcgggtgggccggggttgctgcgccgtcctccactactggctactggcgctgcagccatgcagcccccgcccccgggcccgctgggcgactgcctgcgggactgggaggatctacagcaggacttccagaacatccaggagacccatcggctctaccgcctgaagctggaggagctgaccaaacttcagaacaattgcaccagctccatcacgcggcagaagaagcggctccaggagctggccctcgccctgaagaaatgcaaaccctccctcccagcagaggccgagggggccgcacaggagctggagaaccagatgaaagagcgccaaggcctcttctttgacatggaggcctatttgcctaagaagaatggattgtacctgagcctggttctggggaacgtcaacgtcacgctcctgagcaagcaggctaagtttgcctacaaggacgagtatgagaagttcaagctctacctcaccatcatcctcatcctcatctccttcacttgccgcttcctgctcaactccagggtgacagatgctgccttcaacttcctgctggtctggtactactgcaccctgaccatccgggagagcatcctcatcaacaacggctcccggtgggcagggcgggccctgagggaggggagcatggaatggggtgccaggaccctccgggaagcaggaacaggcgctgggggtgatggtggctctctgctccaggatcaaaggctggtgggtgttccatcactacgtgtccaccttcctgtcgggagtcatgctgacgtggtgagtggctgggccccggcaggggcaggagctgggacaaggaggggatacacggcatccccaagggtccccacactgccctccactttttaccttaggcccgacggtctcatgtaccagaaattccggaaccaattcctctccttttccatgtaccagagcttcgtgcagtttctccagtactactaccagagcggctgcctctaccgcctgcgggcgctgggcgagcggcacaccatggacctcactgtggagggcttccagtcctggatgtggcggggcctcaccttcctgctgccttttcttttctttggacacttctggcagctttttaacgcgctgacgttgttcaacctggcccaggaccctcagtgcaaggagtggcaggtgcttatgtgcggctttcccttcctcctccttttcctcggcaatttcttcaccaccctgagggttgtgcaccacaagtttcacagtcagcggcacgggagcaagaaggattgaggctgggccttcccctgccggcccagaggggcttctgtcctgtgtgttgtgggaggggatgggaggcgcccctcgagtgtgcgtgtatcagggggtctcttctattctcccttgggttttatgggcgctgtgggccctgaaggaagacctgggcccagtgccctcaataaagagaggcccagagggg

SEQ ID NO: 370465 - DNA, 1472 bp, Homo sapiens
agcccggaagcggacgggggcggtggcggaggagcctcgggtgggccggggttgctgcgccgtcctccactactggctactggcgctgcagccatgcagcccccgcccccgggcccgctgggcgactgcctgcgggactgggaggatctacagcaggacttccagaacatccaggagacccatcggctctaccgcctgaagctggaggagctgaccaaacttcagaacaattgcaccagctccatcacgcggcagaagaagcggctccaggagctggccctcgccctgaagaaatgcaaaccctccctcccagcagaggccgagggggccgcacaggagctggagaaccagatgaaagagcgccaaggcctcttctttgacatggaggcctatttgcctaagaagaatggattgtacctgagcctggttctggggaacgtcaacgtcacgctcctgagcaagcaggctaagtttgcctacaaggacgagtatgagaagttcaagctctacctcaccatcatcctcatcctcatctccttcacttgccgcttcctgctcaactccagggtgacagatgctgccttcaacttcctgctggtctggtactactgcaccctgaccatccgggagagcatcctcatcaacaacggctcccggatcaaaggctggtgggtgttccatcactacgtgtccaccttcctgtcgggagtcatgctgacgtggcccgacggtctcatgtaccagaaattccggaaccaattcctctccttttccatgtaccagagcttcgtgcagtttctccagtactactaccagagcggctgcctctaccgcctgcgggcgctgggcgagcggcacaccatggacctcactgtgggtgagtcgggagtggccctggcatctggacattcccctttcctcccatcccgggtctgagtggtagcgtcccctctgtccctggccgtcctgtgccctgaccttcctccccgcagagggcttccagtcctggatgtggcggggcctcaccttcctgctgccttttcttttctttggacacgtaagtcgtgcctctgtgtccctgcctgtctgtccgtcctctgcgccggtttcgggctccagcagggactgggtacttctgagtaaaatgcctcctccctgcttagtttctggcagctttttaacgcgctgacgttgttcaacctggcccaggaccctcagtgcaaggagtggcagggttgtgcaccacaagtttcacagtcagcggcacgggagcaagaaggattgaggctgggccttcccctgccggcccagaggggcttctgtcctgtgtgttgtgggaggggatgggaggcgcccctcgagtgtgcgtgtatcagggggtctcttctattctcccttgggttttatgggcgctgtgggccctgaaggaagacctgggcccagtgccctcaataaagagaggcccagagggg

SEQ ID NO: 370466 - DNA, 1127 bp, Homo sapiens
ccttggctcagctgccctcccggggtgggggcacacatgggccccaccagcaccccacccgtctcaccggcctgcgccccccaggtttgcctacaaggacgagtatgagaagttcaagctctacctcaccatcatcctcatcctcatctccttcacttgccgcttcctgctcaactccagggtgacagatgctgccttcaacttcctgctggtctggtactactgcaccctgaccatccgggagagcatcctcatcaacaacggctcccggtgggcagggcgggccctgagggaggggagcatggaatggggtgccaggaccctccgggaagcaggaacaggcgctgggggtgatggtggctctctgctccaggatcaaaggctggtgggtgttccatcactacgtgtccaccttcctgtcgggagtcatgctgacgtggtgagtggctgggccccggcaggggcaggagctgggacaaggaggggatacacggcatccccaagggtccccacactgccctccactttttaccttaggcccgacggtctcatgtaccagaaattccggaaccaattcctctccttttccatgtaccagagcttcgtgcagtttctccagtactactaccagagcggctgcctctaccgcctgcgggcgctgggcgagcggcacaccatggacctcactgtggagggcttccagtcctggatgtggcggggcctcaccttcctgctgccttttcttttctttggacacttctggcagctttttaacgcgctgacgttgttcaacctggcccaggaccctcagtgcaaggagtggcaggtgcttatgtgcggctttcccttcctcctccttttcctcggcaatttcttcaccaccctgagggttgtgcaccacaagtttcacagtcagcggcacgggagcaagaaggattgaggctgggccttcccctgccggcccagaggggcttctgtcctgtgtgttgtgggaggggatgggaggcgcccctcgagtgtgcgtgtatcagggggtctcttctattctcccttgggttttatgggcgctgtgggccctgaaggaagacctgggcccagtgccctcaataaagagaggcccagagggg

SEQ ID NO: 370467 - DNA, 1312 bp, Homo sapiens
agcccggaagcggacgggggcggtggcggaggagcctcgggtgggccggggttgctgcgccgtcctccactactggctactggcgctgcagccatgcagcccccgcccccgggcccgctgggcgactgcctgcgggactgggaggatctacagcaggacttccagaacatccaggagacccatcggctctaccgcctgaagctggaggagctgaccaaacttcagaacaattgcaccagctccatcacgcggcagaagaagcggctccaggagctggccctcgccctgaagaaatgcaaaccctccctcccagcagaggccgagggggccgcacaggagctggagaaccagatgaaagagcgccaaggcctcttctttgacatggaggcctatttgcctaagaagaatggattgtacctgagcctggttctggggaacgtcaacgtcacgctcctgagcaagcaggctaagtttgcctacaaggacgagtatgagaagttcaagctctacctcaccatcatcctcatcctcatctccttcacttgccgcttcctgctcaactccagggtgacagatgctgccttcaacttcctgctggtctggtactactgcaccctgaccatccgggagagcatcctcatcaacaacggctcccggatcaaaggctggtgggtgttccatcactacgtgtccaccttcctgtcgggagtcatgctgacgtggcccgacggtctcatgtaccagaaattccggaaccaattcctctccttttccatgtaccagagcttcgtgcagtttctccagtactactaccagagcggctgcctctaccgcctgcgggcgctgggcgagcggcacaccatggacctcactgtggagggcttccagtcctggatgtggcggggcctcaccttcctgctgccttttcttttctttggacacttctggcagctttttaacgcgctgacgttgttcaacctggcccaggaccctcagtgcaaggagtggcaggtgcttatgtgcggctttcccttcctcctccttttcctcggcaatttcttcaccaccctgagggttgtgcaccacaagtttcacagtcagcggcacgggagcaagaaggattgaggctgggccttcccctgccggcccagaggggcttctgtcctgtgtgttgtgggaggggatgggaggcgcccctcgagtgtgcgtgtatcagggggtctcttctattctcccttgggttttatgggcgctgtgggccctgaaggaagacctgggcccagtgccctcaataaagagaggcccagagggg

SEQ ID NO: 370468 - DNA, 1592 bp, Homo sapiens
agcccggaagcggacgggggcggtggcggaggagcctcgggtgggccggggttgctgcgccgtcctccactactggctactggcgctgcagccatgcagcccccgcccccgggcccgctgggcgactgcctgcgggactgggaggatctacagcaggacttccagaacatccaggagacccatcggctctaccgcctgaagctggaggagctgaccaaacttcagaacaattgcaccagctccatcacgcggcagaagaagcggctccaggagctggccctcgccctgaagaaatgcaaaccctccctcccagcagaggccgagggggccgcacaggagctggagaaccagatgaaagagcgccaaggcctcttctttgacatggaggcctatttgcctaagaagaatggattgtacctgagcctggttctggggaacgtcaacgtcacgctcctgagcaagcaggctaagtttgcctacaaggacgagtatgagaagttcaagctctacctcaccatcatcctcatcctcatctccttcacttgccgcttcctgctcaactccagggtgacagatgctgccttcaacttcctgctggtctggtactactgcaccctgaccatccgggagagcatcctcatcaacaacggctcccggatcaaaggctggtgggtgttccatcactacgtgtccaccttcctgtcgggagtcatgctgacgtggcccgacggtctcatgtaccagaaattccggaaccaattcctctccttttccatgtaccagagcttcgtgcagtttctccagtactactaccagagcggctgcctctaccgcctgcgggcgctgggcgagcggcacaccatggacctcactgtggagggcttccagtcctggatgtggcggggcctcaccttcctgctgccttttcttttctttggacacttctggcagctttttaacgcgctgacgttgttcaacctggcccaggaccctcagtgcaaggagtggcaggtgcttatgtgcggctttcccttcctcctccttttcctcggcaatttcttcaccaccctgagggttgtgcaccacaagtttcacagtcagcggcacgggagcaagaaggattgaggctgggccttcccctgccggcccagaggggcttctgtcctgtgtgttgtgggaggggatgggaggcgcccctcgagtgtgcgtgtatcagggggtctcttctattctcccttgggttttatgggcgctgtgggccctgaaggaagacctgggcccagtgccctcaataaagagaggcccagaggggaaaaaaaaaaaaaaaaaaaaacaaaaaaaaaaaaaagggggggccgtctaaaaatttcccttcagggggcccatttaaagggataccaagaatactggtaaccgaacggggtgcccccaaaataaggaaggacagcaaataaatacagcaaagcactaggccacacagataaacacaggtgcgagacggcggaaacaagctgcgcaaatggaggaacactagggaaaaagaaacataaaaatcacaggaggagagaaacaataagtgggaacaacatacc

SEQ ID NO: 370469 - DNA, 1250 bp, Homo sapiens
agcccggaagcggacgggggcggtggcggaggagcctcgggtgggccggggttgctgcgccgtcctccactactggctactggcgctgcagccatgcagcccccgcccccgggcccgctgggcgactgcctgcgggactgggaggatctacagcaggacttccagaacatccaggagacccatcggctctaccgcctgaagctggaggagctgaccaaacttcagaacaattgcaccagctccatcacgcggcagaagaagcggctccaggagctggccctcgccctgaagaaatgcaaaccctccctcccagcagaggccgagggggccgcacaggagctggagaaccagatgaaagagcgccaaggcctcttctttgacatggaggcctatttgcctaagaagaatggattgtacctgagcctggttctggggaacgtcaacgtcacgctcctgagcaagcaggctaagtttgcctacaaggacgagtatgagaagttcaagctctacctcaccatcatcctcatcctcatctccttcacttgccgcttcctgctcaactccagggtgacagatgctgccttcaacttcctgctggtctggtactactgcaccctgaccatccgggagagcatcctcatcaacaacggctcccggatcaaaggctggtgggtgttccatcactacgtgtccaccttcctgtcgggagtcatgctgacgtggcccgacggtctcatgtaccagaaattccggaaccaattcctctccttttccatgtaccagagcttcgtgcagtttctccagtactactaccagagcggctgcctctaccgcctgcgggcgctgggcgagcggcacaccatggacctcactgtggagggcttccagtcctggatgtggcggggcctcaccttcctgctgccttttcttttctttggacacttctggcagctttttaacgcgctgacgttgttcaacctggcccaggaccctcagtgcaaggagtggcagggttgtgcaccacaagtttcacagtcagcggcacgggagcaagaaggattgaggctgggccttcccctgccggcccagaggggcttctgtcctgtgtgttgtgggaggggatgggaggcgcccctcgagtgtgcgtgtatcagggggtctcttctattctcccttgggttttatgggcgctgtgggccctgaaggaagacctgggcccagtgccctcaataaagagaggcccagagggg

SEQ ID NO: 370470 - DNA, 1226 bp, Homo sapiens
tgctggaatgggagaagactatccttggagattccatcacaaacatcatggatccgctctactgatcttctccgaggcccaccgaagggagacccatcggctctaccgcctgaagctggaggagctgaccaaacttcagaacaattgcaccagctccatcacgcggcagaagaagcggctccaggagctggccctcgccctgaagaaatgcaaaccctccctcccagcagaggccgagggggccgcacaggagctggagaaccagatgaaagagcgccaaggcctcttctttgacatggaggcctatttgcctaagaagaatggattgtacctgagcctggttctggggaacgtcaacgtcacgctcctgagcaagcaggctaagtttgcctacaaggacgagtatgagaagttcaagctctacctcaccatcatcctcatcctcatctccttcacttgccgcttcctgctcaactccagggtgacagatgctgccttcaacttcctgctggtctggtactactgcaccctgaccatccgggagagcatcctcatcaacaacggctcccggatcaaaggctggtgggtgttccatcactacgtgtccaccttcctgtcgggagtcatgctgacgtggcccgacggtctcatgtaccagaaattccggaaccaattcctctccttttccatgtaccagagcttcgtgcagtttctccagtactactaccagagcggctgcctctaccgcctgcgggcgctgggcgagcggcacaccatggacctcactgtggagggcttccagtcctggatgtggcggggcctcaccttcctgctgccttttcttttctttggacacttctggcagctttttaacgcgctgacgttgttcaacctggcccaggaccctcagtgcaaggagtggcaggtgcttatgtgcggctttcccttcctcctccttttcctcggcaatttcttcaccaccctgagggttgtgcaccacaagtttcacagtcagcggcacgggagcaagaaggattgaggctgggccttcccctgccggcccagaggggcttctgtcctgtgtgttgtgggaggggatgggaggcgcccctcgagtgtgcgtgtatcagggggtctcttctattctcccttgggttttatgggcgctgtgggccctgaaggaagacctgggcccagtgccctcaataaagagaggcccagagggg

SEQ ID NO: 370471 - DNA, 1049 bp, Homo sapiens
tgccctgactgtttctggccttacccgcagatgcaaaccctccctcccagcagaggccgagggggccgcacaggagctggagaaccagatgaaagagcgccaaggcctcttctttgacatggaggcctatttgcctaagaagaatggattgtacctgagcctggttctggggaacgtcaacgtcacgctcctgagcaagcaggctaagtttgcctacaaggacgagtatgagaagttcaagctctacctcaccatcatcctcatcctcatctccttcacttgccgcttcctgctcaactccagggtgacagatgctgccttcaacttcctgctggtctggtactactgcaccctgaccatccgggagagcatcctcatcaacaacggctcccggatcaaaggctggtgggtgttccatcactacgtgtccaccttcctgtcgggagtcatgctgacgtggcccgacggtctcatgtaccagaaattccggaaccaattcctctccttttccatgtaccagagcttcgtgcagtttctccagtactactaccagagcggctgcctctaccgcctgcgggcgctgggcgagcggcacaccatggacctcactgtggagggcttccagtcctggatgtggcggggcctcaccttcctgctgccttttcttttctttggacacttctggcagctttttaacgcgctgacgttgttcaacctggcccaggaccctcagtgcaaggagtggcaggtgcttatgtgcggctttcccttcctcctccttttcctcggcaatttcttcaccaccctgagggttgtgcaccacaagtttcacagtcagcggcacgggagcaagaaggattgaggctgggccttcccctgccggcccagaggggcttctgtcctgtgtgttgtgggaggggatgggaggcgcccctcgagtgtgcgtgtatcagggggtctcttctattctcccttgggttttatgggcgctgtgggccctgaaggaagacctgggcccagtgccctcaataaagagaggcccagagggg

SEQ ID NO: 370472 - DNA, 1252 bp, Homo sapiens
agcccggaagcggacgggggcggtggcggaggagcctcgggtgggccggggttgctgcgccgtcctccactactggctactggcgctgcagccatgcagcccccgcccccgggcccgctgggcgactgcctgcgggactgggaggatctacagcaggacttccagaacatccaggagacccatcggctctaccgcctgaagctggaggagctgaccaaacttcagaacaattgcaccagctccatcacgcggcagaagaagcggctccaggagctggccctcgccctgaagaaatgcaaaccctccctcccagcagaggccgagggggccgcacaggagctggagaaccagatgaaagagcgccaaggcctcttctttgacatggaggcctatttgcctaagaagaatgggtttgcctacaaggacgagtatgagaagttcaagctctacctcaccatcatcctcatcctcatctccttcacttgccgcttcctgctcaactccagggtgacagatgctgccttcaacttcctgctggtctggtactactgcaccctgaccatccgggagagcatcctcatcaacaacggctcccggatcaaaggctggtgggtgttccatcactacgtgtccaccttcctgtcgggagtcatgctgacgtggcccgacggtctcatgtaccagaaattccggaaccaattcctctccttttccatgtaccagagcttcgtgcagtttctccagtactactaccagagcggctgcctctaccgcctgcgggcgctgggcgagcggcacaccatggacctcactgtggagggcttccagtcctggatgtggcggggcctcaccttcctgctgccttttcttttctttggacacttctggcagctttttaacgcgctgacgttgttcaacctggcccaggaccctcagtgcaaggagtggcaggtgcttatgtgcggctttcccttcctcctccttttcctcggcaatttcttcaccaccctgagggttgtgcaccacaagtttcacagtcagcggcacgggagcaagaaggattgaggctgggccttcccctgccggcccagaggggcttctgtcctgtgtgttgtgggaggggatgggaggcgcccctcgagtgtgcgtgtatcagggggtctcttctattctcccttgggttttatgggcgctgtgggccctgaaggaagacctgggcccagtgccctcaataaagagaggcccagagggg

SEQ ID NO: 370473 - DNA, 1247 bp, Homo sapiens
agcccggaagcggacgggggcggtggcggaggagcctcgggtgggccggggttgctgcgccgtcctccactactggctactggcgctgcagccatgcagcccccgcccccgggcccgctgggcgactgcctgcgggactgggaggatctacagcaggacttccagaacatccaggagacccatcggctctaccgcctgaagctggaggagctgaccaaacttcagaacaattgcaccagctccatcacgcggcagaagaagcggctccaggagctggccctcgccctgaagaaatgcaaaccctccctcccagcagaggccgagggggccgcacaggagctggagaaccagatgaaagagcgccaaggcctcttctttgacatggaggcctatttgcctaagaagaatggattgtacctgagcctggttctggggaacgtcaacgtcacgctcctgagcaagcaggctaagtttgcctacaaggacgagtatgagaagttcaagctctacctcaccatcatcctcatcctcatctccttcacttgccgcttcctgctcaactccagggtgacagatgctgccttcaacttcctgctggtctggtactactgcaccctgaccatccgggagagcatcctcatcaacaacggctcccggatcaaaggctggtgggtgttccatcactacgtgtccaccttcctgtcgggagtcatgctgacgtggcccgacggtctcatgtaccagaaattccggaaccaattcctctccttttccatgtaccagagcttcgtgcagtttctccagtactactaccagagcggctgcctctaccgcctgcgggcgctgggcgagcggcacaccatggacctcactgtggttctggcagctttttaacgcgctgacgttgttcaacctggcccaggaccctcagtgcaaggagtggcaggtgcttatgtgcggctttcccttcctcctccttttcctcggcaatttcttcaccaccctgagggttgtgcaccacaagtttcacagtcagcggcacgggagcaagaaggattgaggctgggccttcccctgccggcccagaggggcttctgtcctgtgtgttgtgggaggggatgggaggcgcccctcgagtgtgcgtgtatcagggggtctcttctattctcccttgggttttatgggcgctgtgggccctgaaggaagacctgggcccagtgccctcaataaagagaggcccagagggg

SEQ ID NO: 370474 - DNA, 1185 bp, Homo sapiens
agcccggaagcggacgggggcggtggcggaggagcctcgggtgggccggggttgctgcgccgtcctccactactggctactggcgctgcagccatgcagcccccgcccccgggcccgctgggcgactgcctgcgggactgggaggatctacagcaggacttccagaacatccaggagacccatcggctctaccgcctgaagctggaggagctgaccaaacttcagaacaattgcaccagctccatcacgcggcagaagaagcggctccaggagctggccctcgccctgaagaaatgcaaaccctccctcccagcagaggccgagggggccgcacaggagctggagaaccagatgaaagagcgccaaggcctcttctttgacatggaggcctatttgcctaagaagaatggattgtacctgagcctggttctggggaacgtcaacgtcacgctcctgagcaagcaggctaagtttgcctacaaggacgagtatgagaagttcaagctctacctcaccatcatcctcatcctcatctccttcacttgccgcttcctgctcaactccagggtgacagatgctgccttcaacttcctgctggtctggtactactgcaccctgaccatccgggagagcatcctcatcaacaacggctcccggatcaaaggctggtgggtgttccatcactacgtgtccaccttcctgtcgggagtcatgctgacgtggcccgacggtctcatgtaccagaaattccggaaccaattcctctccttttccatgtaccagagcttcgtgcagtttctccagtactactaccagagcggctgcctctaccgcctgcgggcgctgggcgagcggcacaccatggacctcactgtggttctggcagctttttaacgcgctgacgttgttcaacctggcccaggaccctcagtgcaaggagtggcagggttgtgcaccacaagtttcacagtcagcggcacgggagcaagaaggattgaggctgggccttcccctgccggcccagaggggcttctgtcctgtgtgttgtgggaggggatgggaggcgcccctcgagtgtgcgtgtatcagggggtctcttctattctcccttgggttttatgggcgctgtgggccctgaaggaagacctgggcccagtgccctcaataaagagaggcccagagggg

SEQ ID NO: 370475 - DNA, 892 bp, Homo sapiens
tgctggaatgggagaagactatccttggagattccatcacaaacatcatggatccgctctactgatcttctccgaggcccaccgaagggagacccatcggctctaccgcctgaagctggaggagctgaccaaacttcagaacaattgcaccagctccatcacgcggcagaagaagcggctccaggagctggccctcgccctgaagaaatgcaaaccctccctcccagcagaggccggatcaaaggctggtgggtgttccatcactacgtgtccaccttcctgtcgggagtcatgctgacgtggcccgacggtctcatgtaccagaaattccggaaccaattcctctccttttccatgtaccagagcttcgtgcagtttctccagtactactaccagagcggctgcctctaccgcctgcgggcgctgggcgagcggcacaccatggacctcactgtggagggcttccagtcctggatgtggcggggcctcaccttcctgctgccttttcttttctttggacacttctggcagctttttaacgcgctgacgttgttcaacctggcccaggaccctcagtgcaaggagtggcaggtgcttatgtgcggctttcccttcctcctccttttcctcggcaatttcttcaccaccctgagggttgtgcaccacaagtttcacagtcagcggcacgggagcaagaaggattgaggctgggccttcccctgccggcccagaggggcttctgtcctgtgtgttgtgggaggggatgggaggcgcccctcgagtgtgcgtgtatcagggggtctcttctattctcccttgggttttatgggcgctgtgggccctgaaggaagacctgggcccagtgccctcaataaagagaggcccagagggg

SEQ ID NO: 370476 - DNA, 1512 bp, Homo sapiens
agcccggaagcggacgggggcggtggcggaggagcctcgggtgggccggggttgctgcgccgtcctccactactggctactggcgctgcagccatgcagcccccgcccccgggcccgctgggcgactgcctgcgggactgggaggatctacagcaggacttccagaacatccaggagacccatcggctctaccgcctgaagctggaggagctgaccaaacttcagaacaattgcaccagctccatcacgcggcagaagaagcggctccaggagctggccctcgccctgaagaaatgcaaaccctccctcccagcagaggccgagggggccgcacaggagctggagaaccagatgaaagagcgccaaggcctcttctttgacatggaggcctatttgcctaagaagaatggattgtacctgagcctggttctggggaacgtcaacgtcacgctcctgagcaagcaggctaagtttgcctacaaggacgagtatgagaagttcaagctctacctcaccatcatcctcatcctcatctccttcacttgccgcttcctgctcaactccagggtgacagatgctgccttcaacttcctgctggtctggtactactgcaccctgaccatccgggagagcatcctcatcaacaacggctcccggtgggcagggcgggccctgagggaggggagcatggaatggggtgccaggaccctccgggaagcaggaacaggcgctgggggtgatggtggctctctgctccaggatcaaaggctggtgggtgttccatcactacgtgtccaccttcctgtcgggagtcatgctgacgtggcccgacggtctcatgtaccagaaattccggaaccaattcctctccttttccatgtaccagagcttcgtgcagtttctccagtactactaccagagcggctgcctctaccgcctgcgggcgctgggcgagcggcacaccatggacctcactgtggttctggcagctttttaacgcgctgacgttgttcaacctggcccaggaccctcagtgcaaggagtggcaggtgcttatgtgcggctttcccttcctcctccttttcctcggcaatttcttcaccaccctgagggttgtgcaccacaagtttcacagtcagcggcacgggagcaagaaggattgaggctgggccttcccctgccggcccagaggggcttctgtcctgtgtgttgtgggaggggatgggaggcgcccctcgagtgtgcgtgtatcagggggtctcttctattctcccttgggttttatgggcgctgtgggccctgaaggaagacctgggcccagtgccctcaataaagagaggcccagaggggaaaaaaacacaaaaatcacataatactatcctaccacacatattcacatcatcatttcaacactacaccactaatacaacaggctctccccctacataatattatcccttgagctctccacatttcttcccaacccacatatatttacacaacaaattcctt

SEQ ID NO: 370477 - DNA, 1031 bp, Homo sapiens
taaggtcaagagagcagcttatggaaatgtcaaacccacattataaaacccaggaggcaccaaggcctctcgtgggagaccagcagggaggaaagatctccaggctcataggccagggctgtggtcttcacattccccgacccctttggtgatctgaggaaagttcatagcccaatcccaggacagtatgctcatattatttgcatacagtttgagggggttcacacatacacacacacaccccaaggccatttgtggacccagattagaagccctgaggatcctaggtccagaagaaagggccttgtcggaggccacacaggccaccaggagccaggcccctgaagatccttggcccaggagaaagggccttgccagaggccacacaggccaccaggagtgaggcccccagaggggtcagcagggcctaccctacaccaccccacccttcaacacgcccaggcgtgcacgctgcaggccagacaaccctccagctggtgtccccagcacccaacccaagtttttctcctgctcaggcaccagcagtcttcctggttgcactctaagctccagatcacaaagtcgagtccttttgttgtgcactgttcactcccccgtagaccaccctgttcctctggggagcttgtctataactagacccactcctggtagtccagcattaagaaaagtcagcacctctgctcacccatatccatcctgggtagtgctggggacacaggaaagacagccctagccctgtccttccagggcttacagtccagggagagacaagaagtccctggccagtaacaactgagaggggtggcctgggactgggcagcccagaggggccatgtaacccagcctgggtgtgggacatcagggaagacttcccgaaaaaggggacactcaggctgagaccaaggagggatgagtaggcggcagcagcaggagactgcagggaccgagggaggtgcttgctggctggttctggacctaggggacgaaggagggggcctggtcaagggagg

SEQ ID NO: 370478 - DNA, 2043 bp, Homo sapiens
gccctgcccagggcgagggcagagcgggcccgcccaggtgcgcccgggggttgggccggagtccggaaggtgcgccgcgccgccccgaacctgtcccctaggcctccccccgcgtgaaagtgaaagtgtcggacccgcggaggtcaaggataggggggcggggccagcgcggagctgggagcgggagccgggcactccaggggccatggatgggctcggccgccgccttcgagccagcctgagactgaagcgcggccatgggggaccaccccaggacaattcaggggaagctttaaaggaaccagaaagggcccaggagcactctttgcccaactttgctggggggcagcacttctttgaataccttcttgtggtttctctcaaaaagaagcgttcagaggatgattacgagcctataatcacctaccaatttcccaagcgggagaacctgcttcggggtcagcaggaggaggaggagcggctgctcaaagctatccccttgttctgcttcccagatgggaatgagtgggcatcactcaccgagtatcccagggagaccttctccttcgttctgaccaatgtggatgggagcagaaagattggatactgcaggcgcctcttgcctgccggccctggccctcgccttcccaaagtgtactgcatcatcagctgcatcggctgcttcggcttgttctccaagatcctggatgaagtggagaagagacatcagatctccatggctgtcatctacccgttcatgcagggcctccgagaggcagccttccctgctcctgggaagactgtcactctcaagagcttcatccccgactcaggcactgagttcatttcactgacacggcccctggactcccacctagaacatgtggattttagttctctattgcactgtctcagttttgaacagatacttcagatctttgcctctgccgtgctggagagaaaaatcatcttcctggcggaaggtctcagcaccttgtctcagtgcatccatgctgctgccgcactgctctaccccttcagctgggcgcacacctacatccctgttgtccctgagagccttctggccaccgtctgctgccccacccccttcatggttggagtacaaatgcgcttccagcaggaggtcatggacagccctatggaagaggtcctgctggtcaatctttgtgaaggaaccttcttaatgtcggttggtgatgaaaaagacatcctgccaccgaagcttcaggatgacatcttagactctcttggtcaggggatcaatgagttaaagactgcagaacaaatcaacgagcatgtttcaggcccctttgtgcagttctttgtcaagattgtgggccattatgcttcctatatcaagcgggaggcaaatgggcaaggccacttccaagaaagatccttctgtaaggctctgacctccaagaccaaccgccgatttgtgaagaagtttgtgaagacacagctcttctcacttttcatccaggaagccgagaagagcaagaatcctcctgcaggctatttccaacagaaaatacttgaatatgaggaacagaagaaacagaagaaaccaagggaaaaaactgtgaaataagagctgtggtgaataagaatgactagagctacacaccatttctggacttcagcccctgccagtgtggcaggatcagcaaaactgtcagctcccaaaatccatatcctcactctgagtcttggtatccaggtattgcttcaaactggtgtctgagatttggatccctggtattgatttctcaggactttggagggctctgacaccatgctcacagaactgggctcagagctccattttttgcagaggtgacacaggtaggaaacagtagtacatgtgttgtagacacttggttagaagctgctgcaactgccctctcccatcattataacatcttcaacacagaacacactttgtggtcgaaaggctcagcctctctacatgaagtctgtggacatgtaaggacgagagtaaagaggaaaatcttattttta

SEQ ID NO: 370479 - DNA, 2054 bp, Homo sapiens
  misc_feature (1)..(1): n is a, c, g, or t
  misc_feature (5)..(6): n is a, c, g, or t
ngccnngcctgggtcccgtcacatccttcttgctcaaccactgggtgcacaggatggaaacttctattccctctctggaagacagcgcgtggcttggcttcacagagttgtggctggagaccgaagcagcccctttctcaggcttactgtcaccagtctgtctgtgttaggggagaggggagtccgctctgtcctgaaggcccagagatggaaggacaagtggtaggccgggtgttcaggctcttccaacgccgactgcttcaactccgagcaggaccaccccaggacaattcaggggaagctttaaaggaaccagaaagggcccaggagcactctttgcccaactttgctggggggcagcacttctttgaataccttcttgtggtttctctcaaaaagaagcgttcagaggatgattacgagcctataatcacctaccaatttcccaagcgggagaacctgcttcggggtcagcaggaggaggaggagcggctgctcaaagctatccccttgttctgcttcccagatgggaatgagtgggcatcactcaccgagtatcccagggagaccttctccttcgttctgaccaatgtggatgggagcagaaagattggatactgcaggcgcctcttgcctgccggccctggccctcgccttcccaaagtgtactgcatcatcagctgcatcggctgcttcggcttgttctccaagatcctggatgaagtggagaagagacatcagatctccatggctgtcatctacccgttcatgcagggcctccgagaggcagccttccctgctcctgggaagactgtcactctcaagagcttcatccccgactcaggcactgagttcatttcactgacacggcccctggactcccacctagaacatgtggattttagttctctattgcactgtctcagttttgaacagatacttcagatctttgcctctgccgtgctggagagaaaaatcatcttcctggcggaaggtctcagcaccttgtctcagtgcatccatgctgctgccgcactgctctaccccttcagctgggcgcacacctacatccctgttgtccctgagagccttctggccaccgtctgctgccccacccccttcatggttggagtacaaatgcgcttccagcaggaggtcatggacagccctatggaagaggtcctgctggtcaatctttgtgaaggaaccttcttaatgtcggttggtgatgaaaaagacatcctgccaccgaagcttcaggatgacatcttagactctcttggtcaggggatcaatgagttaaagactgcagaacaaatcaacgagcatgtttcaggcccctttgtgcagttctttgtcaagattgtgggccattatgcttcctatatcaagcgggaggcaaatgggcaaggccacttccaagaaagatccttctgtaaggctctgacctccaagaccaaccgccgatttgtgaagaagtttgtgaagacacagctcttctcacttttcatccaggaagccgagaagagcaagaatcctcctgcaggctatttccaacagaaaatacttgaatatgaggaacagaagaaacagaagaaaccaagggaaaaaactgtgaaataagagctgtggtgaataagaatgactagagctacacaccatttctggacttcagcccctgccagtgtggcaggatcagcaaaactgtcagctcccaaaatccatatcctcactctgagtcttggtatccaggtattgcttcaaactggtgtctgagatttggatccctggtattgatttctcaggactttggagggctctgacaccatgctcacagaactgggctcagagctccattttttgcagaggtgacacaggtaggaaacagtagtacatgtgttgtagacacttggttagaagctgctgcaactgccctctcccatcattataacatcttcaacacagaacacactttgtggtcgaaaggctcagcctctctacatgaagtctgtggacatgtaaggacgagagtaaagaggaaaatcttattttta

SEQ ID NO: 370480 - DNA, 1002 bp, Homo sapiens
  misc_feature (892)..(892): n is a, c, g, or t
  misc_feature (894)..(894): n is a, c, g, or t
  misc_feature (899)..(899): n is a, c, g, or t
  misc_feature (901)..(901): n is a, c, g, or t
  misc_feature (904)..(904): n is a, c, g, or t
ggtttttaagagctggtcatgccctctctggggctagtgtggtcacagtcacatgccctttgagcctgttcttattcacttagtatgaactaaactctcaggccatattgttccaggactgccagaagcacccgacaggttaggcagtctctgtggtaccctggggccttggcctccatgtggcctctccagcacatttccgtggcttctgtgtcagtggtttctttcctctgcttggctccccatggtttcaagtctaccagggcaggtgtggaaactgcccatttggccctgatcctgagtgactggtggttctggccagtatccaggtatctcagcattggcaaggcggccttgaggtgtggaggtcacccggattctcacagactccactccaggaatggatcaatgagattatactaaatgggctctggcttgatttcaggaccaccccaggacaattcaggggaagctttaaaggaaccagaaagggcccaggagcactctttgcccaactttgctggggggcagcacttctttgaataccttcttgtggtttctctcaaaaagaagcgttcagaggatgattacgagcctataatcacctaccaatttcccaagcgggagaacctgcttcggggtcagcaggaggaggaggagcggctgctcaaagctatccccttgttctgcttcccagatgggaatgagtgggcatcactcaccgagtatcccagggagaccttctccttcgttctgaccaatgtggatgggagcagaaagattggatactgcaggcgcctcttgcctgccggccctggccctcgccttcccaaagtgtactgcatcatcagctgcatcggctgcttcggcttgttctccaagatcctggtgnangtggngnaanagacctcgatttccactgggggacactacaccgggacatagcagggctccaaaggaacttcccggtcctggaaaaatgcgctctcaaaagttttccca

SEQ ID NO: 370481 - DNA, 1204 bp, Homo sapiens
gccctgcccagggcgagggcagagcgggcccgcccaggtgcgcccgggggttgggccggagtccggaaggtgcgccgcgccgccccgaacctgtcccctaggcctccccccgcgtgaaagtgaaagtgtcggacccgcggaggtcaaggataggggggcggggccagcgcggagctgggagcgggagccgggcactccaggggccatggatgggctcggccgccgccttcgagccagcctgagactgaagcgcggccatggggatgtggggaccgaccccaaggcaccacattcacgggggaagctttacacaggaacccagcaacagggcccaggagccacctcttttgccccaattttgctggggggagcagcaactttccttgtgaaattaccctttccttgtaggattccgtcttcaaaacacggaaagcgttcaagaagggactgcatttaccgaaggccctagttaaattcagcgcttaaccagagttttccgcaaaggcggggaggaacccttgcctaccggcgaggctccagggcagggaagggagggcagggacgcaggacatgcttcaaaagtctatccccacttgtatctgcttccccaagaatggggacattgagttgggccattcacctcacccgaggtattcccaagggagcaccctttctaccattcggtatactgaccccaaattgttggcgattggggcagcaagcaacacgcattgggaattaactgccagggcgccttctttgccttgccaggggcccgtgggaccttcaggccatttccccaaaaagggtggtaccttggcattccaatccatcggttgcaatcagagctggcgtacagggcttgttcactccgagagattccgttgggaatctgacaacggtggggcatagcaacaagaccagattcgaagagatctgtcccaatgtgggcatggtgtcatcgcataccccaccgagtatcagatgcgccaaggcgcgcttccacagaagcaggggacaggccatttatccccttgggctacacattaaggaaacgaacttggtacgcatctctctccaaaaggagacggtttcatctccccccgagagacttatcgagccagctcagggcagttatcaaatttcacacatctgagaagacggggcccctacgtggaacatccacgaggtgtaaggagacacg

SEQ ID NO: 370482 - DNA, 554 bp, Homo sapiens
ggctcaccgcaagctccgcctcccgggttcacgccattctcctgcctcagcctctggagtagctgggactacaggcgcccgccaccacacccggctgattttttgcgtttttagtagagacagggtttcaccgtgttagccaggatggtctcgatctcctgacctcgtgatccacccgcctcggcctcccaaagtgctgggattacaggcgtgagcaccacgagaggcaggagtttttctaatagaaaattgtacataagatgttgcaagcatgaaaaaaataaaaagatgttggtctctgttctagagagcagggagttgaaggggaattgtagagagaggaatgcaatctcaagaatatcagtctaggcttggaaaaaaattggttctcttattagcagcatagtatgacctcgggcagcttctttgggtctgtttcctcatcttcaacacttatgtgaacaatgtactaaatgctccatgtagaagcaatttctgcagtcaatgttttattaagggagtgactggctgtgatttctccatcttgtatttcc

SEQ ID NO: 370483 - DNA, 2225 bp, Homo sapiens
ggtttttaagagctggtcatgccctctctggggctagtgtggtcacagtcacatgccctttgagcctgttcttattcacttagtatgaactaaactctcaggccatattgttccaggactgccagaagcacccgacaggttaggcagtctctgtggtaccctggggccttggcctccatgtggcctctccagcacatttccgtggcttctgtgtcagtggtttctttcctctgcttggctccccatggtttcaagtctaccagggcaggtgtggaaactgcccatttggccctgatcctgagtgactggtggttctggccagtatccaggtatctcagcattggcaaggcggccttgaggtgtggaggtcacccggattctcacagactccactccaggaatggatcaatgagattatactaaatgggctctggcttgatttcaggaccaccccaggacaattcaggggaagctttaaaggaaccagaaagggcccaggagcactctttgcccaactttgctggggggcagcacttctttgaataccttcttgtggtttctctcaaaaagaagcgttcagaggatgattacgagcctataatcacctaccaatttcccaagcgggagaacctgcttcggggtcagcaggaggaggaggagcggctgctcaaagctatccccttgttctgcttcccagatgggaatgagtgggcatcactcaccgagtatcccagggagaccttctccttcgttctgaccaatgtggatgggagcagaaagattggatactgcaggcgcctcttgcctgccggccctggccctcgccttcccaaagtgtactgcatcatcagctgcatcggctgcttcggcttgttctccaagatcctggatgaagtggagaagagacatcagatctccatggctgtcatctacccgttcatgcagggcctccgagaggcagccttccctgctcctgggaagactgtcactctcaagagcttcatccccgactcaggcactgagttcatttcactgacacggcccctggactcccacctagaacatgtggattttagttctctattgcactgtctcagttttgaacagatacttcagatctttgcctctgccgtgctggagagaaaaatcatcttcctggcggaaggtctcagcaccttgtctcagtgcatccatgctgctgccgcactgctctaccccttcagctgggcgcacacctacatccctgttgtccctgagagccttctggccaccgtctgctgccccacccccttcatggttggagtacaaatgcgcttccagcaggaggtcatggacagccctatggaagaggtcctgctggtcaatctttgtgaaggaaccttcttaatgtcggttggtgatgaaaaagacatcctgccaccgaagcttcaggatgacatcttagactctcttggtcaggggatcaatgagttaaagactgcagaacaaatcaacgagcatgtttcaggcccctttgtgcagttctttgtcaagattgtgggccattatgcttcctatatcaagcgggaggcaaatgggcaaggccacttccaagaaagatccttctgtaaggctctgacctccaagaccaaccgccgatttgtgaagaagtttgtgaagacacagctcttctcacttttcatccaggaagccgagaagagcaagaatcctcctgcaggctatttccaacagaaaatacttgaatatgaggaacagaagaaacagaagaaaccaagggaaaaaactgtgaaataagagctgtggtgaataagaatgactagagctacacaccatttctggacttcagcccctgccagtgtggcaggatcagcaaaactgtcagctcccaaaatccatatcctcactctgagtcttggtatccaggtattgcttcaaactggtgtctgagatttggatccctggtattgatttctcaggactttggagggctctgacaccatgctcacagaactgggctcagagctccattttttgcagaggtgacacaggtaggaaacagtagtacatgtgttgtagacacttggttagaagctgctgcaactgccctctcccatcattataacatcttcaacacagaacacactttgtggtcgaaaggctcagcctctctacatgaagtctgtggacatgtaaggacgagagtaaagaggaaaatcttattttta

SEQ ID NO: 370484 - DNA, 2196 bp, Homo sapiens
gccctgcccagggcgagggcagagcgggcccgcccaggtgcgcccgggggttgggccggagtccggaaggtgcgccgcgccgccccgaacctgtcccctaggcctccccccgcgtgaaagtgaaagtgtcggacccgcggaggtcaaggataggggggcggggccagcgcggagctgggagcgggagccgggcactccaggggccatggatgggctcggccgccgccttcgagccagcctgagactgaagcgcggccatggggggggttagtgccggccggggagagcgcggggggacggcgtgggcaccggggagccggggctagggctggcggctggggcccggtggagggcggcacggggcgtcgagatccgggagcagttggaaggggactcaggaggctgcgcgggggcaggaccaccccaggacaattcaggggaagctttaaaggaaccagaaagggcccaggagcactctttgcccaactttgctggggggcagcacttctttgaataccttcttgtggtttctctcaaaaagaagcgttcagaggatgattacgagcctataatcacctaccaatttcccaagcgggagaacctgcttcggggtcagcaggaggaggaggagcggctgctcaaagctatccccttgttctgcttcccagatgggaatgagtgggcatcactcaccgagtatcccagggagaccttctccttcgttctgaccaatgtggatgggagcagaaagattggatactgcaggcgcctcttgcctgccggccctggccctcgccttcccaaagtgtactgcatcatcagctgcatcggctgcttcggcttgttctccaagatcctggatgaagtggagaagagacatcagatctccatggctgtcatctacccgttcatgcagggcctccgagaggcagccttccctgctcctgggaagactgtcactctcaagagcttcatccccgactcaggcactgagttcatttcactgacacggcccctggactcccacctagaacatgtggattttagttctctattgcactgtctcagttttgaacagatacttcagatctttgcctctgccgtgctggagagaaaaatcatcttcctggcggaaggtctcagcaccttgtctcagtgcatccatgctgctgccgcactgctctaccccttcagctgggcgcacacctacatccctgttgtccctgagagccttctggccaccgtctgctgccccacccccttcatggttggagtacaaatgcgcttccagcaggaggtcatggacagccctatggaagaggtcctgctggtcaatctttgtgaaggaaccttcttaatgtcggttggtgatgaaaaagacatcctgccaccgaagcttcaggatgacatcttagactctcttggtcaggggatcaatgagttaaagactgcagaacaaatcaacgagcatgtttcaggcccctttgtgcagttctttgtcaagattgtgggccattatgcttcctatatcaagcgggaggcaaatgggcaaggccacttccaagaaagatccttctgtaaggctctgacctccaagaccaaccgccgatttgtgaagaagtttgtgaagacacagctcttctcacttttcatccaggaagccgagaagagcaagaatcctcctgcaggctatttccaacagaaaatacttgaatatgaggaacagaagaaacagaagaaaccaagggaaaaaactgtgaaataagagctgtggtgaataagaatgactagagctacacaccatttctggacttcagcccctgccagtgtggcaggatcagcaaaactgtcagctcccaaaatccatatcctcactctgagtcttggtatccaggtattgcttcaaactggtgtctgagatttggatccctggtattgatttctcaggactttggagggctctgacaccatgctcacagaactgggctcagagctccattttttgcagaggtgacacaggtaggaaacagtagtacatgtgttgtagacacttggttagaagctgctgcaactgccctctcccatcattataacatcttcaacacagaacacactttgtggtcgaaaggctcagcctctctacatgaagtctgtggacatgtaaggacgagagtaaagaggaaaatcttattttta

SEQ ID NO: 370485 - DNA, 1806 bp, Homo sapiens
ctttgcccaactttgctggggggcaaagagtgctcctgggccctttctggttcctttaaagcttcccctgaatgtcctggggcactctttgcccaactttgctggggggcagcacttctttgaataccttcttgtggtttctctcaaaaagaagcgttcagaggatgattacgagcctataatcacctaccaatttcccaagcgggagaacctgcttcggggtcagcaggaggaggaggagcggctgctcaaagctatccccttgttctgcttcccagatgggaatgagtgggcatcactcaccgagtatcccagggagaccttctccttcgttctgaccaatgtggatgggagcagaaagattggatactgcaggcgcctcttgcctgccggccctggccctcgccttcccaaagtgtactgcatcatcagctgcatcggctgcttcggcttgttctccaagatcctggatgaagtggagaagagacatcagatctccatggctgtcatctacccgttcatgcagggcctccgagaggcagccttccctgctcctgggaagactgtcactctcaagagcttcatccccgactcaggcactgagttcatttcactgacacggcccctggactcccacctagaacatgtggattttagttctctattgcactgtctcagttttgaacagatacttcagatctttgcctctgccgtgctggagagaaaaatcatcttcctggcggaaggtctcagcaccttgtctcagtgcatccatgctgctgccgcactgctctaccccttcagctgggcgcacacctacatccctgttgtccctgagagccttctggccaccgtctgctgccccacccccttcatggttggagtacaaatgcgcttccagcaggaggtcatggacagccctatggaagaggtcctgctggtcaatctttgtgaaggaaccttcttaatgtcggttggtgatgaaaaagacatcctgccaccgaagcttcaggatgacatcttagactctcttggtcaggggatcaatgagttaaagactgcagaacaaatcaacgagcatgtttcaggcccctttgtgcagttctttgtcaagattgtgggccattatgcttcctatatcaagcgggaggcaaatgggcaaggccacttccaagaaagatccttctgtaaggctctgacctccaagaccaaccgccgatttgtgaagaagtttgtgaagacacagctcttctcacttttcatccaggaagccgagaagagcaagaatcctcctgcaggctatttccaacagaaaatacttgaatatgaggaacagaagaaacagaagaaaccaagggaaaaaactgtgaaataagagctgtggtgaataagaatgactagagctacacaccatttctggacttcagcccctgccagtgtggcaggatcagcaaaactgtcagctcccaaaatccatatcctcactctgagtcttggtatccaggtattgcttcaaactggtgtctgagatttggatccctggtattgatttctcaggactttggagggctctgacaccatgctcacagaactgggctcagagctccattttttgcagaggtgacacaggtaggaaacagtagtacatgtgttgtagacacttggttagaagctgctgcaactgccctctcccatcattataacatcttcaacacagaacacactttgtggtcgaaaggctcagcctctctacatgaagtctgtggacatgtaaggacgagagtaaagaggaaaatcttattttta

SEQ ID NO: 370486 - DNA, 1049 bp, Homo sapiens
ccagaggggaatggtgagaaaggagaatgctagataggaaatgagaactgaagatattgattttgttgctacctgggctgaaagatacagccacaggcagaaatcaagacggtaaatcctctgggggtctatgaagaaagaggaccagagaaagccagtctatgtttatttcaggtcctgctggtcaatctttgtgaaggaaccttcttaatgtcggttggtgatgaaaaagacatcctgccaccgaagcttcaggatgacatcttagactctcttggtcaggggatcaatgagttaaagactgcagaacaaatcaacgagcatgtttcaggcccctttgtgcagttctttgtcaagattgtgggccattatgcttcctatatcaagcgggaggcaaatgggcaaggccacttccaagaaagatccttctgtaaggctctgacctccaagaccaaccgccgatttgtgaagaagtttgtgaagacacagctcttctcacttttcatccaggaagccgagaagagcaagaatcctcctgcaggctatttccaacagaaaatacttgaatatgaggaacagaagaaacagaagaaaccaagggaaaaaactgtgaaataagagctgtggtgaataagaatgactagagctacacaccatttctggacttcagcccctgccagtgtggcaggatcagcaaaactgtcagctcccaaaatccatatcctcactctgagtcttggtatccaggtattgcttcaaactggtgtctgagatttggatccctggtattgatttctcaggactttggagggctctgacaccatgctcacagaactgggctcagagctccattttttgcagaggtgacacaggtaggaaacagtagtacatgtgttgtagacacttggttagaagctgctgcaactgccctctcccatcattataacatcttcaacacagaacacactttgtggtcgaaaggctcagcctctctacatgaagtctgtggacatgtaaggacgagagtaaagaggaaaatcttattttta

SEQ ID NO: 370487 - DNA, 3263 bp, Homo sapiens
ggtttttaagagctggtcatgccctctctggggctagtgtggtcacagtcacatgccctttgagcctgttcttattcacttagtatgaactaaactctcaggccatattgttccaggactgccagaagcacccgacaggttaggcagtctctgtggtaccctggggccttggcctccatgtggcctctccagcacatttccgtggcttctgtgtcagtggtttctttcctctgcttggctccccatggtttcaagtctaccagggcaggtgtggaaactgcccatttggccctgatcctgagtgactggtggttctggccagtatccaggaccaccccaggacaattcaggggaagctttaaaggaaccagaaagggcccaggagcactctttgcccaactttgctggggggcagcacttctttgaataccttcttgtggtttctctcaaaaagaagcgttcagaggatgattacgagcctataatcacctaccaatttcccaagcgggagaacctgcttcggggtcagcaggaggaggaggagcggctgctcaaagctatccccttgttctgcttcccagatgggaatgagtgggcatcactcaccgagtatcccagggagaccttctccttcgttctgaccaatgtggatgggagcagaaagattggatactgcaggcgcctcttgcctgccggccctggccctcgccttcccaaagtgtactgcatcatcagctgcatcggctgcttcggcttgttctccaagatcctggatgaagtggagaagagacatcagatctccatggctgtcatctacccgttcatgcagggcctccgagaggcagccttccctgctcctgggaagactgtcactctcaagagcttcatccccgactcaggcactgagttcatttcactgacacggcccctggactcccacctagaacatgtggattttagttctctattgcactgtctcagttttgaacagatacttcagatctttgcctctgccgtgctggagagaaaaatcatcttcctggcggaaggtctcagcaccttgtctcagtgcatccatgctgctgccgcactgctctaccccttcagctgggcgcacacctacatccctgttgtccctgagagccttctggccaccgtctgctgccccacccccttcatggttggagtacaaatgcgcttccagcaggaggtcatggacagccctatggaagaggtcctgctggtcaatctttgtgaaggaaccttcttaatgtcggttggtgatgaaaaagacatcctgccaccgaagcttcaggatgacatcttagactctcttggtcaggggatcaatgagttaaagactgcagaacaaatcaacgagcatgtttcaggcccctttgtgcagttctttgtcaagattgtgggccattatgcttcctatatcaagcgggaggcaaatgggcaaggccacttccaagaaagatccttctgtaaggctctgacctccaagaccaaccgccgatttgtgaagaagtttgtgaagacacagctcttctcacttttcatccaggaagccgagaagagcaagaatcctcctgcaggctatttccaacagaaaatacttgaatatgaggaacagaagaaacagaagaaaccaagggaaaaaactgtgaaataagagctgtggtgaataagaatgactagagctacacaccatttctggacttcagcccctgccagtgtggcaggatcagcaaaactgtcagctcccaaaatccatatcctcactctgagtcttggtatccaggtattgcttcaaactggtgtctgagatttggatccctggtattgatttctcaggactttggagggctctgacaccatgctcacagaactgggctcagagctccattttttgcagaggtgacacaggtaggaaacagtagtacatgtgttgtagacacttggttagaagctgctgcaactgccctctcccatcattataacatcttcaacacagaacacactttgtggtcgaaaggctcagcctctctacatgaagtctgtggacatgtaaggacgagagtaaagaggaaaatcttatttttatatgtgtctttggcttttactatgggtaaaagtattttcctcgtggaaaataaggcaatgaatatgacaatcaagtggactacaagtggaagacctggccatggggatatgtttggagtgatagaatcatggggggcagcagctctacttcttctaaccggaagggtaagagatactggtaaaagcagcagcagcactggacacagggcatctaagtccttggtttggagtcaggtgtgctttccagaatcctgggaggagaggctgctcactgaagggaagcagcttcagtctagagtaatttgaggataggaatttcagtcaacagcagcctgtgaagaacactacatggcttccatacgtaggtctgtttccccatcactttcagtttgcactagtcctttaccttcagtcttggacatcctacctccaactgatctttattttgagcagcacagtccaattctttaactaaaggtgaagggatcgctgcactgacgttcttcccctttgagaaaagaatcgtaattttaagagtctgaaggagtttagtggtcacctagtctctcctcccttgatacctctactgatactttctactcaagcattgggaagcttttttagaagaatcttatcttcactatacaaagaacacaaaagtttctggagggtggaaccggggcatactgaagttcaagccaatgtaatttgcttttgggagtgcagagacctactgcaggtggcagatgtcccactgtccacacaccgtgcttagctacactactattcttcacagcttctaggaattacatttttttttggtagtttatggcagtggtgcctaaatatagttgtacctccaaaggtttcagaacaggaactggaatcctgagaatcttgtgaaaatatcctcttatgcctcatcacaaatacaccaaatcatctctagtgataggacctggaaatctgtactttcttaaaaggttcttcaggtaaggtttgctgaggtttattacaaatgtacccttgatttgatgctaatgctgtatttagggctgaaggaagcacacactaaatatctgagtgcttttcagattccatctatgctgaaaaagaatctaggagaataaacacatttcaattagcccttaaca

SEQ ID NO: 370488 - DNA, 929 bp, Homo sapiens
gccctgcccagggcgagggcagagcgggcccgcccaggtgcgcccgggggttgggccggagtccggaaggtgcgccgcgccgccccgaacctgtcccctaggcctccccccgcgtgaaagtgaaagtgtcggacccgcggaggtcaaggataggggggcggggccagcgcggagctgggagcgggagccgggcactccaggggccatggatgggctcggccgccgccttcgagccagcctgagactgaagcgcggccatggggggggttagtgccggccggggagagcgcggggggacggcgtgggcaccggggagccggggctagggctggcggctggggcccggtggagggcggcacggggcgtcgagatccgggagcagttggaaggggactcaggaggctgcgcgggggcaggaccaccccaggacaattcaggggaagctttaaaggaaccagaaagggcccaggagcactctttgcccaactttgctggggggcagcacttctttgaataccttcttgtggtttctctcaaaaagaagcgttcagaggatgattacgagcctataatcacctaccaatttcccaaggtaaggactgaaggaggggcagggccagccagaggactggggtgtttggaaggtggtaggggtgggggttccacctccttctccctaccctaccggggcttgagcctggagctgccctgagctctgagctcactgctctccatttccttcttagcacagccccagttctctgttatcacccacagaatctaggtctaacttctttgtgagggactgacctaggcttcctagcagggaaactaggctagacattttgccttttaggggacctgataggtcttccaaatcccattttcagtcacccttctctgcagagaagcttaccttctgccagaac

SEQ ID NO: 370489 - DNA, 382 bp, Homo sapiens
gcccttggggaggctgcagcactgaaggagcctctctgtccctccccagcctgccggccctggccctcgccttcccaaagtgtactgcatcatcagctgcatcggctgcttcggcttgttctccaaggtagggataggattcctcagggcctgcccatattccaggctgtctctggctgccaaccctgcctgtgcaactaagctcttagtggagctcttctcccatagccagagtcagcattaaagcacacttgggaaaactgaggcaaaggggcatgcacttgacttaagggaaaagtggaaattgaatctaggggactggacctcttgcagagacagctactgttcccactctagccaagtaagaaagtagttgaagtag

SEQ ID NO: 370490 - DNA, 194 bp, Homo sapiens
ccagtctatgtttatttcaggtcctgctggtcaatctttgtgaaggaaccttcttaatgtcggtaagtgtctgggttcagatcccctgcaggcctatcaacaactctaccactctagtttcatccatgttccacttatttaaacaaacatttaagttctttgttgagtgagaatctgtgctaaaaagaccacat

SEQ ID NO: 370491 - DNA, 519 bp, Homo sapiens
gtttttctaatagaaaattgtacataagatgttgcaagcatgaaaaaaataaaaagatgttggtctctgttctagagagcagggagttgaaggggaattgtagagagaggaatgcaatctcaagaatatcagtctaggcttggaaaaaaattggttctcttattagcagcatagtatgacctcgggcagcttctttgggtctgtttcctcatcttcaaaatggagattgtatctgcctcacgggactgttgcttgagatcaaacgtgtaaagcacttatgtgaacaatgtactaaatgctccatgtagaagcaatttctgcagtcaatgttttattaagggagtgactggctgtgatttctccatcttgtatttcccttctaccttagctctttctcctactcccttcctacaaacacccacaccctttcctcaggaatggaactgagatctccagaggggaatggtgagaaaggagaatgctagataggaaatgagaactgaagatattgattttgtt

SEQ ID NO: 370492 - DNA, 2109 bp, Homo sapiens
ggtttttaagagctggtcatgccctctctggggctagtgtggtcacagtcacatgccctttgagcctgttcttattcacttagtatgaactaaactctcaggccatattgttccaggactgccagaagcacccgacaggttaggcagtctctgtggtaccctggggccttggcctccatgtggcctctccagcacatttccgtggcttctgtgtcagtggtttctttcctctgcttggctccccatggtttcaagtctaccagggcaggtgtggaaactgcccatttggccctgatcctgagtgactggtggttctggccagtatccaggaccaccccaggacaattcaggggaagctttaaaggaaccagaaagggcccaggagcactctttgcccaactttgctggggggcagcacttctttgaataccttcttgtggtttctctcaaaaagaagcgttcagaggatgattacgagcctataatcacctaccaatttcccaagcgggagaacctgcttcggggtcagcaggaggaggaggagcggctgctcaaagctatccccttgttctgcttcccagatgggaatgagtgggcatcactcaccgagtatcccagggagaccttctccttcgttctgaccaatgtggatgggagcagaaagattggatactgcaggcgcctcttgcctgccggccctggccctcgccttcccaaagtgtactgcatcatcagctgcatcggctgcttcggcttgttctccaagatcctggatgaagtggagaagagacatcagatctccatggctgtcatctacccgttcatgcagggcctccgagaggcagccttccctgctcctgggaagactgtcactctcaagagcttcatccccgactcaggcactgagttcatttcactgacacggcccctggactcccacctagaacatgtggattttagttctctattgcactgtctcagttttgaacagatacttcagatctttgcctctgccgtgctggagagaaaaatcatcttcctggcggaaggtctcagcaccttgtctcagtgcatccatgctgctgccgcactgctctaccccttcagctgggcgcacacctacatccctgttgtccctgagagccttctggccaccgtctgctgccccacccccttcatggttggagtacaaatgcgcttccagcaggaggtcatggacagccctatggaagaggtcctgctggtcaatctttgtgaaggaaccttcttaatgtcggttggtgatgaaaaagacatcctgccaccgaagcttcaggatgacatcttagactctcttggtcaggggatcaatgagttaaagactgcagaacaaatcaacgagcatgtttcaggcccctttgtgcagttctttgtcaagattgtgggccattatgcttcctatatcaagcgggaggcaaatgggcaaggccacttccaagaaagatccttctgtaaggctctgacctccaagaccaaccgccgatttgtgaagaagtttgtgaagacacagctcttctcacttttcatccaggaagccgagaagagcaagaatcctcctgcaggctatttccaacagaaaatacttgaatatgaggaacagaagaaacagaagaaaccaagggaaaaaactgtgaaataagagctgtggtgaataagaatgactagagctacacaccatttctggacttcagcccctgccagtgtggcaggatcagcaaaactgtcagctcccaaaatccatatcctcactctgagtcttggtatccaggtattgcttcaaactggtgtctgagatttggatccctggtattgatttctcaggactttggagggctctgacaccatgctcacagaactgggctcagagctccattttttgcagaggtgacacaggtaggaaacagtagtacatgtgttgtagacacttggttagaagctgctgcaactgccctctcccatcattataacatcttcaacacagaacacactttgtggtcgaaaggctcagcctctctacatgaagtctgtggacatgtaaggacgagagtaaagaggaaaatcttattttta

SEQ ID NO: 370493 - DNA, 3317 bp, Homo sapiens
ggtttttaagagctggtcatgccctctctggggctagtgtggtcacagtcacatgccctttgagcctgttcttattcacttagtatgaactaaactctcaggccatattgttccaggactgccagaagcacccgacaggttaggcagtctctgtggtaccctggggccttggcctccatgtggcctctccagcacatttccgtggcttctgtgtcagtggtttctttcctctgcttggctccccatggtttcaagtctaccagggcaggtgtggaaactgcccatttggccctgatcctgagtgactggtggttctggccagtatccaggaccaccccaggacaattcaggggaagctttaaaggaaccagaaagggcccaggagcactctttgcccaactttgctggggggcagcacttctttgaataccttcttgtggtttctctcaaaaagaagcgttcagaggatgattacgagcctataatcacctaccaatttcccaagcgggagaacctgcttcggggtcagcaggaggaggaggagcggctgctcaaagctatccccttgttctgcttcccagatgggaatgagtgggcatcactcaccgagtatcccagggagaccttctccttcgttctgaccaatgtggatgggagcagaaagattggatactgcaggcgcctcttgcctgccggccctggccctcgccttcccaaagtgtactgcatcatcagctgcatcggctgcttcggcttgttctccaagatcctggatgaagtggagaagagacatcagatctccatggctgtcatctacccgttcatgcagggcctccgagaggcagccttccctgctcctgggaagactgtcactctcaagagcttcatccccgactcaggcactgagttcatttcactgacacggcccctggactcccacctagaacatgtggattttagttctctattgcactgtctcagttttgaacagatacttcagatctttgcctctgccgtgctggagagaaaaatcatcttcctggcggaaggtctcagcaccttgtctcagtgcatccatgctgctgccgcactgctctaccccttcagctgggcgcacacctacatccctgttgtccctgagagccttctggccaccgtctgctgccccacccccttcatggttggagtacaaatgcgcttccagcaggaggtcatggacagccctatggaagaggtcctgctggtcaatctttgtgaaggaaccttcttaatgtcggttggtgatgaaaaagacatcctgccaccgaagcttcaggatgacatcttagactctcttggtcaggggatcaatgagttaaagactgcagaacaaatcaacgagcatgtttcaggcccctttgtgcagttctttgtcaagattgtgggccattatgcttcctatatcaagcgggaggcaaatgggcaaggccacttccaagaaagatccttctgtaaggctctgacctccaagaccaaccgccgatttgtgaagaagtttgtgaagacacagctcttctcacttttcatccaggaagccgagaagagcaagaatcctcctgcaggctatttccaacagaaaatacttgaatatgaggaacagaagaaacagaagaaaccaagggaaaaaactgtgaaataagagctgtggtgaataagaatgactagagctacacaccatttctggacttcagcccctgccagtgtggcaggatcagcaaaactgtcagctcccaaaatccatatcctcactctgagtcttggtatccaggtattgcttcaaactggtgtctgagatttggatccctggtattgatttctcaggactttggagggctctgacaccatgctcacagaactgggctcagagctccattttttgcagaggtgacacaggtaggaaacagtagtacatgtgttgtagacacttggttagaagctgctgcaactgccctctcccatcattataacatcttcaacacagaacacactttgtggtcgaaaggctcagcctctctacatgaagtctgtggacatgtaaggacgagagtaaagaggaaaatcttatttttatatgtgtctttggcttttactatgggtaaaagtattttcctcgtggaaaataaggcaatgaatatgacaatcaagtggactacaagtggaagacctggccatggggatatgtttggagtgatagaatcatggggggcagcagctctacttcttctaaccggaagggtaagagatactggtaaaagcagcagcagcactggacacagggcatctaagtccttggtttggagtcaggtgtgctttccagaatcctgggaggagaggctgctcactgaagggaagcagcttcagtctagagtaatttgaggataggaatttcagtcaacagcagcctgtgaagaacactacatggcttccatacgtaggtctgtttccccatcactttcagtttgcactagtcctttaccttcagtcttggacatcctacctccaactgatctttattttgagcagcacagtccaattctttaactaaaggtgaagggatcgctgcactgacgttcttcccctttgagaaaagaatcgtaattttaagagtctgaaggagtttagtggtcacctagtctctcctcccttgatacctctactgatactttctactcaagcattgggaagcttttttagaagaatcttatcttcaaaaattctaccttttttaatgtgtgtatttgtggccctcagaagttcctaaattctatacaaagaacacaaaagtttctggagggtggaaccggggcatactgaagttcaagccaatgtaatttgcttttgggagtgcagagacctactgcaggtggcagatgtcccactgtccacacaccgtgcttagctacactactattcttcacagcttctaggaattacatttttttttggtagtttatggcagtggtgcctaaatatagttgtacctccaaaggtttcagaacaggaactggaatcctgagaatcttgtgaaaatatcctcttatgcctcatcacaaatacaccaaatcatctctagtgataggacctggaaatctgtactttcttaaaaggttcttcaggtaaggtttgctgaggtttattacaaatgtacccttgatttgatgctaatgctgtatttagggctgaaggaagcacacactaaatatctgagtgcttttcagattccatctatgctgaaaaagaatctaggagaataaacacatttcaattagcccttaaca

SEQ ID NO: 370494 - DNA, 3263 bp, Homo sapiens
ggtttttaagagctggtcatgccctctctggggctagtgtggtcacagtcacatgccctttgagcctgttcttattcacttagtatgaactaaactctcaggccatattgttccaggactgccagaagcacccgacaggttaggcagtctctgtggtaccctggggccttggcctccatgtggcctctccagcacatttccgtggcttctgtgtcagtggtttctttcctctgcttggctccccatggtttcaagtctaccagggcaggtgtggaaactgcccatttggccctgatcctgagtgactggtggttctggccagtatccaggaccaccccaggacaattcaggggaagctttaaaggaaccagaaagggcccaggagcactctttgcccaactttgctggggggcagcacttctttgaataccttcttgtggtttctctcaaaaagaagcgttcagaggatgattacgagcctataatcacctaccaatttcccaagcgggagaacctgcttcggggtcagcaggaggaggaggagcggctgctcaaagctatccccttgttctgcttcccagatgggaatgagtgggcatcactcaccgagtatcccagggagaccttctccttcgttctgaccaatgtggatgggagcagaaagattggatactgcaggcgcctcttgcctgccggccctggccctcgccttcccaaagtgtactgcatcatcagctgcatcggctgcttcggcttgttctccaagatcctggatgaagtggagaagagacatcagatctccatggctgtcatctacccgttcatgcagggcctccgagaggcagccttccctgctcctgggaagactgtcactctcaagagcttcatccccgactcaggcactgagttcatttcactgacacggcccctggactcccacctagaacatgtggattttagttctctattgcactgtctcagttttgaacagatacttcagatctttgcctctgccgtgctggagagaaaaatcatcttcctggcggaaggtctcagcaccttgtctcagtgcatccatgctgctgccgcactgctctaccccttcagctgggcgcacacctacatccctgttgtccctgagagccttctggccaccgtctgctgccccacccccttcatggttggagtacaaatgcgcttccagcaggaggtcatggacagccctatggaagaggtcctgctggtcaatctttgtgaaggaaccttcttaatgtcggttggtgatgaaaaagacatcctgccaccgaagcttcaggatgacatcttagactctcttggtcaggggatcaatgagttaaagactgcagaacaaatcaacgagcatgtttcaggcccctttgtgcagttctttgtcaagattgtgggccattatgcttcctatatcaagcgggaggcaaatgggcaaggccacttccaagaaagatccttctgtaaggctctgacctccaagaccaaccgccgatttgtgaagaagtttgtgaagacacagctcttctcacttttcatccaggaagccgagaagagcaagaatcctcctgcaggctatttccaacagaaaatacttgaatatgaggaacagaagaaacagaagaaaccaagggaaaaaactgtgaaataagagctgtggtgaataagaatgactagagctacacaccatttctggacttcagcccctgccagtgtggcaggatcagcaaaactgtcagctcccaaaatccatatcctcactctgagtcttggtatccaggtattgcttcaaactggtgtctgagatttggatccctggtattgatttctcaggactttggagggctctgacaccatgctcacagaactgggctcagagctccattttttgcagaggtgacacaggtaggaaacagtagtacatgtgttgtagacacttggttagaagctgctgcaactgccctctcccatcattataacatcttcaacacagaacacactttgtggtcgaaaggctcagcctctctacatgaagtctgtggacatgtaaggacgagagtaaagaggaaaatcttatttttatatgtgtctttggcttttactatgggtaaaagtattttcctcgtggaaaataaggcaatgaatatgacaatcaagtggactacaagtggaagacctggccatggggatatgtttggagtgatagaatcatggggggcagcagctctacttcttctaaccggaagggtaagagatactggtaaaagcagcagcagcactggacacagggcatctaagtccttggtttggagtcaggtgtgctttccagaatcctgggaggagaggctgctcactgaagggaagcagcttcagtctagagtaatttgaggataggaatttcagtcaacagcagcctgtgaagaacactacatggcttccatacgtaggtctgtttccccatcactttcagtttgcactagtcctttaccttcagtcttggacatcctacctccaactgatctttattttgagcagcacagtccaattctttaactaaaggtgaagggatcgctgcactgacgttcttcccctttgagctcccttgatacctctactgatactttctactcaagcattgggaagcttttttagaagaatcttatcttcaaaaattctaccttttttaatgtgtgtatttgtggccctcagaagttcctaaattctatacaaagaacacaaaagtttctggagggtggaaccggggcatactgaagttcaagccaatgtaatttgcttttgggagtgcagagacctactgcaggtggcagatgtcccactgtccacacaccgtgcttagctacactactattcttcacagcttctaggaattacatttttttttggtagtttatggcagtggtgcctaaatatagttgtacctccaaaggtttcagaacaggaactggaatcctgagaatcttgtgaaaatatcctcttatgcctcatcacaaatacaccaaatcatctctagtgataggacctggaaatctgtactttcttaaaaggttcttcaggtaaggtttgctgaggtttattacaaatgtacccttgatttgatgctaatgctgtatttagggctgaaggaagcacacactaaatatctgagtgcttttcagattccatctatgctgaaaaagaatctaggagaataaacacatttcaattagcccttaaca

SEQ ID NO: 370495 - DNA, 398 bp, Homo sapiens
atggacagaatagagttcaaaaatggacccatgcatatatggacaattgatttttgacaaaggcacaatgagctgtgtgtggtggtgtgtgcctgtagtcccacgtgcttgggagactgagatgggaggatcacctgagcctggagaggttgaggctgcactgagctgtgattgcactccagtctgggcaaaagggtgagaccctgtctaaaaagaaaagaaaacaaaacaaaaaggcaccaaagcaaagaggaaaagcatcttttcaacaaatggaataagtatatattcatatgagaaatgaacctcgacttttacatcacatacataattttagtgaaaaatttagattttaaaatggatgatagacctaaacaaaagctaaacctagaaattct

SEQ ID NO: 370496 - DNA, 422 bp, Homo sapiens
gcagctcaggaagcctgtaatgtgggcataactctttggacctgatcttgatgcttctgctgctctgttggcctctgaagagcaatatctaatttattattactgtaattttttaaaaggctttaaagtgcctcaggggtcccctgaaactaattttctatttctgggattccctggattcattatatgagatggtgacatgattagaggaattcttttttagtatgaaaattgtcccttttcttcttcagtacttgcctccttgctggcattgaattaacacagggacaaaatttggttaattttttatttctaattcgcgcccttctaaaaaaaccccttttccctttccgccctcccaacaaacccctgttgcccagtatttatgtggtggcctttaaccacctgagggaaaaaatgag

SEQ ID NO: 370497 - DNA, 891 bp, Homo sapiens
cggaccgcgtgggtcgacccacgcgtccggacccacgcgtccgccaatgttcatatggaactaggtaattcactcttatgataaagagctattaaaatggctttgcttacaccttttaaaagttttcatgctgaaaaagaaatagtgtgatgttggagaaaagagatagaagtcggtggagaagtggtagtgatatacaaagtaatatgtacatttttttggataaaagaagcatatttcctatgaatgaacgacatcaaatatatactactctttaaaaatttgttttcactgaactgtatgattgctatctgcagatgttctagttaagctaaaaagtaaaaacttttttaactagtggcttttatataaaatgtgctcctgaagctacacaattttgaaagagtaacatttcttgctacaaaaactttcaaaggaatttatttaaaaaaatacaatctgtgaagattttagttgtgtgacgactattgctcacaccatcttttcattttatgctattaattgatatgtgggtaaaatgcaagattcttggttaaaagcttaccaaacttaaatttcactcatttatactgtatgtataacgaaaacataacgtctgatgttttcatcatgaatttgtttgtggtacatcaattcctatattgtctgatatttttccccttgctgttttcccttgtgttaacctgcaaagaacataggaaacactgtaaatcatattcctcattcactctattttataaagctttcatgtgtcactaaatttttcacagattatttcttacaaatttttggaagtgcgattagcctttataggttaagaatttacttttttttttttggcaaaaggtcatgtctcggtaattatttgta

SEQ ID NO: 370498 - DNA, 331 bp, Homo sapiens
tctgtcaactgtctacattcagcagtggaatggaacaggcacctgggattcataatagtaaaagggtcaggccatggggagcagtctgggtttgatggcttctttgccttccatcagtgctccttgccacctaccattggggacatcctccttcatcgtattactgcctcatgatggtctgtgaacccatctcacctaagttaagtaaacactgggcctcaacttaaggtgataccatcatcagagtaatccttaggagaaagtagataaatagaagatgaggcatgttatgtcctgaaagatggtcaactccttgtctaaagaactaggt

SEQ ID NO: 370499 - DNA, 479 bp, Homo sapiens
ctctgttctaacctattagaaatatttctaaaatgtgtcagtagctaggggctgcccctcccttcacaactattgtgcaaggagagggaaagggcatttgttaggcacctctattatctatccactcagttgcacttaaaggctgttctttcagtctctctggctgagctcccaccaggcgagaagccagtaagtgggatcaagccacgtgccccctctgatgatctgccttagctgattgagtagtcctaaatcaaccagaggaaatgacagtctgtcagaacaaaaggcatgtatgttatgagcccgaagtcactgtggaggcctcaaaagacaccaattttgagcagaatattttggattctctctctgtgagacctgtagcaacagagacctgcactggcatttggtgtttccattccagttgtagcactgggatagcctttgacctttctttcaaagtaccttatcacaaaaaa

SEQ ID NO: 370500 - DNA, 338 bp, Homo sapiens
cctggactgcggaccctgctttctaccattgagccacattcccctgggaccctaactacatttgtcagccagctgaatgaagcagatttggaattgtcagtccagctgttttgttggctttgattcgctacaatagaaatgccagcacctgcaatgtcttcctgacattgcaaagcaggacttcctgagggagggtagggaatggggtgtagtcagtccataggctaaaccatcatagactacttaggagttattttgtgagaaccaatatcttgactaaatggaaccaatcttgttaggtttaaataatctttctttgaattatgcttctactttaa

SEQ ID NO: 370501 - DNA, 427 bp, Homo sapiens
ctaaagtcccataactagtgataatttagcatatagcagctgttgtacctttaacttacacaatgtgaaaaaaactagcattccaattgagtctgcttttccacttttgcccattgcgattgggtctgcttttccacttttgcccttccacagggcacatgaaatggaaaaactgcattggcaactttgccggtggtcatatgactgactcttggctggtctcactttgttgctcttggctgaggaagacacattttaaatgttgcatgctatgtgactaagtctcctgagaaaatcaccctaattactgtatggtcaaaacacactgtactgtatttttgatgactgtgacttcattttatactttttaaataatgtgcaagtctcttcaacttgaataaattagattacaaattacaaaaaaagt

SEQ ID NO: 370502 - DNA, 1389 bp, Homo sapiens
ggggaagcgagaggcatctaagcaggcagtgttttgccttcaccccaagtgaccatgagaggtgccacgcgagtctcaatcatgctcctcctagtaactgtgtctgactgtgctgtgatcacaggggcctgtgagcgggatgtccagtgtggggcaggcacctgctgtgccatcagcctgtggcttcgagggctgcggatgtgcaccccgctggggcgggaaggcgaggagtgccaccccggcagccacaaggtccccttcttcaggaaacgcaagcaccacacctgtccttgcttgcccaacctgctgtgctccaggttcccggacggcaggtaccgctgctccatggacttgaagaacatcaatttttaggcgcttgcctggtctcaggatacccaccatccttttcctgagcacagcctggatttttatttctgccatgaaacccagctcccatgactctcccagtccctacactgactaccctgatctctcttgtctagtacgcacatatgcacacaggcagacatacctcccatcatgacatggtccccaggctggcctgaggatgtcacagcttgaggctgtggtgtgaaaggtggccagcctggttctcttccctgctcaggctgccagagaggtggtaaatggcagaaaggacattccccctcccctccccaggtgacctgctctctttcctgggccctgcccctctccccacatgtatccctcggtctgaattagacattcctgggcacaggctcttgggtgcattgctcagagtcccaggtcctggcctgaccctcaggcccttcacgtgaggtctgtgaggaccaatttgtgggtagttcatcttccctcgattggttaactccttagtttcagaccacagactcaagattggctcttcccagagggcagcagacagtcaccccaaggcaggtgtagggagcccagggaggccaatcagccccctgaagactctggtcccagtcagcctgtggcttgtggcctgtgacctgtgaccttctgccagaattgtcatgcctctgaggccccctcttaccacactttaccagttaaccactgaagcccccaattcccacagcttttccattaaaatgcaaatggtggtggttcaatctaatctgatattgacatattagaaggcaattagggtgtttccttaaacaactcctttccaaggatcagccctgagagcaggttggtgactttgaggagggcagtcctctgtccagattggggtgggagcaagggacagggagcagggcaggggctgaaaggggcactgattcagaccagggaggcaactacacaccaacctgctggctttagaataaaagcaccaactgaactgaaaaaaaaaat

SEQ ID NO: 370503 - DNA, 1254 bp, Homo sapiens
ggggaagcgagaggcatctaagcaggcagtgttttgccttcaccccaagtgaccatgagaggtgccacgcgagtctcaatcatgctcctcctagtaactgtgtctgactgtgctgtgatcacaggggcctgtgagcgggatgtccagtgtggggcaggcacctgctgtgccatcagcctgtggcttcgagggctgcggatgtgcaccccgctggggcgggaaggcgaggagtgccaccccggcagccacaaggtccccttcttcaggaaacgcaagcaccacacctgtccttgcttgcccaacctgctgtgctccaggttcccggacggcaggtaccgctgctccatggacttgaagaacatcaatttttaggcgcttgcctggtctcaggatacccaccatccttttcctgagcacagcctggatttttatttctgccatgaaacccagctcccatgactctcccagtccctacactgactaccctgatctctcttgtctagtacgcacatatgcacacaggcagacatacctcccatcatgacatggtccccaggctggcctgaggatgtcacagcttgaggctgtggtgtgaaaggtggccagcctggttctcttccctgctcaggctgccagagaggtggtaaatggcagaaaggacattccccctcccctccccaggtgacctgctctctttcctgggccctgcccctctccccacatgtatccctcggtctgaattagacattcctgggcacaggctcttgggtgcattgctcagagtcccaggtcctggcctgaccctcaggcccttcacgtgaggtctgtgaggaccaatttgtgggtagttcatcttccctcgattggttaactccttagtttcagaccacagactcaagattggctcttcccagagggcagcagacagtcaccccaaggcaggtgtagggagcccagggaggccaatcagccccctgaagactctggtcccagtcagcctgtggcttgtggcctgtgacctgtgaccttctgccagaattgtcatgcctctgaggccccctcttaccacactttaccagttaaccactgaagcccccaattcccacagcttttccattaaaatgcaaatggtggtggttcaatctaatctgatattgacatattagaaggcaattagggtgtttccttaaaggcaactacacaccaacctgctggctttagaataaaagcaccaactgaactgaaaaaaaaaat

SEQ ID NO: 370504 - DNA, 1302 bp, Homo sapiens
ggggaagcgagaggcatctaagcaggcagtgttttgccttcaccccaagtgaccatgagaggtgccacgcgagtctcaatcatgctcctcctagtaactgtgtctgactgtgctgtgatcacaggggcctgtgagcgggatgtccagtgtggggcaggcacctgctgtgccatcagcctgtggcttcgagggctgcggatgtgcaccccgctggggcgggaaggcgaggagtgccaccccggcagccacaaggtccccttcttcaggaaacgcaagcaccacacctgtccttgcttgcccaacctgctgtgctccaggttcccggacggcaggtaccgctgctccatggacttgaagaacatcaatttttaggcgcttgcctggtctcaggatacccaccatccttttcctgagcacagcctggatttttatttctgccatgaaacccagctcccatgactctcccagtccctacactgactaccctgatctctcttgtctagtacgcacatatgcacacaggcagacatacctcccatcatgacatggtccccaggctggcctgaggatgtcacagcttgaggctgtggtgtgaaaggtggccagcctggttctcttccctgctcaggctgccagagaggtggtaaatggcagaaaggacattccccctcccctccccaggtgacctgctctctttcctgggccctgcccctctccccacatgtatccctcggtctgaattagacattcctgggcacaggctcttgggtgcattgctcagagtcccaggtcctggcctgaccctcaggcccttcacgtgaggtctgtgaggaccaatttgtgggtagttcatcttccctcgattggttaactccttagtttcagaccacagactcaagattggctcttcccagagggcagcagacagtcaccccaaggcaggtgtagggagcccagggaggccaatcagccccctgaagactctggtcccagtcagcctgtggcttgtggcctgtgacctgtgaccttctgccagaattgtcatgcctctgaggccccctcttaccacactttaccagttaaccactgaagcccccaattcccacagcttttccattaaaatgcaaatggtggtggttcaatctaatctgatattgacatattagaaggcaattagggtgtttccttaaacaactcctttccaaggatcagccctgagagcaggttggtgactttgaaggcaactacacaccaacctgctggctttagaataaaagcaccaactgaactgaaaaaaaaaat

SEQ ID NO: 370505 - DNA, 1021 bp, Homo sapiens
ggggaagcgagaggcatctaagcaggcagtgttttgccttcaccccaagtgaccatgagaggtgccacgcgagtctcaatcatgctcctcctagtaactgtgtctgactgtgctgtgatcacaggggcctgtgagcgggatgtccagtgtggggcaggcacctgctgtgccatcagcctgtggcttcgagggctgcggatgtgcaccccgctggggcgggaaggcgaggagtgccaccccggcagccacaaggtccccttcttcaggaaacgcaagcaccacacctgtccttgcttgcccaacctgctgtgctccaggttcccggacggcaggtaccgctgctccatggacttgaagaacatcaatttttaggcgcttgcctggtctcaggatacccaccatccttttcctgagcacagcctggatttttatttctgccatgaaacccagctcccatgactctcccagtccctacactgactaccctgatctctcttgtctagtacgcacatatgcacacaggcagacatacctcccatcatgacatggtccccaggctggcctgaggatgtcacagcttgaggctgtggtgtgaaaggtggccagcctggttctcttccctgctcaggctgccagagaggtggtaaatggcagaaaggacattccccctcccctccccaggtgacctgccctcttaccacactttaccagttaaccactgaagcccccaattcccacagcttttccattaaaatgcaaatggtggtggttcaatctaatctgatattgacatattagaaggcaattagggtgtttccttaaacaactcctttccaaggatcagccctgagagcaggttggtgactttgaggagggcagtcctctgtccagattggggtgggagcaagggacagggagcagggcaggggctgaaaggggcactgattcagaccagggaggcaactacacaccaacctgctggctttagaataaaagcaccaactgaactgaaaaaaaaaat

SEQ ID NO: 370506 - DNA, 301 bp, Homo sapiens
tacatatggttattcgttctgttaaaatcacagtcccataagctcaattcacattcatatttaaaacactagttataaaaaaaaaactatgtctatcatgattcaaagtttcagaatccaactaaactcatgcttttatgagttcaaaataaaaactgaaattttcattaattcataattgattacgaaagtcatctctttacttctacaatatgttatgagatagggaacaactgctgtaccttcctctaatcactccctttgctcgaaaaaggcaagtacatcagaaagcttcatgtaa

SEQ ID NO: 370507 - DNA, 2437 bp, Homo sapiens
ggatggagaacacagcatatatgagaggtgggagggcagagacgccttgcaattcctgtgaggagggacttaccgtctcctccaaaacagaaattcagtgctgcagagacggtagcaaagtgcagttctcttgttaaaacacaggctaaaagcagtgactgcttaacttattaagcagagaaaaccaaaatgtcattttcaaccaaaattgagtgttagagtttatggtctctgttatgatacttttcaagacctgggaaatatttgtatcctttagtgaaaaggggaagaatcaattactgaaagccataagcttacagtaacggagccaattaatcctttgtcatctttgttgagtttagttttcttctgttcttagcacgtcagctagtagatctttgatgaactgttgctcctctttaaatgtttcttttattatattgatgatgtgcactcattcagtattcttattttaagctgcagtaatcactgtacatttgattgccatctgtacttcccttgaagcagctttgcttattacagccacacctgcatctgttttgactagcccacataacctacacatttttcatccaaagctatcccattaccttatttatgtccatttattttcatatatagtatctgccaaaatagtagcaaaagttttatcaatgtgtagatttcaatcagaaaaacctaagcaaaaggaaaaaaaagtgatattctaaaagccacacttcttttatcaccagtgcagttttttccatcatcataaacttagttttatgaaaatgttaatatcttggatttaaacattggggtagaaatcaggacaaaatttaaatgtcatatccaggacttaatctcagatattctggtagaagatatttagataaggttgtggctgcctgtcaagttttttaattttttaaattatataatgtcagaaaattaaatcacaaatgagccttccagattgtgaggaaaattacttggctgaaaatgactttgcataatgcccaaatcttgaagtatctgctcagatgtttgttccatctgaaatgctgccaaatccatctgtattgaggaaagagctatgaggtagtttcagagaaagtgaaaacaaaacaaagcaaaacaaaaatgctattacagaagttggacagcccaatgtgttaagtattatacacctggaacaagagcagcaaaactgaagctctttggaaagttatggcaacagtggtctgggaattctgggcctttagaaataatcattcccagtgatacagggatgtgcagcatccagacactgcttaatcacagtgagctgccgtcttccctgaataagttgtatcttataacattgaagtgaatgaaaatgtattagtatttgagaatttactattccttcacctccttgcacatgtaaattaaagatgttttggaaaatatgagaacttgatgttcactgccctagagcactattctccaaccttttagattcctgcaatctgttaataaaatattgtaggacaacaactctatagactgatacatgctgctctcaatccatatactacatattaggacagcttttcttttctaaatgagcatgaatataaatagaaattctagtattttcttcacctaccccagtgaatcatctttatattttacttgggaaactgctacagttggctagtgggtcttcacttttattgctttgagaaatggataaaagacatagactatcacccctccaaaaatgtgcatatggccccatacaagacacatgtactgccagagcttggggaactccctagaatctactcctagaccaccctagtgaagtaccatagaccatattgtctagatgggacaaaataataaattttgactaagaacttactgtttagagagaaaaaatagtaaataatgttcaaaatgagaagacaataactgacaagtctgtgatttttgggttagatgagaccacttttgatttttgaggaataaaaggagttagttttttggtcctgatgtgtaaaatgattcatggggtttcacatacagacaagtagttttcttttcagcaaatatttaacatatctctcaatatatttttcaccagtttttggtaaatatgcattgctataggtataccaagttttttttgttatgtttagtaactaatttcattttttctgtatatgtaaatatagctattggaccctgcattgaaaaccttcttagtactaacaacactccttttattattaccttcatagttactttaaatgacatatttatttcgagttttacttctggctgagttgcaaagtctatgagaatgttacctcctgtctcagaagcttgttagttattgtgccacctaaatattgtaataaaagtgtttaaataaaaatcttcttaa

SEQ ID NO: 370508 - DNA, 575 bp, Homo sapiens
aagatgttcagatttgctgcatttgttttggaatgagtgcctggtgttgcttgtgcacaccccaagcctcctggcctttccaggtttccctgttgaacaggcagctctcctgcggttgggtggcacagggctgtggtgagggccccagcatccctcctcacctgggtgctcagttcctttcttgtcatcctttctctgtttgtaaagcagaaacagtcctgctaacatcacccccttcaaagatgtatgcagaatttgattttttttcctggaaaatatacttttttagtgtttaagaaaaaactcgtgctgggcatggtagctcatgcctgtaatcccagcactttgggaggctgaggcaggagaattgcttgagcccagaagttcgagaccagcttgggcaacatagtgagactccactgggcatggtggtgcacacacctgtaccagctgctcaggagcctgcaggcaggaggatcacttgagcccaggaggtggcagctgcagtgagccacgatcttgccactacactcaaacctgggcgacacggggagatcctatcttaaaaacaaaag

SEQ ID NO: 370509 - DNA, 998 bp, Homo sapiens
tttcagtacactgctctttattttggtccataaaaggagatcttgtgcttagttttggtggtaaactcagctttagcagctttgaaatgcagattagatcaattacatcacaattatatttgaaaattgaaaaacagcattatccaaaagtcaaattccaaatttatgccttttcaaaggaagtgtcatttggaaagaaactgattcacaccatgaaatatgtggcatttcttttggtttccagtctcttctatagtagtagaaggctcatgtgatatgcagacatgtgcttaatcaaatttagctttccttttcaagttaagaaaatgtatatgaagtatttctgagataaaaagaggcacagtctttttttttttttttttagcacaaacatctcctatgctgctgcatttgtcttaattccttatttgaaaatttggctttgtttatgtaatgtacaaattcctattcacttaaaacaggaccagaatagcctggaaccctatagagctaaatgatattttagagtgctgatcctcattttctcttcggtaaagaacacaacacgattatttgtatttatcttgtcgtacacacactcaggattactcactgaggaatggggctcaagtttggttgcaagacttccatttactaggctgtgtgatgttgagcaagtcacttaatctctgaggtaaaatgaggggcctgttgcctaaaattccgtgcttctgtaatttaagtataattgacccagatgtttgatgattactttgaaaattgaaaaaagatgctagtggccataagaaatttgtaccactgtgccccgagtagtgcttctgaaatagtaacacagggagaaggttgggaggccccttctttgtcatttacatagggtttgtttgtctgaagtagcagatgccaagtgttaggggtccaaagatgctaccagaattagaggagatggagaaaaggctaacggaattttcttaattcga

SEQ ID NO: 370510 - DNA, 352 bp, Homo sapiens
gcccagatgtgaggctggcatttgaagtttgcaggctctggggctcccacgggttggtcacactgtgggctgcctggcctcacagcctcgtcagccactcttcccacccctttggggacactgcccacccctgtggggactgccgcctttctgctggctgtgtgtggctttggtttagctcgatgggggttttgaaatgggttttccgtgaagttgattgaggaattggcagaaggctcactgtgtttagcgaaaatggattttagttgaagatgcagccaggtaactcaaactttgggatggctttactgacccttgttttattatcatacttgtcaaatgtagggactgc

SEQ ID NO: 370511 - DNA, 456 bp, Homo sapiens
gcacagcatggacaccacttcatgtaggggcactggactgcctagagttggaggaagggacccttatgtgtctccagaagccttcctttccattcctgtggggtctgacagttgttggaagaaggcctgcaggtccagggccgagcaggggcctccaccgtctgctgaggaacttactgtgtctctgtttgattgagcctgggcatgagataaaacacgaggtcatctgcaatggcactggtgctgtggctgtatcagcatggctctgatgtcccttcggggcaggcaacagttcagggaggacttacaagcaagctctggaacttgaagtctcaagagatgacaaatagtcaattctcaaaaaatgaagaaaagaaaaacttgtttcttcatgtttgctaaccctatctatatctatggttttggccaataaattcactgtgtttaaatcctcat

SEQ ID NO: 370512 - DNA, 1038 bp, Homo sapiens
gctgacaatctgcctcaaacacaaacacatgacaaatatagttctgcagtgaagactttagccccacggggaaagctgagactcaggagcctgatggcataaacaaggcgaaaggcttggtagcaaatcagaagacttgtttttggaagctgaaaacttacttcggcaacaacagtcctccatggctccctgtttgtgctcttgctggccaggcctgggaagccctcttggggcctctgaggcttgtaaccagccctgcttagataatccttacagcagcagctctgcacagtatcattctcccctgtacaaatgaagagacggaagctcgaattctcacacgacacccttgcagcacttgaaccactccaggattctcttctgctggtcacccaactattctcccaggtcaccggggttacttacaatcttggatttagggttgccagatttagcaaataaaaatacagcatgcctggttaaatttgaatttcaggtaaacagataaaattttagtataagtatgtcccatgcaatatttgggacatacattcaaaagacaattcattctcctgtatttcatctggcaatcctacttgaattccatttgtagagttctccctgttccattagaaatgatcacacttggaaacattggatggttctatcccatttcctgacaaatggtgctccccgcacattctctaaatcagaggcatcaagtattcgccagggtgtgtttgaaatagcactatgtgcatcctccttaaaaatgagaatctatgcatttatttcagcttagatctgtaaatattttatttgctgctgctactgagttaaaacccccagtttcatcatgttctgactggcaagtgtttgaagtgtctgattttaaaacagctctagttctcttttaattagatatttaatttaactggctgctgatcaatagtttcaggatatttgttttcagcttgatgggaatggcaaaggaccatttgtgcataaaatagcccactagttatccttgttttcagt

SEQ ID NO: 370513 - DNA, 463 bp, Homo sapiens
tctttggctttgctacctctcttcccttcccattgtttttcctcccccctcctaggttctcacatcgctttcctgtttccctctcctgcaatatggatttgacatattaatcattacagcaactgctaaaattccactgtgcttcattaatccggaggaaaataccatgtcagctggaacttactgtgtctctgtttgattgagcctgggcatgagataaaacacgaggtcatctgcaatggcactggtgctgtggctgtatcagcatggctctgatgtcccttcggggcaggcaacagttcagggaggacttacaagcaagctctggaacttgaagtctcaagagatgacaaatagtcaattctcaaaaaatgaagaaaagaaaaacttgtttcttcatgtttgctaaccctatctatatctatggttttggccaataaattcactgtgtttaaatcctcat

SEQ ID NO: 370514 - DNA, 623 bp, Homo sapiens
gcacagcatggacaccacttcatgtaggggcactggactgcctagagttggaggaagggaccctgttctcacatcgctttcctgtttccctctcctgcaatatggatttgacatattaatcattacagcaactgctaaaattccactgtgcttcattaatccggaggaaaataccatgtcagctggaacttactgtgtctctgtttgattgagcctgggcatgagataaaacacgaggtcatctgcaatggcactggtgctgtggctgtatcagcatggctctgatgtcccttcggggcaggcaacagttcagggaggacttacaagcaagctctgatggagtctcgctctgtcgcccaggctggagtgcagtggtgtgatctcggctcactgaacttcccctccccagttcaagcgattctcctgcctcagcctccctagtagctgggattacaggcccccaccaccatgcctggctaatttttaaatatttttagtggagatggggtttcaccatgttggccaggatggtcttgagctcctgacctcaagggatccacccgcctcggcctcccaaagcactgggattacaggtataagccaccgcgtccggcctactccca

SEQ ID NO: 370515 - DNA, 550 bp, Homo sapiens
gctgacaatctgcctcaaacacaaacacatgacaaatatagttctgcagtgaagactttagccccacggggaaagctgagactcaggagcctgatggcataaacaaggcgaaaggcttggtagcaaatcagaagacttgtttttggaagctgaaaacttacttcggcaacaacagtcctccatggctccctgtttgtgctcttgctggccaggcctgggaagccctcttggggcctctgaggcttgtaaccagccctgcttaggaacttactgtgtctctgtttgattgagcctgggcatgagataaaacacgaggtcatctgcaatggcactggtgctgtggctgtatcagcatggctctgatgtcccttcggggcaggcaacagttcagggaggacttacaagcaagctctggaacttgaagtctcaagagatgacaaatagtcaattctcaaaaaatgaagaaaagaaaaacttgtttcttcatgtttgctaaccctatctatatctatggttttggccaataaattcactgtgtttaaatcctcat

SEQ ID NO: 370516 - DNA, 444 bp, Homo sapiens
gcacagcatggacaccacttcatgtaggggcactggactgcctagagttggaggaagggaccctgttctcacatcgctttcctgtttccctctcctgcaatatggatttgacatattaatcattacagcaactgctaaaattccactgtgcttcattaatccggaggaaaataccatgtcagctgcctgggcatgagataaaacacgaggtcatctgcaatggcactggtgctgtggctgtatcagcatggctctgatgtcccttcggggcaggcaacagttcagggaggacttacaagcaagctctggaacttgaagtctcaagagatgacaaatagtcaattctcaaaaaatgaagaaaagaaaaacttgtttcttcatgtttgctaaccctatctatatctatggttttggccaataaattcactgtgtttaaatcctcat

SEQ ID NO: 370517 - DNA, 491 bp, Homo sapiens
gcacagcatggacaccacttcatgtaggggcactggactgcctagagttggaggaagggaccctgttctcacatcgctttcctgtttccctctcctgcaatatggatttgacatattaatcattacagcaactgctaaaattccactgtgcttcattaatccggaggaaaataccatgtcagctggtgctgtggggatactgcagcagctctctgtccttccagtgtctccagggaagaacatcttcctctcaagtgaacagtgcttaccgcttcaagcatccagtctcagcaataagaggagcacatctccaaatttataatgaaagacaagcaaagtgggacttcatggccttggctggacaccaagtgatagctaatttttgcagcagggaagacgaaataacaagtccctggattgcaattttggtttctccttctgttctcaaacaaaaaattgtttaaataataaactcttgtcttcatcataat

SEQ ID NO: 370518 - DNA, 517 bp, Homo sapiens
aacatcacgctgggtccgaccacaggatcttcacatgtgctgctccctctatctgcatcgctctttcctcttctcttgtttgcttaactcctatttaccctcgggcttaatcagcactttctcacctctcctagtctgttgctcttatttaagatcaaacagcagagaaatgtgaagtccactgacttccgggtggaacagggttcagtatgccaattaaattattgggtgctggctgggcacggtggctcacacctgtaatcccagcactttggaagggcaaggcgggtagatcacttgaggtcaggagtttgagaggacaacatgatgaaactccatctctactgaaacacaaaaattagctgggcttggtcgtgggcacctgtaatcccagctactcaggaggctgaggcaggagaatcacttggacgcaggagggggagggtgcagtgagccgagatcgcaccactgtactctagcctgagcgacagggtgactccatctcaaaaaaaaaaac

SEQ ID NO: 370519 - DNA, 413 bp, Homo sapiens
gcctaaagataatcgggattcccactcccatattcaagctgagtcacctgcaagctaccagaggaactgtgtctgggataatcaattccaccgcagggctcctcagtgacaggtctgtgtgagatcatcaccaaagccaaaaccatccctcaggcactcaaaaaccccatcctggggacacagccttgcccggtctcttcttccaggttcatatgtgtctctcagcatgtgtaaactgttggttctgtttcaatgaactctgtttacgcacaacaaatcatgaggaaaatgggatccccatttttttcttttttgagacagagtctcgctttgtcaccaggctggagagtacagtggcgcaatctcagctcactgcaaactccagcctgggtgacagagtgagactttttctc

SEQ ID NO: 370520 - DNA, 415 bp, Homo sapiens
cagagaaagcaaatattttctaatactactgaatgtttacaaaaattaatcatatactagatttaaagaaatttttattaaattgttaaaagcataagctgtactcgtaacattctttgcccatgctttaattaagggagaaattaatgatgtgtcttaggactttaaaacattcatataaagatcaagaaagtcaaaatctcttagagactaagaaaaatgaacttaatataaataaaaatctatggaatgcaacccagcagttctcaaatttacatttgtagatttgaatcaaaaattagaaactacacaaattagtttacttaaaactttaggagggaacaaatgtcacaagacacataagaaaatggaacaagataaagcaaaaataaattagaacacagaaaactagtgt

SEQ ID NO: 370521 - DNA, 400 bp, Homo sapiens
  misc_feature (28)..(28): n is a, c, g, or t
attttcagccaaaaactgcaccatgggnctcacaggtggaacttaaggcacagtatgaaaataagcctgtgcatgcaaaacaggtctcaaagtcatgcaacagcaccactacaacttgcaaataatgtcagacttgaaatgaagctacatgtctcacaagtggcaacttttaagtaatcctgaaagcattaagaagcaatgaaggcaaatcttattttgtataacttgaatttaattttctactaatattttacatgtttaagaaaaacaagcttttattaaaatttgaacattcgagcaatatacttcattgactgatacattaatttaaaaattctgaaaattgttcaagatatcaacttatacaaagtctaccaggatattaaagtacttacacaaa

SEQ ID NO: 370522 - DNA, 556 bp, Homo sapiens
attagacctggatcacatacagcagctgagaggagcctcacaagcaagtcttgtacttcacccatgctgtcccctatatttagcaatccctcttgaagaacactcagcctcactgtatgacacacctgtgtggagaagacagcgtagcccctttgaagttactgcttggatgattaatgacgatgaagcaacaacaaagccaagacgggcatgtacactagcctgtgcatgcaaaacaggtctcaaagtcatgcaacagcaccactacaacttgcaaataatgtcagacttgaaatgaagctacatgtctcacaagtggcaacttttaagtaatcctgaaagcattaagaagcaatgaaggcaaatcttattttgtataacttgaatttaattttctactaatattttacatgtttaagaaaaacaagcttttattaaaatttgaacattcgagcaatatacttcattgactgatacattaatttaaaaattctgaaaattgttcaagatatcaacttatacaaagtctaccaggatattaaagtacttacacaaa

SEQ ID NO: 370523 - DNA, 305 bp, Homo sapiens
  misc_feature (28)..(28): n is a, c, g, or t
attttcagccaaaaactgcaccatgggnctcacaggtggaacttaaggcacagtatgaaaataagtggcaacttttaagtaatcctgaaagcattaagaagcaatgaaggcaaatcttattttgtataacttgaatttaattttctactaatattttacatgtttaagaaaaacaagcttttattaaaatttgaacattcgagcaatatacttcattgactgatacattaatttaaaaattctgaaaattgttcaagatatcaacttatacaaagtctaccaggatattaaagtacttacacaaa

SEQ ID NO: 370524 - DNA, 5584 bp, Homo sapiens
ctatcactaaactgtcattgaattgtactgcattagaaaggaactcaaatatgtgtgacggcaatggacatcttgtcacctttagttggcctttttcaatgagttaagcattatatgtgtgttaccaaaaaattattttttatagttcagagaaccatttttgttggatgtgtaatttggaagttttgtttacattatgtccttaggggttttctttgttttaacagcatgcagcttgacagaaatacactacccaaaaagggactaagatataccccatcatctcggcaggccaaccaagaagagggcaaagagtggttgcgttctcattctactggagggcttcaggacactggcaaccagtcacctctggtttccccttctgccatgtcatcttctgcagctggaaaataccacttttctaacttggtgagcccaacaaatttgtctcaatttaaccttcccgggcccagcatgatgcgctcaaacagcatcccagcccaagactcttccttcgatctctatgatgactcccagctttgtgggagtgccacttctctggaggaaagacctcgtgccatcagtcattcgggctcattcagagacagcatggaagaagttcatggctcttcattatcactggtgtccagcacttcttctctttactctacagctgaagaaaaggctcattcagagcaaatccataaactgcggagagagctggttgcatcacaagaaaaagttgctaccctcacatctcagctttcagcaaatgctcaccttgtagcagcttttgaaaagagcttagggaatatgactggccgattgcaaagtctaactatgacagcggaacaaaaggaatctgaacttatagaactaagagaaaccattgaaatgctgaaggctcagaattctgctgcccaggcggctattcagggagcactgaatggtccagaccatcctcccaaagatcttcgcatcagaagacagcattcctctgaaagtgtttctagtatcaacagtgccacaagccattccagtattggcagtggtaatgatgccgactccaagaagaagaaaaagaaaaactgggtgaactctagaggaagtgagctgagaagttctttcaaacaagcctttgggaagaaaaagtccaccaagcctccttcatcacattctgacattgaagagcttactgattcatcccttccggcatcccccaagttaccccataatgctggtgactgtggctcagcatccatgaagccctcacaatctgcttcagcgatctgtgaatgcacagaagctgaggcagagataattctgcagctgaagagcgagctcagagaaaaggaattaaaattaacggatattcggctggaggccctcagctctgctcatcatcttgatcagatccgggaagccatgaaccggatgcagaatgaaattgaaatactgaaagctgaaaatgaccggttgaaggcagaaactggtaacacagctaagcctactcggccaccgtcagaatcctcaagcagcacctcctcttcatcttccaggcagtcattaggactttctctaaacaatttgaacatcacagaggctgttagctcagatattttgctagatgatgctggtgatgcaactggacataaagatggccgcagtgtgaaaattatagtctccataagcaagggctatggtcgagcaaaggaccaaaaatctcaggcatatttgataggatccattggtgttagtggaaaaaccaagtgggatgtcttagatggtgtaataagacgtctctttaaggaatatgtattccgaattgatacatccactagccttggtctgagctctgactgcattgctagctactgtataggagacttaattagatcccataacctagaagtgcctgaattgctgccttgtggataccttgttggagataataacatcatcactgtgaacctcaaaggggtagaagaaaatagtttggacagttttgtttttgatacgctgattcctaaaccaattacccaaaggtactttaacttgttgatggagcatcacagaattatactctcaggaccgagtggtactggaaagacctatttggcaaacaaacttgctgaatatgtaataaccaaatctggaaggaaaaaaacagaggatgcaattgccacttttaatgtggaccacaagtcaagtaaggaattgcaacaatatctagctaacctggctgaacagtgcagtgctgataataatggagtggagctcccagttgtaataattcttgataatcttcatcatgtgggctctctgagtgatatcttcaatggttttctcaattgtaaatacaacaaatgtccatatattattggaacaatgaatcagggagtttcttcatcaccaaatctagagctgcatcacaatttcaggtgggtattatgtgcaaatcatacagaaccagtgaaaggctttttaggcagatatcttcgaagaaaactcatagagatagaaattgaaaggaacattcgcaataatgacctagtcaaaattatagattggattccgaagacgtggcatcatctcaacagttttttggaaacacacagttcttctgacgttaccattggtccccgactattccttccttgccccatggatgtagaaggttctagagtatggttcatggatctctggaactattctttagtaccttatattctggaggcagtgagagagggtcttcagatgtatgggaaacgcacaccatgggaagatccttcaaagtgggtgcttgacacatatccatggagctcagcaactctgcctcaggagagcccagccttacttcagctgcgaccagaagatgttgggtatgaaagctgcacatccactaaggaagccacaacctcaaagcacattccgcaaactgacacagaaggagatcccctgatgaatatgctaatgaaactccaagaagcagccaattactcgagcacacaaagctgcgacagcgaaagcaccagccaccatgaagacattttggattcatctcttgaatctaccctctagagggtgaaaaaagttaagggaaaagactttgcttttaaaaaaatgtttcaaaagaaaggtattttcactaaaccactgccagtataaaagcaccctgtcaagggccctgacccagagttgtggtctccaaggaggcagcagaactaagtctgaaccgccaagatgctaaattgcaatggaagcttaactttagtttatttctaagcattttttatatctgtggagtaatagaaagctccattactcaactggaaaggaccctaatgacagggcaactgaacagattgcacatgggatagccaaactggactttctttgtttcctctttaaaagtttacaatgcagaccattttttgtcccttccttttgtttcctctgaggggctgttcgccccaggcagggtccatctttctgatctgtccaacctcctttgtgccacacggtgctggtcacagggcttcagtagtgtttgtgttgtgcgctcaccccattccagaacaaatccaagaggccagtcctccataagcacaaatggaattgtgcaaccaccagaaaaacactactgtggcaaactggagaagtgccaatttaattctaactgccacgttctcatgatgtgctccaccaactttttagtatatgagtcactggttttataaggttgtttttaccacagtggtctttttaaaccacctgcccactcccttaacaagagttttataccaattattagtcaacactgataaaaggcttttttagggctttatttgtttgagccttttcagtgaaagaaggaacatttcctatggtgctgtctcactgccttaaaacagatttctatgacagtttaacagttggtttaaatcctaaaccattggtaatttccactgtcttttcatttacaaccaagcaacaccagttaacatagtagcctcatctctatatatctttctcttttttttttttttttgaagaaatggataggagaaagatcagtatttttagccttgtgaatagatcgctttgcctatcctccaaaatattaaaataacccagaaatgctctttgaccgtcacttaaaacctaagacatgtggcgaaattccatccagttctaagtgaaagagtttcagaaggcaggagattttgaattattatccagcagggctggaagcactagatgcagcatgagcacaactattcggctttccttccctattgtttttgtttttttaatgagttttgacgcatgttgttttgattgctattgttgtacatgagaaattcagcattaaagaacactgaagcggtaaggtcactgtggaagaggaagcgtttatactgtaaaagaaggttagatttgcacagtctactgggtaggtattgtaaataataatttttaaaacttgcacaaatcaaaacaaacacaaacaaaattgtattttatcctgttggtgttaagaggtgtttcacttgctgagatttcctgtacattgcaaacaaatacagaatgcaaaccctcaaagctgtattatctggtgtgtttgtcctgtatttacagttgtttttgactatgcaggagctatcagtgctagagtgagcatgcttcaaaactgtacatgaagccaatatatttttggataagtaaaactgtctgaaagtacatctgtcatggcaggctttaaagagagtgcatgaaaactgatcagtcattggagaagttaccaccacacacaaaggacaggttttaagtttatgaaacccaagggctaggccatggtatagacttcttctatgagtgtgtgaaaatgtgttacttttaggacgtgtatttggtgctactctctgtgaccaccaatgggtcagttgctatagaacaacaacaccacgaaacatctgtgcagttttcagagtgtcacaaagtcaataggtccttacacggtgctattgccctaagggaaatccgaactgaatttatgcacatagaattgtcaccctgactttgaagcctcaaacatggatcaaatctgttgtgaaacatcaatatatgtagctggatgagtgactagtttcccttgtataatatgtgatctaagaaaattgctaatctttccctgccattttgagaaacacagtccaaacatgagcataaacagaatttcctgcaatacatcccagtaggtccacctagtttacaacttaaactagtttgtgaaacatttgtctgtatacattttatattttgtacattttgatgtaacatatcatgtaaataggcagaaacagtgaaataaatcatctgaaaagttttgtagtctttgtaaagccccaacaataagtacttggtgtcaatggacttaactggatgatgtattttctattggtttattgttcctctagcttgtaaaccagcttgcatatatttttttgcaaatgtgcaccctgtatctgtctaaattattactttgccattaaagtggaattatttattgacaaaaaaaaaa

SEQ ID NO: 370525 - DNA, 5530 bp, Homo sapiens
ctatcactaaactgtcattgaattgtactgcattagaaaggaactcaaatatgtgtgacggcaatggacatcttgtcacctttagttggcctttttcaatgagttaagcattatatgtgtgttaccaaaaaattattttttatagttcagagaaccatttttgttggatgtgtaatttggaagttttgtttacattatgtccttaggggttttctttgttttaacagcatgcagcttgacagaaatacactacccaaaaagggactaagatataccccatcatctcggcaggccaaccaagaagagggcaaagagtggttgcgttctcattctactggagggcttcaggacactggcaaccagtcacctctggtttccccttctgccatgtcatcttctgcagctggaaaataccacttttctaacttggtgagcccaacaaatttgtctcaatttaaccttcccgggcccagcatgatgcgctcaaacagcatcccagcccaagactcttccttcgatctctatgatgactcccagctttgtgggagtgccacttctctggaggaaagacctcgtgccatcagtcattcgggctcattcagagacagcatggaagaagttcatggctcttcattatcactggtgtccagcacttcttctctttactctacagctgaagaaaaggctcattcagagcaaatccataaactgcggagagagctggttgcatcacaagaaaaagttgctaccctcacatctcagctttcagcaaatgctcaccttgtagcagcttttgaaaagagcttagggaatatgactggccgattgcaaagtctaactatgacagcggaacaaaaggaatctgaacttatagaactaagagaaaccattgaaatgctgaaggctcagaattctgctgcccaggcggctattcagggagcactgaatggtccagaccatcctcccaaagatcttcgcatcagaagacagcattcctctgaaagtgtttctagtatcaacagtgccacaagccattccagtattggcagtggtaatgatgccgactccaagaagaagaaaaagaaaaactgggtgaactctagaggaagtgagctgagaagttctttcaaacaagcctttgggaagaaaaagtccaccaagcctccttcatcacattctgacattgaagagcttactgattcatcccttccggcatcccccaagttaccccataatgctggtgactgtggctcagcatccatgaagccctcacaatctgcttcagcgatctgtgaatgcacagaagctgaggcagagataattctgcagctgaagagcgagctcagagaaaaggaattaaaattaacggatattcggctggaggccctcagctctgctcatcatcttgatcagatccgggaagccatgaaccggatgcagaatgaaattgaaatactgaaagctgaaaatgaccggttgaaggcagaaactggtaacacagctaagcctactcggccaccgtcagaatcctcaagcagcacctcctcttcatcttccaggcagtcattaggactttctctaaacaatttgaacatcacagaggctgttagctcagatattttgctagatgatgctggtgatgcaactggacataaagatggccgcagtgtgaaaattatagtctccataagcaagggctatggtcgagcaaaggaccaaaaatctcaggcatatttgataggatccattggtgttagtggaaaaaccaagtgggatgtcttagatggtgtaataagacgtctctttaaggaatatgtattccgaattgatacatccactagccttggtctgagctctgactgcattgctagctactgtataggagacttaattagatcccataacctagaagtgcctgaattgctgccttgtggataccttgttggagataataacatcatcactgtgaacctcaaaggggtagaagaaaatagtttggacagttttgtttttgatacgctgattcctaaaccaattacccaaaggtactttaacttgttgatggagcatcacagaattatactctcaggaccgagtggtactggaaagacctatttggcaaacaaacttgctgaatatgtaataaccaaatctggaaggaaaaaaacagaggatgcaattgccacttttaatgtggaccacaagtcaagtaaggaattgcaacaatatctagctaacctggctgaacagtgcagtgctgataataatggagtggagctcccagttgtaataattcttgataatcttcatcatgtgggctctctgagtgatatcttcaatggttttctcaattgtaaatacaacaaatgtccatatattattggaacaatgaatcagggagtttcttcatcaccaaatctagagctgcatcacaatttcaggtgggtattatgtgcaaatcatacagaaccagtgaaaggctttttaggcagatatcttcgaagaaaactcatagagatagaaattgaaaggaacattcgcaataatgacctagtcaaaattatagattggattccgaagacgtggcatcatctcaacagttttttggaaacacacagttcttctgacgttaccattggtccccgactattccttccttgccccatggatgtagaaggttctagagtatggttcatggatctctggaactattctttagtaccttatattctggaggcagtgagagagggtcttcagatgtatgggaaacgcacaccatgggaagatccttcaaagtgggtgcttgacacatatccatggagctcagcaactctgcctcaggagagcccagccttacttcagctgcgaccagaagatgttgggtatgaaagctgcacatccactaaggaagccacaacctcaaagcacattccgcaaactgacacagaaggagatcccctgatgaatatgctaatgaaactccaagaagcagccaattactcgagcacacaaagctgcgacagcgaaagcaccagccaccatgaagacattttggattcatctcttgaatctaccctctagagggtgaaaaaagttaagggaaaagactttgcttttaaaaaaatgtttcaaaagaaaggtattttcactaaaccactgccagtataaaagcaccctgtcaagggccctgacccagagttgtggtctccaaggaggcagcagaactaagtctgaaccgccaagatgctaaattgcaatggaagcttaactttagtttatttctaagcattttttatatctgtggagtaatagaaagctccattactcaactggaaaggaccctaatgacagggcaactgaacagattgcacatgggatagccaaactggactttctttgtttcctctttaaaagtttacaatgcagaccattttttgtcccttccttttgtttcctctgaggggctgttcgccccaggcagggtccatctttctgatctgtccaacctcctttgtgccacacggtgctggtcacagggcttcagtagtgtttgtgttgtgcgctcaccccattccagaacaaatccaagaggccagtcctccataagcacaaatggaattgtgcaaccaccagaaaaacactactgtggcaaactggagaagtgccaatttaattctaactgccacgttctcatgatgtgctccaccaactttttagtatatgagtcactggttttataaggttgtttttaccacagtggtctttttaaaccacctgcccactcccttaacaagagttttataccaattattagtcaacactgataaaaggcttttttagggctttatttgtttgagccttttcagtgaaagaaggaacatttcctatggtgctgtctcactgccttaaaacagatttctatgacagtttaacagttggtttaaatcctaaaccattggtaatttccactgtcttttcatttacaaccaagcaacaccagttaacatagtagcctcatctctatatatctttctcttttttttttttttttgaagaaatggataggagaaagatcagtatttttagccttgtgaatagatcgctttgcctatcctccaaaatattaaaataacccagaaatgctctttgaccgtcacttaaaacctaagacatgtggcgaaattccatccagttctaagtgaaagagtttcagaaggcaggagattttgaattattatccagcagggctggaagcactagatgcagcatgagcacaactattcggctttccttccctattgtttttgtttttttaatgagttttgacgcatgttgttttgattgctattgttgtacatgagaaattcagcattaaagaacactgaagcggtaaggtcactgtggaagaggaagcgtttatactgtaaaagaaggttagatttgcacagtctactgggtaggtattgtaaataataatttttaaaacttgcacaaatcaaaacaaacacaaacaaaattgtattttatcctgttggtgttaagaggtgtttcacttgctgagatttcctgtacattgcaaacaaatacagaatgcaaaccctcaaagctgtattatctggtgtgtttgtcctgtatttacagttgtttttgactatgcaggagctatcagtgctagagtgagcatgcttcaaaactgtacatgaagccaatatatttttggataagtaaaactgtctgaaagtacatctgtcatggcaggctttaaagagagtgcatgaaaactgatcagtcattggagaagttaccaccacacacaaaggacaggttttaagtttatgaaacccaagggctaggccatggtatagacttcttctatgagtgtgtgaaaatgtgttacttttaggacgtgtatttggtgctactctctgtgaccaccaatgggtcagttgctatagaacaacaacaccacgaaacatctgtgcagttttcagagtgtcacaaagtcaataggtccttacacggtgctattgccctaagggaaatccgaactgaatttatgcacatagaattgtcaccctgactttgaagcctcaaacatggatcaaatctgttgtgaaacatcaatatatgtagctggatgagtgactattgagaaacacagtccaaacatgagcataaacagaatttcctgcaatacatcccagtaggtccacctagtttacaacttaaactagtttgtgaaacatttgtctgtatacattttatattttgtacattttgatgtaacatatcatgtaaataggcagaaacagtgaaataaatcatctgaaaagttttgtagtctttgtaaagccccaacaataagtacttggtgtcaatggacttaactggatgatgtattttctattggtttattgttcctctagcttgtaaaccagcttgcatatatttttttgcaaatgtgcaccctgtatctgtctaaattattactttgccattaaagtggaattatttattgacaaaaaaaaaa

SEQ ID NO: 370526 - DNA, 427 bp, Homo sapiens
aaacaccaataaatttgagctctgagctgcttataagggacaaagataatgatgctaagatttttagtgtagttgaccagatgataacataccaggtaaataccaaaagaatgctgaagccaggtgtggtgttgtatgcctataatcctagcactttgggaggctgaggtgggagaattgcttgagcccaggagtttgagactatcctgggcagcatggcgagatcctgtctctacaaagaaaaaaaatacaaaaacagttagctgggcatggaggcacacaaacctgtggttccagctacgtgggaggctgaggcaggaggatcccttgagcctggagttcaaagttgcagtgagctctgattgtgccactgcatgccagcctgggttagggagcaagaccgtaccaaaaaaaaaaaaaaaaaaaa

SEQ ID NO: 370527 - DNA, 4237 bp, Homo sapiens
cgaagaggatccggagcagctgctgccagcccgcgggcactgaagtcctcccggctgccgctcgagtagccacgggcgcgatcgggaccagaagtctcctcctccatgatcactttggaagccgggggaagactttgccctgccctgagagctggtctgcgtttcccaggcgcggcggcggcggagcagcagctgcagcagccgagtccaaataggagcggccacagccaggggcgtgtgcgccccgcgcggagcgagctcgggttcccctcggaatgtccccggggcgcccggcgcgctgaccccgaagccgcctccgccttcggcgcctgctgcctccctcggccaggcttgttgttcgggactgtgagcttcctggctcctgggcagtggggaagcccccgggggcgagtgacctcagctggccacgacccagccctcccccgtgcgtatctcgcttaagatggcagcggagtcaggggaactaatcggggcttgtgagttcatgaaagatcggttatattttgctactttaaggaatagaccaaaaagcacagtaaatacccactatttctccatcgatgaggagctggtctatgaaaatttctatgcagattttggaccgctgaacttggcaatggtgtacagatattgctgcaaactaaacaagaaactaaaatcatacagtttgtcaagaaagaaaatagtgcactacacctgttttgaccaacggaaaagagcaaatgcagcatttttgataggtgcctatgcagtaatctatttaaagaagacaccagaagaagcctacagagcactcctgtctggctcaaaccccccctatcttccattcagggatgcttcctttggaaattgcacttacaatctcaccattctcgactgtttgcagggaatcagaaagggattacaacatggattttttgactttgagacatttgatgtggatgaatatgaacattatgagcgagttgaaaatggtgacttcaactggattgttccaggaaaatttttagcatttagtggaccacatcctaaaagcaaaattgagaatggttatcctcttcacgcccctgaagcctactttccttatttcaaaaagcataatgtgactgcagttgtgaggctaaacaaaaagatttatgaggcaaagcgcttcacagacgctggcttcgagcactatgacctcttcttcatagatggcagcacacccagtgacaacatcgtgcgaaggttcctgaacatctgtgagaacaccgaaggggccatcgccgttcactgcaaagctggtcttggaagaacagggacattgatagcctgttatgtaatgaaacactacaggtttacacatgctgaaataattgcttggattagaatatgccggccaggctctattataggaccccagcagcacttcctggaagaaaaacaagcatcgttgtgggtccaaggagacattttccgatccaaactgaaaaatcgaccatccagtgaaggaagtattaataaaattctttctggcctagatgatatgtctattggtggaaatctttcaaaaacacaaaacatggaacgatttggagaggataacttagaagatgatgatgtggaaatgaaaaatggtataacccagggagacaaactacgtgccttaaaaagtcagagacagccacgtacctcaccatcctgtgcatttaggtcagatgatacaaaaggacatccaagagcagtgtcccagcctttcagattaagttcatccctgcaaggatctgcagttactttgaagacatcaaaaatggcactgtccccttcagcaacggccaagaggatcaacagaacttctttgtcttcgggtgccactgtaagaagcttttccataaactcccggctagccagttctctagggaacttgaatgctgcaacagatgatccagagaacaaaaagacctcctcatcctctaaggcaggcttcacagccagcccgtttaccaacctcttgaatggcagctcccagccaactaccagaaattaccctgagctcaacaataatcagtacaacagaagcagcaacagcaacgggggcaacctgaacagccccccaggcccccacagcgccaagacagaggagcacaccaccatcctccgaccctcctacaccgggctttcttcttcttcagcgagattcctgagccgttctatcccttcccttcagtctgaatatgttcattactaaggccttgccactccagtgaaagctgttcttctcttagacacaatttcttcatctggacgagcagtggagagggaaagcaacttcttgctggaagaatatctctgccttcttaccttaaattaaaaagagcactaagataacaccttcaagagacttgaaaacagaaaactggttaatgactactataaatgcactgaaactatgtttatggagatttccatacttttaaagacagttttaatgttgaatttggtattttgaagggttatttttaatgtattttggtaatacatttattattatatttacatgtacagtgttacattatatatgtattgtgaactttaaaagactattttgataaatttataaatatataaaattatgtaaaaactacactatattttgatttagattttcctgctgtttgctaccaaaaatttgtattttaaatctgtttagttttagtatggttttgtctctaatgaataaataattccttcttattaagaagaagtaagggagaaagtttttagaaagtgatttttatgctcgcactataaatatggcaggtcagttcattcttttgggaagtcagtttagttacactgagtttatccaagtttatctctaccaagagtataatggcatgggatggcttatttaggacaattccctttcctattgtttttgttgctgagccaatttgagttagttttgcatcctggggggctttaaaatacagcatgcagtgaaagatcagaattcactgaatatttcttctgagagcatggtttcatggtttttctctatgaaatgactcaatattccaaatgtttttttttccttcctcctttcaaaagagttcttaacccaattaggatatcctgctttgggtatgaggttgttgttgcctgtaatcacacatggtttgacatcagttttaaatcaatggagagaaaaaactgaaaaagatgctgctaagtagttctctgtattaaaggagatatttttaaaacagggtacaaccccctgctgcacacgctagcatatctggaacctactatgaaaatgaaaggacccttataggtactcacagccctttcatgtaagtatgatctgatatttaggtcttcagaagcctgtaggtttcatttctatgaggaatcgaggagcgttacatcctgatatccttccaggctgcttaagaatggactgcttcgacactgaaagtgctagttaaatggattcatatgaagtgctttactcccaaccattgagttatttataatgtatttattaggggagggtaccttgagtctattatatatgcttcatcaaaacatcttgttcatgttttatgtttttaaaaaaggcatttgaatgaatgtttgactcaggtttgttaaattaaccttcagtaactgcagtaccaaaaattacactcaactgatgaaaaaaacgaattgtatgatttaggaatcaaaaactaaaataagtggaattatgtatcttttctaaagttaaaaaagtaaaatattttattatgagttattataaaaattggttaattgtataggaagatgacagtatttttttcaagttatcataaaaagtaattcagatgacatttgagaagtaggggaaagggaatcatgttgacagttttagttctgtgaacactaatttgtgtgaagctattaaaatgattgtaaagttgactactgtaaatttcccataattatgtgtgtatatgtgtcatatgtatgtacatgtatatgtctaaaaattactttacacatgtgcctacatagacacaccaagaagtggatgtatataatatagaaagtatatagcaaagtaattttactctgataataaaaattgtttgacatgtattttgttatgaatagtttatcttccaaaagatattttgctctattttaaagtgtagaagaatacactgctaataaataataaaagttttat

SEQ ID NO: 370528 - DNA, 1878 bp, Homo sapiens
cgaagaggatccggagcagctgctgccagcccgcgggcactgaagtcctcccggctgccgctcgagtagccacgggcgcgatcgggaccagaagtctcctcctccatgatcactttggaagccgggggaagactttgccctgccctgagagctggtctgcgtttcccaggcgcggcggcggcggagcagcagctgcagcagccgagtccaaataggagcggccacagccaggggcgtgtgcgccccgcgcggagcgagctcgggttcccctcggaatgtccccggggcgcccggcgcgctgaccccgaagccgcctccgccttcggcgcctgctgcctccctcggccaggcttgttgttcgggactgtgagcttcctggctcctgggcagtggggaagcccccgggggcgagtgacctcagctggccacgacccagccctcccccgtgcgtatctcgcttaagatggcagcggagtcaggggaactaatcggggcttgtgagttcatgaaagatcggttatattttgctactttaaggaatagaccaaaaagcacagtaaatacccactatttctccatcgatgaggagctggtctatgaaaatttctatgcagattttggaccgctgaacttggcaatggtgtacagatattgctgcaaactaaacaagaaactaaaatcatacagtttgtcaagaaagaaaatagtgcactacacctgttttgaccaacggaaaagagcaaatgcagcatttttgataggtgcctatgcagtaatctatttaaagaagacaccagaagaagcctacagagcactcctgtctggctcaaaccccccctatcttccattcagggatgcttcctttggaaattgcacttacaatctcaccattctcgactgtttgcagggaatcagaaagggattacaacatggattttttgactttgagacatttgatgtggatgaatatgaacattatgagcgagttgaaaatggtgacttcaactggattgttccaggaaaatttttagcatttagtggaccacatcctaaaagcaaaattgagaatggttatcctcttcacgcccctgaagcctactttccttatttcaaaaagcataatgtgactgcagttgtgaggctaaacaaaaagatttatgaggcaaagcgcttcacagacgctggcttcgagcactatgacctcttcttcatagatggcagcacacccagtgacaacatcgtgcgaaggttcctgaacatctgtgagaacaccgaaggggccatcgccgttcactgcaaagctggtcttggaagaacagggacattgatagcctgttatgtaatgaaacactacaggtttacacatgctgaaataattgcttggattagaatatgccggccaggctctattataggaccccagcagcacttcctggaagaaaaacaagcatcgttgtgggtccaaggagacattttccgatccaaactgaaaaatcgaccatccagtgaaggaagtattaataaaattctttctggcctagatgatatgtctattggtggaaatctttcaaaaacacaaaacatggaacgatttggagaggtaagttttccctaggagattctatcttcttaaaactgatgttctgcatttgtttctcagttggacctatataacatagcagtgtcttttctctggatgccacgagtaccaagtttttagaagtagagccatccgtctatatagcaagaagcagaggaaagaaaccaattgcccttaaaaaaaaaaagctataatttaaggagtaaattataaaggaggctactctggtaaggggtaatatttatagaaaggaaacagaaaagcaaactttctatttg

SEQ ID NO: 370529 - DNA, 2548 bp, Homo sapiens
gttttagccagtttcttgggtcctagttaactgcttttgacaaagcaacttgatatgtataactcaaggctacatattatcataacaccaagggtgatgaggaagccatcctgacatcattcacattgatcagattcatcttcatcatgttcccctaatgtcatgagtatgtgttttagaaacgtgagctctgtgtgattgtacattgttgtctgttttttccctcctcacttgtgttttccattcagcttttccataaactcccggctagccagttctctagggaacttgaatgctgcaacagatgatccagagaacactcttgaatggcagctcccagccaactaccagaaattaccctgagctcaacaataatcagtacaacagaagcagcaacagcaacgggggcaacctgaacagccccccaggcccccacagcgccaagacagaggagcacaccaccatcctccgaccctcctacaccgggctttcttcttcttcagcgagattcctgagccgttctatcccttcccttcagtctgaatatgttcattactaaggccttgccactccagtgaaagctgttcttctcttagacacaatttcttcatctggacgagcagtggagagggaaagcaacttcttgctggaagaatatctctgccttcttaccttaaattaaaaagagcactaagataacaccttcaagagacttgaaaacagaaaactggttaatgactactataaatgcactgaaactatgtttatggagatttccatacttttaaagacagttttaatgttgaatttggtattttgaagggttatttttaatgtattttggtaatacatttattattatatttacatgtacagtgttacattatatatgtattgtgaactttaaaagactattttgataaatttataaatatataaaattatgtaaaaactacactatattttgatttagattttcctgctgtttgctaccaaaaatttgtattttaaatctgtttagttttagtatggttttgtctctaatgaataaataattccttcttattaagaagaagtaagggagaaagtttttagaaagtgatttttatgctcgcactataaatatggcaggtcagttcattcttttgggaagtcagtttagttacactgagtttatccaagtttatctctaccaagagtataatggcatgggatggcttatttaggacaattccctttcctattgtttttgttgctgagccaatttgagttagttttgcatcctggggggctttaaaatacagcatgcagtgaaagatcagaattcactgaatatttcttctgagagcatggtttcatggtttttctctatgaaatgactcaatattccaaatgtttttttttccttcctcctttcaaaagagttcttaacccaattaggatatcctgctttgggtatgaggttgttgttgcctgtaatcacacatggtttgacatcagttttaaatcaatggagagaaaaaactgaaaaagatgctgctaagtagttctctgtattaaaggagatatttttaaaacagggtacaaccccctgctgcacacgctagcatatctggaacctactatgaaaatgaaaggacccttataggtactcacagccctttcatgtaagtatgatctgatatttaggtcttcagaagcctgtaggtttcatttctatgaggaatcgaggagcgttacatcctgatatccttccaggctgcttaagaatggactgcttcgacactgaaagtgctagttaaatggattcatatgaagtgctttactcccaaccattgagttatttataatgtatttattaggggagggtaccttgagtctattatatatgcttcatcaaaacatcttgttcatgttttatgtttttaaaaaaggcatttgaatgaatgtttgactcaggtttgttaaattaaccttcagtaactgcagtaccaaaaattacactcaactgatgaaaaaaacgaattgtatgatttaggaatcaaaaactaaaataagtggaattatgtatcttttctaaagttaaaaaagtaaaatattttattatgagttattataaaaattggttaattgtataggaagatgacagtatttttttcaagttatcataaaaagtaattcagatgacatttgagaagtaggggaaagggaatcatgttgacagttttagttctgtgaacactaatttgtgtgaagctattaaaatgattgtaaagttgactactgtaaatttcccataattatgtgtgtatatgtgtcatatgtatgtacatgtatatgtctaaaaattactttacacatgtgcctacatagacacaccaagaagtggatgtatataatatagaaagtatatagcaaagtaattttactctgataataaaaattgtttgacatgtattttgttatgaatagtttatcttccaaaagatattttgctctattttaaagtgtagaagaatacactgctaataaataataaaagttttat

SEQ ID NO: 370530 - DNA, 2428 bp, Homo sapiens
cgaagaggatccggagcagctgctgccagcccgcgggcactgaagtcctcccggctgccgctcgagtagccacgggcgcgatcgggaccagaagtctcctcctccatgatcactttggaagccgggggaagactttgccctgccctgagagctggtctgcgtttcccaggcgcggcggcggcggagcagcagctgcagcagccgagtccaaataggagcggccacagccaggggcgtgtgcgccccgcgcggagcgagctcgggttcccctcggaatgtccccggggcgcccggcgcgctgaccccgaagccgcctccgccttcggcgcctgctgcctccctcggccaggcttgttgttcgggactgtgagcttcctggctcctgggcagtggggaagcccccgggggcgagtgacctcagctggccacgacccagccctcccccgtgcgtatctcgcttaagatggcagcggagtcaggggaactaatcggggcttgtgagttcatgaaagatcggttatattttgctactttaaggaatagaccaaaaagcacagtaaatacccactatttctccatcgatgaggagctggtctatgaaaatttctatgcagattttggaccgctgaacttggcaatggtgtacagatattgctgcaaactaaacaagaaactaaaatcatacagtttgtcaagaaagaaaatagtgcactacacctgttttgaccaacggaaaagagcaaatgcagcatttttgataggtgcctatgcagtaatctatttaaagaagacaccagaagaagcctacagagcactcctgtctggctcaaaccccccctatcttccattcagggatgcttcctttggaaattgcacttacaatctcaccattctcgactgtttgcagggaatcagaaagggattacaacatggattttttgactttgagacatttgatgtggatgaatatgaacattatgagcgagttgaaaatggtgacttcaactggattgttccaggaaaatttttagcatttagtggaccacatcctaaaagcaaaattgagaatggttatcctcttcacgcccctgaagcctactttccttatttcaaaaagcataatgtgactgcagttgtgaggctaaacaaaaagatttatgaggcaaagcgcttcacagacgctggcttcgagcactatgacctcttcttcatagatggcagcacacccagtgacaacatcgtgcgaaggttcctgaacatctgtgagaacaccgaaggggccatcgccgttcactgcaaagctggtcttggaagaacagggacattgatagcctgttatgtaatgaaacactacaggtttacacatgctgaaataattgcttggattagaatatgccggccaggctctattataggaccccagcagcacttcctggaagaaaaacaagcatcgttgtgggtccaaggagacattttccgatccaaactgaaaaatcgaccatccagtgaaggaagtattaataaaattctttctggcctagatgatatgtctattggtggaaatctttcaaaaacacaaaacatggaacgatttggagaggataacttagaagatgatgatgtggaaatgaaaaatggtataacccagggagacaaactacgtgccttaaaaagtcagagacagccacgtacctcaccatcctgtgcatttaggtcagatgatacaaaaggacatccaagagcagtgtcccagcctttcagattaagttcatccctgcaaggatctgcagttactttgaagacatcaaaaatggcactgtccccttcagcaacggccaagaggatcaacagaacttctttgtcttcgggtgccactgtaagaagcttttccataaactcccggctagccagttctctagggaacttgaatgctgcaacagatgatccagagaacaaaaagacctcctcatcctctaaggcaggcttcacagccagcccgtttaccaacctcttgaatggcagctcccagccaactaccagaaattaccctgagctcaacaataatcagtacaacagaagcagcaacagcaacgggggcaacctgaacagccccccaggcccccacagcgccaagacagaggagcacaccaccatcctccgaccctcctacaccgggctttcttcttcttcagcgagattcctgagccgttctatccctgtaagtgcgcagacaccacctcctggtcctcagaaccctgaatgcaacttctgtgccttgccttcccagccgaggctgccaccaaagaaatttaatagtgccaaggaagccttctgagcgatgccttccctctgtgctgtgaaactgtctatgcactacattctgctagctcctcttcaagtaaacgccaagtcacaactgggaaaaaaa

SEQ ID NO: 370531 - DNA, 3800 bp, Homo sapiens
gatgagagggcgtggagaaccagatgggaaactttttgtcccgtgagaacaaagtacaagttatatcagagtctgatcggttatattttgctactttaaggaatagaccaaaaagcacagtaaatacccactatttctccatcgatgaggagctggtctatgaaaatttctatgcagattttggaccgctgaacttggcaatggtgtacagatattgctgcaaactaaacaagaaactaaaatcatacagtttgtcaagaaagaaaatagtgcactacacctgttttgaccaacggaaaagagcaaatgcagcatttttgataggtgcctatgcagtaatctatttaaagaagacaccagaagaagcctacagagcactcctgtctggctcaaaccccccctatcttccattcagggatgcttcctttggaaattgcacttacaatctcaccattctcgactgtttgcagggaatcagaaagggattacaacatggattttttgactttgagacatttgatgtggatgaatatgaacattatgagcgagttgaaaatggtgacttcaactggattgttccaggaaaatttttagcatttagtggaccacatcctaaaagcaaaattgagaatggttatcctcttcacgcccctgaagcctactttccttatttcaaaaagcataatgtgactgcagttgtgaggctaaacaaaaagatttatgaggcaaagcgcttcacagacgctggcttcgagcactatgacctcttcttcatagatggcagcacacccagtgacaacatcgtgcgaaggttcctgaacatctgtgagaacaccgaaggggccatcgccgttcactgcaaagctggtcttggaagaacagggacattgatagcctgttatgtaatgaaacactacaggtttacacatgctgaaataattgcttggattagaatatgccggccaggctctattataggaccccagcagcacttcctggaagaaaaacaagcatcgttgtgggtccaaggagacattttccgatccaaactgaaaaatcgaccatccagtgaaggaagtattaataaaattctttctggcctagatgatatgtctattggtggaaatctttcaaaaacacaaaacatggaacgatttggagaggataacttagaagatgatgatgtggaaatgaaaaatggtataacccagggagacaaactacgtgccttaaaaagtcagagacagccacgtacctcaccatcctgtgcatttaggtcagatgatacaaaaggacatccaagagcagtgtcccagcctttcagattaagttcatccctgcaaggatctgcagttactttgaagacatcaaaaatggcactgtccccttcagcaacggccaagaggatcaacagaacttctttgtcttcgggtgccactgtaagaagcttttccataaactcccggctagccagttctctagggaacttgaatgctgcaacagatgatccagagaacaaaaagacctcctcatcctctaaggcaggcttcacagccagcccgtttaccaacctcttgaatggcagctcccagccaactaccagaaattaccctgagctcaacaataatcagtacaacagaagcagcaacagcaacgggggcaacctgaacagccccccaggcccccacagcgccaagacagaggagcacaccaccatcctccgaccctcctacaccgggctttcttcttcttcagcgagattcctgagccgttctatcccttcccttcagtctgaatatgttcattactaaggccttgccactccagtgaaagctgttcttctcttagacacaatttcttcatctggacgagcagtggagagggaaagcaacttcttgctggaagaatatctctgccttcttaccttaaattaaaaagagcactaagataacaccttcaagagacttgaaaacagaaaactggttaatgactactataaatgcactgaaactatgtttatggagatttccatacttttaaagacagttttaatgttgaatttggtattttgaagggttatttttaatgtattttggtaatacatttattattatatttacatgtacagtgttacattatatatgtattgtgaactttaaaagactattttgataaatttataaatatataaaattatgtaaaaactacactatattttgatttagattttcctgctgtttgctaccaaaaatttgtattttaaatctgtttagttttagtatggttttgtctctaatgaataaataattccttcttattaagaagaagtaagggagaaagtttttagaaagtgatttttatgctcgcactataaatatggcaggtcagttcattcttttgggaagtcagtttagttacactgagtttatccaagtttatctctaccaagagtataatggcatgggatggcttatttaggacaattccctttcctattgtttttgttgctgagccaatttgagttagttttgcatcctggggggctttaaaatacagcatgcagtgaaagatcagaattcactgaatatttcttctgagagcatggtttcatggtttttctctatgaaatgactcaatattccaaatgtttttttttccttcctcctttcaaaagagttcttaacccaattaggatatcctgctttgggtatgaggttgttgttgcctgtaatcacacatggtttgacatcagttttaaatcaatggagagaaaaaactgaaaaagatgctgctaagtagttctctgtattaaaggagatatttttaaaacagggtacaaccccctgctgcacacgctagcatatctggaacctactatgaaaatgaaaggacccttataggtactcacagccctttcatgtaagtatgatctgatatttaggtcttcagaagcctgtaggtttcatttctatgaggaatcgaggagcgttacatcctgatatccttccaggctgcttaagaatggactgcttcgacactgaaagtgctagttaaatggattcatatgaagtgctttactcccaaccattgagttatttataatgtatttattaggggagggtaccttgagtctattatatatgcttcatcaaaacatcttgttcatgttttatgtttttaaaaaaggcatttgaatgaatgtttgactcaggtttgttaaattaaccttcagtaactgcagtaccaaaaattacactcaactgatgaaaaaaacgaattgtatgatttaggaatcaaaaactaaaataagtggaattatgtatcttttctaaagttaaaaaagtaaaatattttattatgagttattataaaaattggttaattgtataggaagatgacagtatttttttcaagttatcataaaaagtaattcagatgacatttgagaagtaggggaaagggaatcatgttgacagttttagttctgtgaacactaatttgtgtgaagctattaaaatgattgtaaagttgactactgtaaatttcccataattatgtgtgtatatgtgtcatatgtatgtacatgtatatgtctaaaaattactttacacatgtgcctacatagacacaccaagaagtggatgtatataatatagaaagtatatagcaaagtaattttactctgataataaaaattgtttgacatgtattttgttatgaatagtttatcttccaaaagatattttgctctattttaaagtgtagaagaatacactgctaataaataataaaagttttat

SEQ ID NO: 370532 - DNA, 254 bp, Homo sapiens
tgctattcaattcaacacaatcaggacacacaactgccagtcagaacatcctccccataacccttagtggaggagatctgaatcttgcgttttagtttccatggacttgcctgaaagtaagcttatttggtcatgctttgtgggtggcaacaggtgacttagtccagaccacctctggaagctttgatgtcagatacgatgtccagtcgcctcagaacaggccaatagctgttgcattttccaggtaccctgca

SEQ ID NO: 370533 - DNA, 1553 bp, Homo sapiens
atctttccatatttactgagtttaaatgaatcatctcagagagaaaagaaaaactaaatatggaaagatgcatggcagaagctgaaatgagctcaagcagtactaaccttggaaccattctgggtacccaaaagaaaaatttaaaatcaagatgagtaaaaggagaatggtctcaatatcctcaaaaatgcagtaagagaagtaattccccactgaaaatgtctctctttctttctatgttataccctggagtcctggttgaggggtgggggaatcagaaaagtaggtttacatttaacatttttcttaactacattcacttcttaaaaaggaacaagaagtgtaaataagtatgtatagagtgagggattaagcatatttgcattggggactcgtgtattatgcttttaagtcaaaattaatattctcaaattcgaatttgatagctattatttctaaatctttttaatcctcaattttcctggtaaccttctttcaagagtctccttcttctaaaagttgccaaaccctttatatttaagctttttccactcaggactcaattagagtggtcaacagggagagggatggtcccatttgatctttgccactgagcaaaacaaaacttcaaatgaacttttaaactgtagctttagtcttctggtataaagtggggaagattacacttatgtgatcaccaaaggatttactagtatcttggtcattccaattgcacaatgttaactgtacaacacacagcagaaaagtgaatagacttcactaagggattctaagtttagaaaataggttttgttttcttaaaaaattttgtgtataatacaaactaatgaaaactatacatattctccaattcctatagtaataataatgtaactgttacaccaactttcctcatatttgagagatgagtacatgttggattgcagcatttcttcatgttaaaaacatggaatattattcaaatatagtacttggggcctaaacaactaaaattagtcaccgcataactagttgaaaatggcataggcataaaatgttaataaagaatggcagttatatttatgctcacttcctggagtaattgggtaatattcagaaaggcacatcgtggtagtttaagtgtacaaggccttagggcagtatctagcccagtattattccagattctcctgagctctatataaagggcattttggaggaactcttctgggcaatatctttcccaatctcatctaaattctgggaaatattttccatagcagacaacccagctctgaaactaagcacctggtgatctttagtttgagatgtctatatggtacttttgagttatatcaattaagatacaagctatagacatgataaaaatatgaaatcaagatatagctcagtgggattggattaagacataataatagttctaagaattcacttttgattgtatgttttaccaattcaataattccactaatcaagtattcacattttgacttttgattaaataaaaatttgaattaaaattattcccctct

SEQ ID NO: 370534 - DNA, 2197 bp, Homo sapiens
ggcctgcgcgcgcggccgccctgcccacgatgctgtcgcccccgcgacctgtagggccttcgctggcccctcaccctcctcccgccccgggctgaggctgccgccggtttcgcgcccagtgccgaggcagcggcggagccggggaaggtcggagggagggtggtttcctcccgccccacacccagtctccgagccggatatatagagtgtcacgtttgggagccgaaagactggagccgtttccttgtggctggagcgcttcccgtagcctcggggaaggagcaggatttagaggaccactagttggaccccatcctcgtgctggaggaacaggaacctctttcaggagctataaaagaaagggaggaatcatgtccacaattgcagctttctatggcggcaagtccattctcatcacgggggccacaggctttctgggcaaagtgctaatggagaagctgtttcgcaccagcccagacctgaaagtcatttacatccttgtgaggcccaaggctggccagacactgcagcagagggttttccagatcctagacagtaagctatttgagaaagtcaaagaagtttgtccaaatgtgcatgagaagatcagagctatttatgcagatctcaatcagaatgactttgccatcagcaaagaggacatgcaggagcttctctcctgtacaaacataatatttcactgtgcagccactgtacgctttgacgacactctcagacatgctgtgcaacttaacgtcactgccacccggcagctcttgcttatggctagtcagatgccaaagctggaagcctttatacatatctctactgcctattcaaattgtaacctgaagcacatcgatgaagttatctatccgtgccctgtggagccaaaaaaaatcattgattcccttgagtggttagacgatgctattattgacgagattacacccaagctgatcagagattggcccaatatttatacctacaccaaggccttgggagaaatggtggtgcagcaagagagcaggaacctgaacattgccatcataaggccctccattgtgggagcaacttggcaggagcctttcccaggttgggttgataatataaatggacctaatggaatcattattgcgactgggaaagggtttcttcgggccataaaagctactccaatggctgtggcagacgtaattccagttgatacagtcgtcaatctcatgctagctgtaggatggtatactgcagttcacagacctaagtcaacattagtctaccacattacatctggtaacatgaatccctgcaattggcacaaaatgggagtccaagtcttggcaacctttgaaaaaatcccatttgagagacctttcaggaggccaaatgctaattttaccagcaacagcttcacatcacagtactggaatgcggtcagccaccgggcccctgccattatctatgactgctatctgcggctcactggaaggaagcccaggatgacaaagctcatgaatcggcttttaagaactgtttccatgttggagtatttcatcaaccggagttgggaatggagcacgtacaatacagaaatgctgatgtctgagctgagtcctgaagaccagagagtattcaactttgacgtgcgccagttgaactggttggaatacattgaaaattatgttttgggagttaaaaaatacttattgaaagaggatatggctgggatcccaaaagcaaagcaacgcttaaaaaggctccgaaatattcactacctctttaatactgccctcttccttatcgcctggcgccttctcattgcaagatctcagatggctcggaatgtctggttcttcattgtaagcttctgttataaattcctctcctactttagagcatccagcacgctcaaagtttaagagcatttagccatcgccttttatctggaacctctcagatacctctaaaacagcaaactgtgattctcaagattagaaagtaacaaggaatatgcccaaactgtcaaatgtcacctgttatgtattcgtccctattccttaactatgtatttttatttcagtgagagaaggaaagttgtaaactagcccatagtcacctatattttagggaaaaaaatccaaattgtttcctaacattctattttatgcccttgcgtattaaacgtgaaagtactccc

SEQ ID NO: 370535 - DNA, 3648 bp, Homo sapiens
ccacagagcctttcaattcagcttggggtgagctgcacttcaggcatggggatataatagtgtgatgaaccattcttctgaaggttcttctgaaaagctgctggtcttgggatactgtgagagcccctctcattgctctttagaagtaatttaaatttttctgctacattgtctgctcagctcgtattctggtcatagaggaacctgaagccagagaaactagacaaaaaggaacctctttcaggagctataaaagaaagggaggaatcatgtccacaattgcagctttctatggcggcaagtccattctcatcacgggggccacaggctttctgggcaaagtgctaatggagaagctgtttcgcaccagcccagacctgaaagtcatttacatccttgtgaggcccaaggctggccagacactgcagcagagggttttccagatcctagacagtaagctatttgagaaagtcaaagaagtttgtccaaatgtgcatgagaagatcagagctatttatgcagatctcaatcagaatgactttgccatcagcaaagaggacatgcaggagcttctctcctgtacaaacataatatttcactgtgcagccactgtacgctttgacgacactctcagacatgctgtgcaacttaacgtcactgccacccggcagctcttgcttatggctagtcagatgccaaagctggaagcctttatacatatctctactgcctattcaaattgtaacctgaagcacatcgatgaagttatctatccgtgccctgtggagccaaaaaaaatcattgattcccttgagtggttagacgatgctattattgacgagattacacccaagctgatcagagattggcccaatatttatacctacaccaaggccttgggagaaatggtggtgcagcaagagagcaggaacctgaacattgccatcataaggccctccattgtgggagcaacttggcaggagcctttcccaggttgggttgataatataaatggacctaatggaatcattattgcgactgggaaagggtttcttcgggccataaaagctactccaatggctgtggcagacgtaattccagttgatacagtcgtcaatctcatgctagctgtaggatggtatactgcagttcacagacctaagtcaacattagtctaccacattacatctggtaacatgaatccctgcaattggcacaaaatgggagtccaagtcttggcaacctttgaaaaaatcccatttgagagacctttcaggaggccaaatgctaattttaccagcaacagcttcacatcacagtactggaatgcggtcagccaccgggcccctgccattatctatgactgctatctgcggctcactggaaggaagcccaggatgacaaagctcatgaatcggcttttaagaactgtttccatgttggagtatttcatcaaccggagttgggaatggagcacgtacaatacagaaatgctgatgtctgagctgagtcctgaagaccagagagtattcaactttgacgtgcgccagttgaactggttggaatacattgaaaattatgttttgggagttaaaaaatacttattgaaagaggatatggctgggatcccaaaagcaaagcaacgcttaaaaaggctccgaaatattcactacctctttaatactgccctcttccttatcgcctggcgccttctcattgcaagatctcagatggctcggaatgtctggttcttcattgtaagcttctgttataaattcctctcctactttagagcatccagcacgctcaaagtttaagagcatttagccatcgccttttatctggaacctctcagatacctctaaaacagcaaactgtgattctcaagattagaaagtaacaaggaatatgcccaaactgtcaaatgtcacctgttatgtattcgtccctattccttaactatgtatttttatttcagtgagagaaggaaagttgtaaactagcccatagtcacctatattttagggaaaaaaatccaaattgtttcctaacattctattttatgcccttgcgtattaaacgtgaaagtactcccacttttctatatttagtttttcttttctctctgagatgattcatttaaactcagtaaatatggaaagatgcatggcagaagctgaaatgagctcaagcagtactaaccttggaaccattctgggtacccaaaagaaaaatttaaaatcaagatgagtaaaaggagaatggtctcaatatcctcaaaaatgcagtaagagaagtaattccccactgaaaatgtctctctttctttctatgttataccctggagtcctggttgaggggtgggggaatcagaaaagtaggtttacatttaacatttttcttaactacattcacttcttaaaaaggaacaagaagtgtaaataagtatgtatagagtgagggattaagcatatttgcattggggactcgtgtattatgcttttaagtcaaaattaatattctcaaattcgaatttgatagctattatttctaaatctttttaatcctcaattttcctggtaaccttctttcaagagtctccttcttctaaaagttgccaaaccctttatatttaagctttttccactcaggactcaattagagtggtcaacagggagagggatggtcccatttgatctttgccactgagcaaaacaaaacttcaaatgaacttttaaactgtagctttagtcttctggtataaagtggggaagattacacttatgtgatcaccaaaggatttactagtatcttggtcattccaattgcacaatgttaactgtacaacacacagcagaaaagtgaatagacttcactaagggattctaagtttagaaaataggttttgttttcttaaaaaattttgtgtataatacaaactaatgaaaactatacatattctccaattcctatagtaataataatgtaactgttacaccaactttcctcatatttgagagatgagtacatgttggattgcagcatttcttcatgttaaaaacatggaatattattcaaatatagtacttggggcctaaacaactaaaattagtcaccgcataactagttgaaaatggcataggcataaaatgttaataaagaatggcagttatatttatgctcacttcctggagtaattgggtaatattcagaaaggcacatcgtggtagtttaagtgtacaaggccttagggcagtatctagcccagtattattccagattctcctgagctctatataaagggcattttggaggaactcttctgggcaatatctttcccaatctcatctaaattctgggaaatattttccatagcagacaacccagctctgaaactaagcacctggtgatctttagtttgagatgtctatatggtacttttgagttatatcaattaagatacaagctatagacatgataaaaatatgaaatcaagatatagctcagtgggattggattaagacataataatagttctaagaattcacttttgattgtatgttttaccaattcaataattccactaatcaagtattcacattttgacttttgattaaataaaaatttgaattaaaattattcccctct

SEQ ID NO: 370536 - DNA, 801 bp, Homo sapiens
ggcctgcgcgcgcggccgccctgcccacgatgctgtcgcccccgcgacctgtagggccttcgctggcccctcaccctcctcccgccccgggctgaggctgccgccggtttcgcgcccagtgccgaggcagcggcggagccggggaaggtcggagggagggtggtttcctcccgccccacacccagtctccgagccggatatatagagtgtcacgtttgggagccgaaagactggagccgtttccttgtggctggagcgcttcccgtagcctcggggaaggagcaggatttagaggaccactagttggaccccatcctcgtgctggaggaacaggagttcatggcctccttgatgcccagcctcctacattctagatgtccagaggctccaggcagggccagcttcatggaaatacaaaactgcaaccgcacagggccttgcacttggaagggccctgcgtttggtaatgttctgctatcaccgtctgctggcttaataattttcaaagaggctctggatcttcattttgaactgggtcctacaaattatatcctgaccccaggctgacaaacttggtctaaaactaaccaaataacagtgtttgaacagcaatcccacatttacggtgagttctccagtacaaacctgaaatttatctgctgctcacttaggtgctcttggacatgtcattcagtcttcctacatttcagtttcctcattgacaaaataaagacaacagatgacaccttctactttctttattttcaaggttgtactatctctaagtaaaaagaggtaata

SEQ ID NO: 370537 - DNA, 2032 bp, Homo sapiens
ggcctgcgcgcgcggccgccctgcccacgatgctgtcgcccccgcgacctgtagggccttcgctggcccctcaccctcctcccgccccgggctgaggctgccgccggtttcgcgcccagtgccgaggcagcggcggagccggggaaggtcggagggagggtggtttcctcccgccccacacccagtctccgagccggatatatagagtgtcacgtttgggagccgaaagactggagccgtttccttgtggctggagcgcttcccgtagcctcggggaaggagcaggatttagaggaccactagttggaccccatcctcgtgctggaggaacaggaacctctttcaggagctataaaagaaagggaggaatcatgtccacaattgcagctttctatggcggcaagtccattctcatcacgggggccacaggctttctgggcaaagtgctaatggagaagctgtttcgcaccagcccagacctgaaagtcatttacatccttgtgaggcccaaggctggccagacactgcagcagagggttttccagatcctagacagtaagctatttgagaaagtcaaagaagtttgtccaaatgtgcatgagaagatcagagctatttatgcagatctcaatcagaatgactttgccatcagcaaagaggacatgcaggagcttctctcctgtacaaacataatatttcactgtgcagccactgtacgctttgacgacactctcagacatgctgtgcaacttaacgtcactgccacccggcagctcttgcttatggctagtcagatgccaaagctggaagcctttatacatatctctactgcctattcaaattgtaacctgaagcacatcgatgaagttatctatccgtgccctgtggagccaaaaaaaatcattgattcccttgagtggttagacgatgctattattgacgagattacacccaagctgatcagagattggcccaatatttatacctacaccaaggccttgggagaaatggtggtgcagcaagagagcaggaacctgaacattgccatcataaggccctccattgtgggagcaacttggcaggagcctttcccaggttgggttgataatataaatggacctaatggaatcattattgcgactgggaaagggtttcttcgggccataaaagctactccaatggctgtggcagacgtaattccagttgatacagtcgtcaatctcatgctagctgtaggatggtatactgcagttcacagacctaagtcaacattagtctaccacattacatctggtaacatgaatccctgcaattggcacaaaatgggagtccaagtcttggcaacctttgaaaaaatcccatttgagagacctttcaggaggccaaatgctaattttaccagcaacagcttcacatcacagtactggaatgcggtcagccaccgggcccctgccattatctatgactgctatctgcggctcactggaaggaagcccaggatgacaaagctcatgaatcggcttttaagaactgtttccatgttggagtatttcatcaaccggagttgggaatggagcacgtacaatacagaaatgctgatgtctgagctgagtcctgaagaccagagagtattcaactttgacgtgcgccagttgaactggttggaatacattgaaaattatgttttgggagttaaaaaatacttattgaaagaggatatggctgggatcccaaaagcaaagcaacgcttaaaaaggctccgaaatattcactacctctttaatactgccctcttccttatcgcctggcgccttctcattgcaagatctcagatggctcggaatgtctggttcttcattatgtagtttcacttatttccttcaggctttttatcagcaagaagcaatgtctgattttgataccacccatttgctatgaaaatataagaaggcgtcatcttcaaagcaacactccagttgggcttcttcatcgtttagctgcatgatttcttctacgacatttgtaacagaca

SEQ ID NO: 370538 - DNA, 493 bp, Homo sapiens
atcttttacttaaacctttaataaagattcaaataaaatgttaagaaactttctaaatggttctgaaagtaatggtccagccagggaaataaggtctctcgcctctgtcttggggctttcagaatagactggatgaccttagaattaaaggcagattcatgtttttctgaacagtacctccttgtattgacaagtgtttccccaatagtttgttttacagtaaatgcttcaactaaagaatccaattattaacccattcacactgtttcagtttgcagataaccatttgcccagcacaaaaatctttatattgttctcagaaattgattcttgactctacacagcaaatccttcgtctttattgttttgacccattacaaatgctttccactatgatggacttatattctccttttctcctctagcacttactttcttttttccccaggagtccaagtcttggcaacctttgaaaaaatcccatttgagagac

SEQ ID NO: 370539 - DNA, 496 bp, Homo sapiens
agggtccaacctatgtctcccaaattgaaggtcactcgtctatgtagaagaaacctcaagtggacaaagtgactgtccagcactgcaattctggcaatctataatctctcttgcctctcaggtattcaactttgacgtgcgccagttgaactggttggaatacattgaaaattatgttttgggagttaaaaaatacttattgaaagaggatatggctgggatcccaaaagcaaagcaacgcttaaaaaggtaagtataatcagtcagttaatatttattgagcacctactgtgcatcgactttataccagacataacatttgtgcagaggagaatgaacatttcttgagcatttactacattacaggtcctgcactccatactctaccctgtaacacagtttcatttagacttcaccacacctctatgaggcaagtattacttttgttaccccatttttatgaggcagatatctagatttaaacacagcaaataac

SEQ ID NO: 370540 - DNA, 2095 bp, Homo sapiens
ccacagagcctttcaattcagcttggggtgagctgcacttcaggcatggggatataatagtgtgatgaaccattcttctgaaggttcttctgaaaagctgctggtcttgggatactgtgagagcccctctcattgctctttagaagtaatttaaatttttctgctacattgtctgctcagctcgtattctggtcatagaggaacctgaagccagagaaactagacaaaaaggaacctctttcaggagctataaaagaaagggaggaatcatgtccacaattgcagctttctatggcggcaagtccattctcatcacgggggccacaggctttctgggcaaagtgctaatggagaagctgtttcgcaccagcccagacctgaaagtcatttacatccttgtgaggcccaaggctggccagacactgcagcagagggttttccagatcctagacagtaagctatttgagaaagtcaaagaagtttgtccaaatgtgcatgagaagatcagagctatttatgcagatctcaatcagaatgactttgccatcagcaaagaggacatgcaggagcttctctcctgtacaaacataatatttcactgtgcagccactgtacgctttgacgacactctcagacatgctgtgcaacttaacgtcactgccacccggcagctcttgcttatggctagtcagatgccaaagctggaagcctttatacatatctctactgcctattcaaattgtaacctgaagcacatcgatgaagttatctatccgtgccctgtggagccaaaaaaaatcattgattcccttgagtggttagacgatgctattattgacgagattacacccaagctgatcagagattggcccaatatttatacctacaccaaggccttgggagaaatggtggtgcagcaagagagcaggaacctgaacattgccatcataaggccctccattgtgggagcaacttggcaggagcctttcccaggttgggttgataatataaatggacctaatggaatcattattgcgactgggaaagggtttcttcgggccataaaagctactccaatggctgtggcagacgtaattccagttgatacagtcgtcaatctcatgctagctgtaggatggtatactgcagttcacagacctaagtcaacattagtctaccacattacatctggtaacatgaatccctgcaattggcacaaaatgggagtccaagtcttggcaacctttgaaaaaatcccatttgagagacctttcaggaggccaaatgctaattttaccagcaacagcttcacatcacagtactggaatgcggtcagccaccgggcccctgccattatctatgactgctatctgcggctcactggaaggaagcccaggatgacaaagctcatgaatcggcttttaagaactgtttccatgttggagtatttcatcaaccggagttgggaatggagcacgtacaatacagaaatgctgatgtctgagctgagtcctgaagaccagagagtattcaactttgacgtgcgccagttgaactggttggaatacattgaaaattatgttttgggagttaaaaaatacttattgaaagaggatatggctgggatcccaaaagcaaagcaacgcttaaaaaggctccgaaatattcactacctctttaatactgccctcttccttatcgcctggcgccttctcattgcaagatctcagatggctcggaatgtctggttcttcattgtaagcttctgttataaattcctctcctactttagagcatccagcacgctcaaagtttaagagcatttagccatcgccttttatctggaacctctcagatacctctaaaacagcaaactgtgattctcaagattagaaagtaacaaggaatatgcccaaactgtcaaatgtcacctgttatgtattcgtccctattccttaactatgtatttttatttcagtgagagaaggaaagttgtaaactagcccatagtcacctatattttagggaaaaaaatccaaattgtttcctaacattctattttatgcccttgcgtattaaacgtgaaagtactccc

SEQ ID NO: 370541 - DNA, 3829 bp, Homo sapiens
ggcctgcgcgcgcggccgccctgcccacgatgctgtcgcccccgcgacctgtagggccttcgctggcccctcaccctcctcccgccccgggctgaggctgccgccggtttcgcgcccagtgccgaggcagcggcggagccggggaaggtcggagggagggtggtttcctcccgccccacacccagtctccgagccggatatatagagtgtcacgtttgggagccgaaagactggagccgtttccttgtggctggagcgcttcccgtagcctcggggaaggagcaggatttagaggaccactagttggaccccatcctcgtgctggaggaacaggaacctctttcaggagctataaaagaaagggaggaatcatgtccacaattgcagctttctatggcggcaagtccattctcatcacgggggccacaggctttctgggcaaagtgctaatggagaagctgtttcgcaccagcccagacctgaaagtcatttacatccttgtgaggcccaaggctggccagacactgcagcagagggttttccagatcctagacagtaagtttgaaagctactgatgcgaagattgctctgggcagttataaagggaaatgagttgtatgcagttattcatctgcaatgctatttgagaaagtcaaagaagtttgtccaaatgtgcatgagaagatcagagctatttatgcagatctcaatcagaatgactttgccatcagcaaagaggacatgcaggagcttctctcctgtacaaacataatatttcactgtgcagccactgtacgctttgacgacactctcagacatgctgtgcaacttaacgtcactgccacccggcagctcttgcttatggctagtcagatgccaaagctggaagcctttatacatatctctactgcctattcaaattgtaacctgaagcacatcgatgaagttatctatccgtgccctgtggagccaaaaaaaatcattgattcccttgagtggttagacgatgctattattgacgagattacacccaagctgatcagagattggcccaatatttatacctacaccaaggccttgggagaaatggtggtgcagcaagagagcaggaacctgaacattgccatcataaggccctccattgtgggagcaacttggcaggagcctttcccaggttgggttgataatataaatggacctaatggaatcattattgcgactgggaaagggtttcttcgggccataaaagctactccaatggctgtggcagacgtaattccagttgatacagtcgtcaatctcatgctagctgtaggatggtatactgcagttcacagacctaagtcaacattagtctaccacattacatctggtaacatgaatccctgcaattggcacaaaatgggagtccaagtcttggcaacctttgaaaaaatcccatttgagagacctttcaggaggccaaatgctaattttaccagcaacagcttcacatcacagtactggaatgcggtcagccaccgggcccctgccattatctatgactgctatctgcggctcactggaaggaagcccaggatgacaaagctcatgaatcggcttttaagaactgtttccatgttggagtatttcatcaaccggagttgggaatggagcacgtacaatacagaaatgctgatgtctgagctgagtcctgaagaccagagagtattcaactttgacgtgcgccagttgaactggttggaatacattgaaaattatgttttgggagttaaaaaatacttattgaaagaggatatggctgggatcccaaaagcaaagcaacgcttaaaaaggctccgaaatattcactacctctttaatactgccctcttccttatcgcctggcgccttctcattgcaagatctcagatggctcggaatgtctggttcttcattgtaagcttctgttataaattcctctcctactttagagcatccagcacgctcaaagtttaagagcatttagccatcgccttttatctggaacctctcagatacctctaaaacagcaaactgtgattctcaagattagaaagtaacaaggaatatgcccaaactgtcaaatgtcacctgttatgtattcgtccctattccttaactatgtatttttatttcagtgagagaaggaaagttgtaaactagcccatagtcacctatattttagggaaaaaaatccaaattgtttcctaacattctattttatgcccttgcgtattaaacgtgaaagtactcccacttttctatatttagtttttcttttctctctgagatgattcatttaaactcagtaaatatggaaagatgcatggcagaagctgaaatgagctcaagcagtactaaccttggaaccattctgggtacccaaaagaaaaatttaaaatcaagatgagtaaaaggagaatggtctcaatatcctcaaaaatgcagtaagagaagtaattccccactgaaaatgtctctctttctttctatgttataccctggagtcctggttgaggggtgggggaatcagaaaagtaggtttacatttaacatttttcttaactacattcacttcttaaaaaggaacaagaagtgtaaataagtatgtatagagtgagggattaagcatatttgcattggggactcgtgtattatgcttttaagtcaaaattaatattctcaaattcgaatttgatagctattatttctaaatctttttaatcctcaattttcctggtaaccttctttcaagagtctccttcttctaaaagttgccaaaccctttatatttaagctttttccactcaggactcaattagagtggtcaacagggagagggatggtcccatttgatctttgccactgagcaaaacaaaacttcaaatgaacttttaaactgtagctttagtcttctggtataaagtggggaagattacacttatgtgatcaccaaaggatttactagtatcttggtcattccaattgcacaatgttaactgtacaacacacagcagaaaagtgaatagacttcactaagggattctaagtttagaaaataggttttgttttcttaaaaaattttgtgtataatacaaactaatgaaaactatacatattctccaattcctatagtaataataatgtaactgttacaccaactttcctcatatttgagagatgagtacatgttggattgcagcatttcttcatgttaaaaacatggaatattattcaaatatagtacttggggcctaaacaactaaaattagtcaccgcataactagttgaaaatggcataggcataaaatgttaataaagaatggcagttatatttatgctcacttcctggagtaattgggtaatattcagaaaggcacatcgtggtagtttaagtgtacaaggccttagggcagtatctagcccagtattattccagattctcctgagctctatataaagggcattttggaggaactcttctgggcaatatctttcccaatctcatctaaattctgggaaatattttccatagcagacaacccagctctgaaactaagcacctggtgatctttagtttgagatgtctatatggtacttttgagttatatcaattaagatacaagctatagacatgataaaaatatgaaatcaagatatagctcagtgggattggattaagacataataatagttctaagaattcacttttgattgtatgttttaccaattcaataattccactaatcaagtattcacattttgacttttgattaaataaaaatttgaattaaaattattcccctct

SEQ ID NO: 370542 - DNA, 3589 bp, Homo sapiens
tcaaacgcgcgacgcgagggcgggggcgccgcgtgcgcgcgcgctctcgttggttcgctctctcgctagctctcggctgccgctcttgctgcgcctgcggctggggctgggggcggcggcggcggcgacggggcggcgggcggcgcggggcggtccggcgggttcaaagaggaaaacatggcggaaaacaaaggcggcggcgaggctgagagcggcggcgggggcagcggcagcgcgccggtaactgccggggccgccgggcccgccgcgcaggaggcggagccgcctctcaccgcggtgctggtggaggaggaggaggaggaaggcggcagggccggcgctgagggcggcgcggccgggcccgacgacgggggggtggccgcggcctcctcgggctcggcccaggctgcttcatctcctgcggcctcagtgggcactggagttgccgggggcgcagtatcgacgccggctccagctccagcctcggctcccgctccgggtccctcggcagggccgcctcctggaccgccagcctcgctcctggacacctgcgccgtgtgtcagcagagcttgcagagccggcgtgaggcggagcccaagctgctgccctgtcttcactccttctgcctgcgctgcctgcccgagccggagcgccagctcagcgtgcccatcccggggggcagcaacggcgacatccagcaagttggtgtaatacggtgcccagtatgccgccaagaatgcagacagatagaccttgtggataattattttgtgaaagacacatctgaagctcctagcagttctgatgaaaaatcagaacaggtatgtactagttgtgaagacaatgcaagtgcagttggcttttgtgtagaatgtggagagtggctatgtaagacatgtatcgaagcacatcaaagagtaaaatttactaaagatcacttgatcaggaagaaagaagatgtctcagagtctgttggagcatctggtcaacgccctgttttctgccctgtacacaaacaagaacagttgaaacttttctgtgaaacatgtgatagattgacatgtagagactgtcagctattggaacacaaagaacataggtatcagtttttggaagaagcttttcaaaatcagaagggtgcaattgagaatctactggcgaaacttcttgagaagaagaattatgttcattttgcagctactcaggtgcagaataggataaaagaagtaaatgagactaacaaacgagtagaacaggaaattaaagtggccattttcacccttatcaatgaaattaataagaaaggaaaatctctcttacaacagctagagaatgttacaaaggaaagacagatgaagttactacagcagcagaatgacatcacaggcctttcccggcaggtgaagcatgttatgaacttcacaaattgggcaattgcaagtggcagcagcacagcactactatacagcaagcgactgattactttccagttgcgtcatattttgaaagcacggtgtgatcctgtccctgctgctaatggagcaatacgtttccattgtgatcccaccttctgggcaaagaatgtagtcaatttaggtaatctagtaatagagagtaaaccagctcctggttatactcctaatgttgtagttgggcaagttcctccagggacaaaccacattagtaaaacccctggacagattaacttagcacagcttcgactccagcacatgcaacaacaagtatatgcacagaaacatcagcagttgcaacagatgaggatgcagcaaccaccagcacctgtaccaactacaacaacaacaacacaacagcatcctagacaagcagcccctcagatgttacaacaacagcctcctcgattgatcagtgtgcaaacaatgcaaagaggcaacatgaactgtggagcttttcaagcccatcagatgagactggctcagaatgctgccagaataccagggatacccaggcacagcggccctcaatattccatgatgcagccacacctccaaagacaacactcaaacccagggcatgctggaccctttcccgtagtatcggtacacaacaccacaatcaacccaacgagccctactacagcaactatggcaaatgcaaaccgaggtcccaccagcccatctgttacagcaatagagctaatcccctcagttaccaatccagaaaaccttccatcgctgccagatattccacccatacagttggaagatgctggctcaagtagtttagataatctactaagtagatacatctcaggcagtcacctacccccacagcctacaagcaccatgaatccttctccaggtccctctgccctttctccgggatcatcaggtttatccaattctcacacacctgtgagacccccaagtacttctagtactggcagtcgaggcagctgtgggtcatcaggaagaactgctgagaagacaagtcttagtttcaaatctgatcaggtgaaggtcaagcaagaacctgggactgaagatgaaatatgtagcttttcaggaggtgtaaaacaagaaaaaacagaggatggcaggaggagtgcttgcatgttgagcagtcctgagagtagcttgacaccacctctctcaaccaacctgcatctagaaagtgaattggatgcattggcaagcctggaaaaccatgtgaaaactgaacctgcagatatgaatgaaagctgcaaacagtcagggctcagcagccttgttaatggaaagtccccaattcgaagcctcatgcacaggtcggcaaggattggaggagatggcaacaataaagatgatgacccaaatgaagactggtgtgctgtctgccaaaacggaggagatctcttgtgctgcgaaaaatgtccaaaggtctttcatctaacttgtcatgttccaacactacttagctttccaagtggggactggatatgcacattttgtagagatattggaaagccagaagttgaatatgattgtgataatttgcaacatagtaagaaggggaaaactgcgcaggggttaagccccgtggaccaaaggaaatgtgaacgtcttctgctttacctctattgccatgaattaagtattgaattccaggagcctgttcctgcttcgataccaaactactataaaattataaagaaaccaatggatttatccaccgtgaaaaagaagcttcagaaaaaacattcccaacactaccaaatcccggatgactttgtggccgatgtccgtttgatcttcaagaactgtgaaaggtttaatgaaatgatgaaagttgttcaagtttatgcagacacacaagagattaatttgaaggctgattcagaagtagctcaggcagggaaagcagttgcattgtactttgaagataaactcacagagatctactcagacaggaccttcgcacctttgccagagtttgagcaggaagaggatgatggtgaggtaactgaggactctgatgaagactttatacagccccgcagaaaacgcctaaagtcagatgagagaccagtacatataaagtaaaatgacatggatttaaatcaattgttta

SEQ ID NO: 370543 - DNA, 7827 bp, Homo sapiens
tcacgccatgtcacaaacaagaacagttgaaacttttctgtgaaacatgtgatagattgacatgtagagactgtcagctattggaacacaaagaacatagttggtgtaatacggtgcccagtatgccgccaagaatgcagacagatagaccttgtggataattattttgtgaaagacacatctgaagctcctagcagttctgatgaaaaatcagaacaggtatgtactagttgtgaagacaatgcaagtgcagttggcttttgtgtagaatgtggagagtggctatgtaagacatgtatcgaagcacatcaaagagtaaaatttactaaagatcacttgatcaggaagaaagaagatgtctcagagtctgttggagcatctggtcaacgccctgttttctgccctgtacacaaacaagaacagttgaaacttttctgtgaaacatgtgatagattgacatgtagagactgtcagctattggaacacaaagaacataggtatcagtttttggaagaagcttttcaaaatcagaagggtgcaattgagaatctactggcgaaacttcttgagaagaagaattatgttcattttgcagctactcaggtgcagaataggataaaagaagtaaatgagactaacaaacgagtagaacaggaaattaaagtggccattttcacccttatcaatgaaattaataagaaaggaaaatctctcttacaacagctagagaatgttacaaaggaaagacagatgaagttactacagcagcagaatgacatcacaggcctttcccggcaggtgaagcatgttatgaacttcacaaattgggcaattgcaagtggcagcagcacagcactactatacagcaagcgactgattactttccagttgcgtcatattttgaaagcacggtgtgatcctgtccctgctgctaatggagcaatacgtttccattgtgatcccaccttctgggcaaagaatgtagtcaatttaggtaatctagtaatagagagtaaaccagctcctggttatactcctaatgttgtagttgggcaagttcctccagggacaaaccacattagtaaaacccctggacagattaacttagcacagcttcgactccagcacatgcaacaacaagtatatgcacagaaacatcagcagttgcaacagatgaggatgcagcaaccaccagcacctgtaccaactacaacaacaacaacacaacagcatcctagacaagcagcccctcagatgttacaacaacagcctcctcgattgatcagtgtgcaaacaatgcaaagaggcaacatgaactgtggagcttttcaagcccatcagatgagactggctcagaatgctgccagaataccagggatacccaggcacagcggccctcaatattccatgatgcagccacacctccaaagacaacactcaaacccagggcatgctggaccctttcccgtagtatcggtacacaacaccacaatcaacccaacgagccctactacagcaactatggcaaatgcaaaccgaggtcccaccagcccatctgttacagcaatagagctaatcccctcagttaccaatccagaaaaccttccatcgctgccagatattccacccatacagttggaagatgctggctcaagtagtttagataatctactaagtagatacatctcaggcagtcacctacccccacagcctacaagcaccatgaatccttctccaggtccctctgccctttctccgggatcatcaggtttatccaattctcacacacctgtgagacccccaagtacttctagtactggcagtcgaggcagctgtgggtcatcaggaagaactgctgagaagacaagtcttagtttcaaatctgatcaggtgaaggtcaagcaagaacctgggactgaagatgaaatatgtagcttttcaggaggtgtaaaacaagaaaaaacagaggatggcaggaggagtgcttgcatgttgagcagtcctgagagtagcttgacaccacctctctcaaccaacctgcatctagaaagtgaattggatgcattggcaagcctggaaaaccatgtgaaaactgaacctgcagatatgaatgaaagctgcaaacagtcagggctcagcagccttgttaatggaaagtccccaattcgaagcctcatgcacaggtcggcaaggattggaggagatggcaacaataaagatgatgacccaaatgaagactggtgtgctgtctgccaaaacggaggagatctcttgtgctgcgaaaaatgtccaaaggtctttcatctaacttgtcatgttccaacactacttagctttccaagtggggactggatatgcacattttgtagagatattggaaagccagaagttgaatatgattgtgataatttgcaacatagtaagaaggggaaaactgcgcaggggttaagccccgtggaccaaaggaaatgtgaacgtcttctgctttacctctattgccatgaattaagtattgaattccaggagcctgttcctgcttcgataccaaactactataaaattataaagaaaccaatggatttatccaccgtgaaaaagaagcttcagaaaaaacattcccaacactaccaaatcccggatgactttgtggccgatgtccgtttgatcttcaagaactgtgaaaggtttaatgaaatgatgaaagttgttcaagtttatgcagacacacaagagattaatttgaaggctgattcagaagtagctcaggcagggaaagcagttgcattgtactttgaagataaactcacagagatctactcagacaggaccttcgcacctttgccagagtttgagcaggaagaggatgatggtgaggtaactgaggactctgatgaagactttatacagccccgcagaaaacgcctaaagtcagatgagagaccagtacatataaagtaaaatgacatggatttaaatcaattgtttaaaaaaaaaaaacgaaaaaaaaaaaaaaaaacacaaaaacccagaaaacttttaagctgttgctggaatatcctgcctacagtgggcacctccttgaagaagctgatagcttttacacagtattagattgaaataatggacagaaacacattcttgtcaagaaagggggagagaagtctgtttgcaagtttcaaagcaaaaagcaaaagtgaaatgatttgaggatttctgttctaatggagatgattctctgattgttagaaatggcaaatattgatgattgtgtgctattgattggtgcaggatacttggtatacgagtaaatacttgagactcgtgtcacttgataaattttctttttggactaggtcgcacagttattaaaacaacttttaaccctcccccttcacacacatacatatcaggttgttttctagttaaaaacccaagtagctcagattctactttaatgtcagtgcagatttgcattgaatcatgccattatgttttttctcatttttatgctgttgggtcttagtttttaaattgatataaagaactcagcaatggttttattttctactcatacttagggtttaggaaacactaccactagttatcatttaatcaacttcaatggtctactgaaacaaaaatggtaacttttcattagtggattatttagagttatagtagttgtttccagaaaacacttcctcacaattgtacttcccaatcaaatcatgtgatcatacagttattcccatgaaaggcagaatgtttgtttcaaaattaatctagttttctgtacatttaaatttgagaaggtgacaactggctcttttccagtcttccttcatgtcagttttctgatagaccactattggcaaacagtatctgtcaactaccaaatgtgtaaaattttctgtatttcactttgtcttatttgtaaatagtgaactaaaacttttggcagatcagcaacatttgctgagcctgttttttaagctaatgtgtattcttactaatgttcctatcaagaatggatttgtaatatatgctgtctatttctaatgttcacattcatattttgaggttctatcttattttaatagagaacagacttctcaaaaaatcttcagaagcagcttattattgaaatatcgaaatattgaaataaacccggtggggttagattactcatctgtccaccaagtgggacatttgcatggactgggggcttaaaggacttagaagagacctgtaagtaaatcctgaaaatgagccaatccccacttgaatggttactggagtaaacccacctttaccaccccaattacagcacccgaggccgataaaccaacttggctctggttcatttttcttttcttcatttgtgatgctcagattcaaaatgtgtgttctacactgttacaggcttctcttttgtttgattaaagattttagtcctacttttgtatggacacattagaatattcagagaccaaaatagaagaatttgctgttagatatttttcagaagtcagcagatttgtggcaaatcatttatttgcctttttaaaaattcatttaagcagttcagagagtagactactcagaaaattatttcacgtaattgtctaagaggtcaatattttttaatgcatattgaatcaaataaagtgctctaaagaaattattatacaaattcctttgggttgtttttcttttcttaacaaggggtgggggtaaacaggaatatgattcaggctttctggttgtgtatttaaagagtattgattttattattactattgatttactttattcctggcttccttttcacttttctttcaatttttaaaaaataatttaagccgttgaaaatataccaaactgttgaaacattttactcaaattttaaattcctaaaaatgttttttaataagagggagaaaattatttaaaaatacttatgcctatgccaatttccctcttttttcacaaaatccatgatttcagtttgtaagtagacatatatctaagggcacatttttggaaagtgaggaatagcagcagtataacttcattttgtcaggcctttgagttctaatattttgtattgctcttcaaatggatccttttaaaaaaattgtagataatgagtcataaatagattctgccaactgaggggagaaacattttaagtaaatatttttcagtatttggggccttaaaaaataattgtgtttccttaaaattacatgttagatagagtttttaggtttttttggttttaagatggttaaagcaatttaaaagccacttttttgtcaacatttaatagcctccacttctgttaagataatgtatactgctgaggaattactattaatagctatcaacataccaccattaaattaaggtattcactttagattttttattaaagcttttttcttgcacactgatcgttgtgtttctaagctgattttttcagctctaatatacctatggttaaaaagtataaaaacttaaattgatatttagatatatgttttcctattagtttatgttttaaaaagacaaaattgtatctgtcagtccctgaaggcagtttgtttttatactctctcacatttgtatttgttttttaaatggcagtattttagaagatttggagaaaagtccacataataatgttttcttaaaagcttttaaagtttttgctgtacttcaatttacttcttccatcagaaaactaagaacaaagtgttgctcagtctgttccgctgacctaaatttgtgttttcagcacttggctcagccaattcactgagtgaaggaattgctttatgaggcaaagcatgtgaaagttctaaagtatggttagattgtaggtcgtgctctatatggaaacatcaaaccattactacagagaaatgataaggcattggatccactattgaaattattatttttggatcaacaagttggtactttctgacttctgtatcttaacataagggaattttaggtaatgctaagtcagttgtctcattttttgtgataagttttggaatttttagttaattgaaataaataatgcttttaaatagaagtaaaaggtttataagtgtgcaaattgtagatttatcaattacctcagcaggtatcctgccatgtaattattagtgattagtgttaataagataatagattcaggtcttccaactatgcccttggattgtggcctactgtatgttattaaatggtctcttactatccaaaatgggagtagatgctgtggccccgtctcccttggcttttacgtcccatatccacccccattcatgtacaacatgtgaaatataaaaatctcatttcttgtcaaaatcagcactgcttatttgcatactcagcatcggatcagtgagtagttttataaaaaatccacgcacccaactcccttagttaaaacagattcttaattcataccatgaattcttaatttctgtaccatctatgttaatgatctgctgaaggtgactcaagattttcaaggtgtaatacagtttgatcatgtaccggacctggatatttaattttttttccctcacagttaatctcctccttgataaagcaataacactgctttgagtctgttgcctaatagcatgtcagaatcctctcctggatggtgattttataggaaagtttgtatgcatatcacccagtctatcttttaaaaattaagaaatttaaatgtatgctggaagtaatgacactatattgtggcattttattttaaaaattggggaaagttgcatatttttttaaaagtaagtgtttgagtaaaaaaattgaaggtacttttttaaggaaaaaaatttatatgccacagtttacatagacatttcagattcaacacgtactcttgaatataatggtttcttttacttggtcaaaatgcatgtatagcatttctttcatcttagttccttgtgtttgcctatgtggtcctttatatatttttattgtatcgaagaaacaaaactatcttcaaaaataagttaatttggatatatttgtcatatcaaactacaaagtgtacaaagttaagtttagcccttttctagaaagtgatctttaaaattaaaaatgctcctcttttaaattcaccaaatttatgtgtgggaaggcaccaaaatgattttgtaagtgccactgcaatattccctttcaagtgtggcctaaatttcaatcttaaggatggaatgcatgtctgctccttgttctgaaaaatgtaggcatctactacattttaaaacacagtgaaacatatacataagcctataaaaaaagatttgtgcaatttgaaagcctgttaattttttatgtagacatacctacacacgaaagggttaaattcacagccttactagttccttgcttccagtatttcaattggtctcctcccctcattattattattactactagtactattatttttgcacatagttaactgcccttcaatatgattcttaaaaagtgctgtttctgtggtatcgtattctctaaataatcatatttaattttttaaaacaaggttgcagtttctaattgtttcgttcctgtgtttttgctggtgtgtaataaaagcaagttttttcttttcatggttatttaatacattagctgcctgtaaataattcttgttataatgctctggaatgtgttgtagaagttgtattagattagttttaaacccttgtttgaaagccacattgttttggttatttctattaaattagaaaattgaaaaagttttcaaatgaa

SEQ ID NO: 370544 - DNA, 7919 bp, Homo sapiens
tcacgccatgtcacaaacaagaacagttgaaacttttctgtgaaacatgtgatagattgacatgtagagactgtcagctattggaacacaaagaacatagagattgacagaatgtttgctaatatttcatttagaaatgtagagtcaatacgctggagtggtctgcagttttcttcttttgcattgcctttgttggtgtaatacggtgcccagtatgccgccaagaatgcagacagatagaccttgtggataattattttgtgaaagacacatctgaagctcctagcagttctgatgaaaaatcagaacaggtatgtactagttgtgaagacaatgcaagtgcagttggcttttgtgtagaatgtggagagtggctatgtaagacatgtatcgaagcacatcaaagagtaaaatttactaaagatcacttgatcaggaagaaagaagatgtctcagagtctgttggagcatctggtcaacgccctgttttctgccctgtacacaaacaagaacagttgaaacttttctgtgaaacatgtgatagattgacatgtagagactgtcagctattggaacacaaagaacataggtatcagtttttggaagaagcttttcaaaatcagaagggtgcaattgagaatctactggcgaaacttcttgagaagaagaattatgttcattttgcagctactcaggtgcagaataggataaaagaagtaaatgagactaacaaacgagtagaacaggaaattaaagtggccattttcacccttatcaatgaaattaataagaaaggaaaatctctcttacaacagctagagaatgttacaaaggaaagacagatgaagttactacagcagcagaatgacatcacaggcctttcccggcaggtgaagcatgttatgaacttcacaaattgggcaattgcaagtggcagcagcacagcactactatacagcaagcgactgattactttccagttgcgtcatattttgaaagcacggtgtgatcctgtccctgctgctaatggagcaatacgtttccattgtgatcccaccttctgggcaaagaatgtagtcaatttaggtaatctagtaatagagagtaaaccagctcctggttatactcctaatgttgtagttgggcaagttcctccagggacaaaccacattagtaaaacccctggacagattaacttagcacagcttcgactccagcacatgcaacaacaagtatatgcacagaaacatcagcagttgcaacagatgaggatgcagcaaccaccagcacctgtaccaactacaacaacaacaacacaacagcatcctagacaagcagcccctcagatgttacaacaacagcctcctcgattgatcagtgtgcaaacaatgcaaagaggcaacatgaactgtggagcttttcaagcccatcagatgagactggctcagaatgctgccagaataccagggatacccaggcacagcggccctcaatattccatgatgcagccacacctccaaagacaacactcaaacccagggcatgctggaccctttcccgtagtatcggtacacaacaccacaatcaacccaacgagccctactacagcaactatggcaaatgcaaaccgaggtcccaccagcccatctgttacagcaatagagctaatcccctcagttaccaatccagaaaaccttccatcgctgccagatattccacccatacagttggaagatgctggctcaagtagtttagataatctactaagtagatacatctcaggcagtcacctacccccacagcctacaagcaccatgaatccttctccaggtccctctgccctttctccgggatcatcaggtttatccaattctcacacacctgtgagacccccaagtacttctagtactggcagtcgaggcagctgtgggtcatcaggaagaactgctgagaagacaagtcttagtttcaaatctgatcaggtgaaggtcaagcaagaacctgggactgaagatgaaatatgtagcttttcaggaggtgtaaaacaagaaaaaacagaggatggcaggaggagtgcttgcatgttgagcagtcctgagagtagcttgacaccacctctctcaaccaacctgcatctagaaagtgaattggatgcattggcaagcctggaaaaccatgtgaaaactgaacctgcagatatgaatgaaagctgcaaacagtcagggctcagcagccttgttaatggaaagtccccaattcgaagcctcatgcacaggtcggcaaggattggaggagatggcaacaataaagatgatgacccaaatgaagactggtgtgctgtctgccaaaacggaggagatctcttgtgctgcgaaaaatgtccaaaggtctttcatctaacttgtcatgttccaacactacttagctttccaagtggggactggatatgcacattttgtagagatattggaaagccagaagttgaatatgattgtgataatttgcaacatagtaagaaggggaaaactgcgcaggggttaagccccgtggaccaaaggaaatgtgaacgtcttctgctttacctctattgccatgaattaagtattgaattccaggagcctgttcctgcttcgataccaaactactataaaattataaagaaaccaatggatttatccaccgtgaaaaagaagcttcagaaaaaacattcccaacactaccaaatcccggatgactttgtggccgatgtccgtttgatcttcaagaactgtgaaaggtttaatgaaatgatgaaagttgttcaagtttatgcagacacacaagagattaatttgaaggctgattcagaagtagctcaggcagggaaagcagttgcattgtactttgaagataaactcacagagatctactcagacaggaccttcgcacctttgccagagtttgagcaggaagaggatgatggtgaggtaactgaggactctgatgaagactttatacagccccgcagaaaacgcctaaagtcagatgagagaccagtacatataaagtaaaatgacatggatttaaatcaattgtttaaaaaaaaaaaacgaaaaaaaaaaaaaaaaacacaaaaacccagaaaacttttaagctgttgctggaatatcctgcctacagtgggcacctccttgaagaagctgatagcttttacacagtattagattgaaataatggacagaaacacattcttgtcaagaaagggggagagaagtctgtttgcaagtttcaaagcaaaaagcaaaagtgaaatgatttgaggatttctgttctaatggagatgattctctgattgttagaaatggcaaatattgatgattgtgtgctattgattggtgcaggatacttggtatacgagtaaatacttgagactcgtgtcacttgataaattttctttttggactaggtcgcacagttattaaaacaacttttaaccctcccccttcacacacatacatatcaggttgttttctagttaaaaacccaagtagctcagattctactttaatgtcagtgcagatttgcattgaatcatgccattatgttttttctcatttttatgctgttgggtcttagtttttaaattgatataaagaactcagcaatggttttattttctactcatacttagggtttaggaaacactaccactagttatcatttaatcaacttcaatggtctactgaaacaaaaatggtaacttttcattagtggattatttagagttatagtagttgtttccagaaaacacttcctcacaattgtacttcccaatcaaatcatgtgatcatacagttattcccatgaaaggcagaatgtttgtttcaaaattaatctagttttctgtacatttaaatttgagaaggtgacaactggctcttttccagtcttccttcatgtcagttttctgatagaccactattggcaaacagtatctgtcaactaccaaatgtgtaaaattttctgtatttcactttgtcttatttgtaaatagtgaactaaaacttttggcagatcagcaacatttgctgagcctgttttttaagctaatgtgtattcttactaatgttcctatcaagaatggatttgtaatatatgctgtctatttctaatgttcacattcatattttgaggttctatcttattttaatagagaacagacttctcaaaaaatcttcagaagcagcttattattgaaatatcgaaatattgaaataaacccggtggggttagattactcatctgtccaccaagtgggacatttgcatggactgggggcttaaaggacttagaagagacctgtaagtaaatcctgaaaatgagccaatccccacttgaatggttactggagtaaacccacctttaccaccccaattacagcacccgaggccgataaaccaacttggctctggttcatttttcttttcttcatttgtgatgctcagattcaaaatgtgtgttctacactgttacaggcttctcttttgtttgattaaagattttagtcctacttttgtatggacacattagaatattcagagaccaaaatagaagaatttgctgttagatatttttcagaagtcagcagatttgtggcaaatcatttatttgcctttttaaaaattcatttaagcagttcagagagtagactactcagaaaattatttcacgtaattgtctaagaggtcaatattttttaatgcatattgaatcaaataaagtgctctaaagaaattattatacaaattcctttgggttgtttttcttttcttaacaaggggtgggggtaaacaggaatatgattcaggctttctggttgtgtatttaaagagtattgattttattattactattgatttactttattcctggcttccttttcacttttctttcaatttttaaaaaataatttaagccgttgaaaatataccaaactgttgaaacattttactcaaattttaaattcctaaaaatgttttttaataagagggagaaaattatttaaaaatacttatgcctatgccaatttccctcttttttcacaaaatccatgatttcagtttgtaagtagacatatatctaagggcacatttttggaaagtgaggaatagcagcagtataacttcattttgtcaggcctttgagttctaatattttgtattgctcttcaaatggatccttttaaaaaaattgtagataatgagtcataaatagattctgccaactgaggggagaaacattttaagtaaatatttttcagtatttggggccttaaaaaataattgtgtttccttaaaattacatgttagatagagtttttaggtttttttggttttaagatggttaaagcaatttaaaagccacttttttgtcaacatttaatagcctccacttctgttaagataatgtatactgctgaggaattactattaatagctatcaacataccaccattaaattaaggtattcactttagattttttattaaagcttttttcttgcacactgatcgttgtgtttctaagctgattttttcagctctaatatacctatggttaaaaagtataaaaacttaaattgatatttagatatatgttttcctattagtttatgttttaaaaagacaaaattgtatctgtcagtccctgaaggcagtttgtttttatactctctcacatttgtatttgttttttaaatggcagtattttagaagatttggagaaaagtccacataataatgttttcttaaaagcttttaaagtttttgctgtacttcaatttacttcttccatcagaaaactaagaacaaagtgttgctcagtctgttccgctgacctaaatttgtgttttcagcacttggctcagccaattcactgagtgaaggaattgctttatgaggcaaagcatgtgaaagttctaaagtatggttagattgtaggtcgtgctctatatggaaacatcaaaccattactacagagaaatgataaggcattggatccactattgaaattattatttttggatcaacaagttggtactttctgacttctgtatcttaacataagggaattttaggtaatgctaagtcagttgtctcattttttgtgataagttttggaatttttagttaattgaaataaataatgcttttaaatagaagtaaaaggtttataagtgtgcaaattgtagatttatcaattacctcagcaggtatcctgccatgtaattattagtgattagtgttaataagataatagattcaggtcttccaactatgcccttggattgtggcctactgtatgttattaaatggtctcttactatccaaaatgggagtagatgctgtggccccgtctcccttggcttttacgtcccatatccacccccattcatgtacaacatgtgaaatataaaaatctcatttcttgtcaaaatcagcactgcttatttgcatactcagcatcggatcagtgagtagttttataaaaaatccacgcacccaactcccttagttaaaacagattcttaattcataccatgaattcttaatttctgtaccatctatgttaatgatctgctgaaggtgactcaagattttcaaggtgtaatacagtttgatcatgtaccggacctggatatttaattttttttccctcacagttaatctcctccttgataaagcaataacactgctttgagtctgttgcctaatagcatgtcagaatcctctcctggatggtgattttataggaaagtttgtatgcatatcacccagtctatcttttaaaaattaagaaatttaaatgtatgctggaagtaatgacactatattgtggcattttattttaaaaattggggaaagttgcatatttttttaaaagtaagtgtttgagtaaaaaaattgaaggtacttttttaaggaaaaaaatttatatgccacagtttacatagacatttcagattcaacacgtactcttgaatataatggtttcttttacttggtcaaaatgcatgtatagcatttctttcatcttagttccttgtgtttgcctatgtggtcctttatatatttttattgtatcgaagaaacaaaactatcttcaaaaataagttaatttggatatatttgtcatatcaaactacaaagtgtacaaagttaagtttagcccttttctagaaagtgatctttaaaattaaaaatgctcctcttttaaattcaccaaatttatgtgtgggaaggcaccaaaatgattttgtaagtgccactgcaatattccctttcaagtgtggcctaaatttcaatcttaaggatggaatgcatgtctgctccttgttctgaaaaatgtaggcatctactacattttaaaacacagtgaaacatatacataagcctataaaaaaagatttgtgcaatttgaaagcctgttaattttttatgtagacatacctacacacgaaagggttaaattcacagccttactagttccttgcttccagtatttcaattggtctcctcccctcattattattattactactagtactattatttttgcacatagttaactgcccttcaatatgattcttaaaaagtgctgtttctgtggtatcgtattctctaaataatcatatttaattttttaaaacaaggttgcagtttctaattgtttcgttcctgtgtttttgctggtgtgtaataaaagcaagttttttcttttcatggttatttaatacattagctgcctgtaaataattcttgttataatgctctggaatgtgttgtagaagttgtattagattagttttaaacccttgtttgaaagccacattgttttggttatttctattaaattagaaaattgaaaaagttttcaaatgaa

SEQ ID NO: 370545 - DNA, 7723 bp, Homo sapiens
tcacgccatgtcacaaacaagaacagttgaaacttttctgtgaaacatgtgatagattgacatgtagagactgtcagctattggaacacaaagaacatagttggtgtaatacggtgcccagtatgccgccaagaatgcagacagatagaccttgtggataattattttgtgaaagacacatctgaagctcctagcagttctgatgaaaaatcagaacaggtatgtactagttgtgaagacaatgcaagtgcagttggcttttgtgtagaatgtggagagtggctatgtaagacatgtatcgaagcacatcaaagagtaaaatttactaaagatcacttgatcaggaagaaagaagatgtctcagagtctgttggagcatctggtcaacgccctgttttctgccctgtacacaaacaagaacagttgaaacttttctgtgaaacatgtgatagattgacatgtagagactgtcagctattggaacacaaagaacataggtatcagtttttggaagaagcttttcaaaatcagaagggtgcaattgagaatctactggcgaaacttcttgagaagaagaattatgttcattttgcagctactcaggtgcagaataggataaaagaagtaaatgagactaacaaacgagtagaacaggaaattaaagtggccattttcacccttatcaatgaaattaataagaaaggaaaatctctcttacaacagctagagaatgttacaaaggaaagacagatgaagttactacagcagcagaatgacatcacaggcctttcccggcaggtgaagcatgttatgaacttcacaaattgggcaattgcaagtggcagcagcacagcactactatacagcaagcgactgattactttccagttgcgtcatattttgaaagcacggtgtgatcctgtccctgctgctaatggagcaatacgtttccattgtgatcccaccttctgggcaaagaatgtagtcaatttagattaacttagcacagcttcgactccagcacatgcaacaacaagtatatgcacagaaacatcagcagttgcaacagatgaggatgcagcaaccaccagcacctgtaccaactacaacaacaacaacacaacagcatcctagacaagcagcccctcagatgttacaacaacagcctcctcgattgatcagtgtgcaaacaatgcaaagaggcaacatgaactgtggagcttttcaagcccatcagatgagactggctcagaatgctgccagaataccagggatacccaggcacagcggccctcaatattccatgatgcagccacacctccaaagacaacactcaaacccagggcatgctggaccctttcccgtagtatcggtacacaacaccacaatcaacccaacgagccctactacagcaactatggcaaatgcaaaccgaggtcccaccagcccatctgttacagcaatagagctaatcccctcagttaccaatccagaaaaccttccatcgctgccagatattccacccatacagttggaagatgctggctcaagtagtttagataatctactaagtagatacatctcaggcagtcacctacccccacagcctacaagcaccatgaatccttctccaggtccctctgccctttctccgggatcatcaggtttatccaattctcacacacctgtgagacccccaagtacttctagtactggcagtcgaggcagctgtgggtcatcaggaagaactgctgagaagacaagtcttagtttcaaatctgatcaggtgaaggtcaagcaagaacctgggactgaagatgaaatatgtagcttttcaggaggtgtaaaacaagaaaaaacagaggatggcaggaggagtgcttgcatgttgagcagtcctgagagtagcttgacaccacctctctcaaccaacctgcatctagaaagtgaattggatgcattggcaagcctggaaaaccatgtgaaaactgaacctgcagatatgaatgaaagctgcaaacagtcagggctcagcagccttgttaatggaaagtccccaattcgaagcctcatgcacaggtcggcaaggattggaggagatggcaacaataaagatgatgacccaaatgaagactggtgtgctgtctgccaaaacggaggagatctcttgtgctgcgaaaaatgtccaaaggtctttcatctaacttgtcatgttccaacactacttagctttccaagtggggactggatatgcacattttgtagagatattggaaagccagaagttgaatatgattgtgataatttgcaacatagtaagaaggggaaaactgcgcaggggttaagccccgtggaccaaaggaaatgtgaacgtcttctgctttacctctattgccatgaattaagtattgaattccaggagcctgttcctgcttcgataccaaactactataaaattataaagaaaccaatggatttatccaccgtgaaaaagaagcttcagaaaaaacattcccaacactaccaaatcccggatgactttgtggccgatgtccgtttgatcttcaagaactgtgaaaggtttaatgaaatgatgaaagttgttcaagtttatgcagacacacaagagattaatttgaaggctgattcagaagtagctcaggcagggaaagcagttgcattgtactttgaagataaactcacagagatctactcagacaggaccttcgcacctttgccagagtttgagcaggaagaggatgatggtgaggtaactgaggactctgatgaagactttatacagccccgcagaaaacgcctaaagtcagatgagagaccagtacatataaagtaaaatgacatggatttaaatcaattgtttaaaaaaaaaaaacgaaaaaaaaaaaaaaaaacacaaaaacccagaaaacttttaagctgttgctggaatatcctgcctacagtgggcacctccttgaagaagctgatagcttttacacagtattagattgaaataatggacagaaacacattcttgtcaagaaagggggagagaagtctgtttgcaagtttcaaagcaaaaagcaaaagtgaaatgatttgaggatttctgttctaatggagatgattctctgattgttagaaatggcaaatattgatgattgtgtgctattgattggtgcaggatacttggtatacgagtaaatacttgagactcgtgtcacttgataaattttctttttggactaggtcgcacagttattaaaacaacttttaaccctcccccttcacacacatacatatcaggttgttttctagttaaaaacccaagtagctcagattctactttaatgtcagtgcagatttgcattgaatcatgccattatgttttttctcatttttatgctgttgggtcttagtttttaaattgatataaagaactcagcaatggttttattttctactcatacttagggtttaggaaacactaccactagttatcatttaatcaacttcaatggtctactgaaacaaaaatggtaacttttcattagtggattatttagagttatagtagttgtttccagaaaacacttcctcacaattgtacttcccaatcaaatcatgtgatcatacagttattcccatgaaaggcagaatgtttgtttcaaaattaatctagttttctgtacatttaaatttgagaaggtgacaactggctcttttccagtcttccttcatgtcagttttctgatagaccactattggcaaacagtatctgtcaactaccaaatgtgtaaaattttctgtatttcactttgtcttatttgtaaatagtgaactaaaacttttggcagatcagcaacatttgctgagcctgttttttaagctaatgtgtattcttactaatgttcctatcaagaatggatttgtaatatatgctgtctatttctaatgttcacattcatattttgaggttctatcttattttaatagagaacagacttctcaaaaaatcttcagaagcagcttattattgaaatatcgaaatattgaaataaacccggtggggttagattactcatctgtccaccaagtgggacatttgcatggactgggggcttaaaggacttagaagagacctgtaagtaaatcctgaaaatgagccaatccccacttgaatggttactggagtaaacccacctttaccaccccaattacagcacccgaggccgataaaccaacttggctctggttcatttttcttttcttcatttgtgatgctcagattcaaaatgtgtgttctacactgttacaggcttctcttttgtttgattaaagattttagtcctacttttgtatggacacattagaatattcagagaccaaaatagaagaatttgctgttagatatttttcagaagtcagcagatttgtggcaaatcatttatttgcctttttaaaaattcatttaagcagttcagagagtagactactcagaaaattatttcacgtaattgtctaagaggtcaatattttttaatgcatattgaatcaaataaagtgctctaaagaaattattatacaaattcctttgggttgtttttcttttcttaacaaggggtgggggtaaacaggaatatgattcaggctttctggttgtgtatttaaagagtattgattttattattactattgatttactttattcctggcttccttttcacttttctttcaatttttaaaaaataatttaagccgttgaaaatataccaaactgttgaaacattttactcaaattttaaattcctaaaaatgttttttaataagagggagaaaattatttaaaaatacttatgcctatgccaatttccctcttttttcacaaaatccatgatttcagtttgtaagtagacatatatctaagggcacatttttggaaagtgaggaatagcagcagtataacttcattttgtcaggcctttgagttctaatattttgtattgctcttcaaatggatccttttaaaaaaattgtagataatgagtcataaatagattctgccaactgaggggagaaacattttaagtaaatatttttcagtatttggggccttaaaaaataattgtgtttccttaaaattacatgttagatagagtttttaggtttttttggttttaagatggttaaagcaatttaaaagccacttttttgtcaacatttaatagcctccacttctgttaagataatgtatactgctgaggaattactattaatagctatcaacataccaccattaaattaaggtattcactttagattttttattaaagcttttttcttgcacactgatcgttgtgtttctaagctgattttttcagctctaatatacctatggttaaaaagtataaaaacttaaattgatatttagatatatgttttcctattagtttatgttttaaaaagacaaaattgtatctgtcagtccctgaaggcagtttgtttttatactctctcacatttgtatttgttttttaaatggcagtattttagaagatttggagaaaagtccacataataatgttttcttaaaagcttttaaagtttttgctgtacttcaatttacttcttccatcagaaaactaagaacaaagtgttgctcagtctgttccgctgacctaaatttgtgttttcagcacttggctcagccaattcactgagtgaaggaattgctttatgaggcaaagcatgtgaaagttctaaagtatggttagattgtaggtcgtgctctatatggaaacatcaaaccattactacagagaaatgataaggcattggatccactattgaaattattatttttggatcaacaagttggtactttctgacttctgtatcttaacataagggaattttaggtaatgctaagtcagttgtctcattttttgtgataagttttggaatttttagttaattgaaataaataatgcttttaaatagaagtaaaaggtttataagtgtgcaaattgtagatttatcaattacctcagcaggtatcctgccatgtaattattagtgattagtgttaataagataatagattcaggtcttccaactatgcccttggattgtggcctactgtatgttattaaatggtctcttactatccaaaatgggagtagatgctgtggccccgtctcccttggcttttacgtcccatatccacccccattcatgtacaacatgtgaaatataaaaatctcatttcttgtcaaaatcagcactgcttatttgcatactcagcatcggatcagtgagtagttttataaaaaatccacgcacccaactcccttagttaaaacagattcttaattcataccatgaattcttaatttctgtaccatctatgttaatgatctgctgaaggtgactcaagattttcaaggtgtaatacagtttgatcatgtaccggacctggatatttaattttttttccctcacagttaatctcctccttgataaagcaataacactgctttgagtctgttgcctaatagcatgtcagaatcctctcctggatggtgattttataggaaagtttgtatgcatatcacccagtctatcttttaaaaattaagaaatttaaatgtatgctggaagtaatgacactatattgtggcattttattttaaaaattggggaaagttgcatatttttttaaaagtaagtgtttgagtaaaaaaattgaaggtacttttttaaggaaaaaaatttatatgccacagtttacatagacatttcagattcaacacgtactcttgaatataatggtttcttttacttggtcaaaatgcatgtatagcatttctttcatcttagttccttgtgtttgcctatgtggtcctttatatatttttattgtatcgaagaaacaaaactatcttcaaaaataagttaatttggatatatttgtcatatcaaactacaaagtgtacaaagttaagtttagcccttttctagaaagtgatctttaaaattaaaaatgctcctcttttaaattcaccaaatttatgtgtgggaaggcaccaaaatgattttgtaagtgccactgcaatattccctttcaagtgtggcctaaatttcaatcttaaggatggaatgcatgtctgctccttgttctgaaaaatgtaggcatctactacattttaaaacacagtgaaacatatacataagcctataaaaaaagatttgtgcaatttgaaagcctgttaattttttatgtagacatacctacacacgaaagggttaaattcacagccttactagttccttgcttccagtatttcaattggtctcctcccctcattattattattactactagtactattatttttgcacatagttaactgcccttcaatatgattcttaaaaagtgctgtttctgtggtatcgtattctctaaataatcatatttaattttttaaaacaaggttgcagtttctaattgtttcgttcctgtgtttttgctggtgtgtaataaaagcaagttttttcttttcatggttatttaatacattagctgcctgtaaataattcttgttataatgctctggaatgtgttgtagaagttgtattagattagttttaaacccttgtttgaaagccacattgttttggttatttctattaaattagaaaattgaaaaagttttcaaatgaa

SEQ ID NO: 370546 - DNA, 7626 bp, Homo sapiens
tcacgccatgtcacaaacaagaacagttgaaacttttctgtgaaacatgtgatagattgacatgtagagactgtcagctattggaacacaaagaacatagttggtgtaatacggtgcccagtatgccgccaagaatgcagacagatagaccttgtggataattattttgtgaaagacacatctgaagctcctagcagttctgatgaaaaatcagaacaggtatgtactagttgtgaagacaatgcaagtgcagttggcttttgtgtagaatgtggagagtggctatgtaagacatgtatcgaagcacatcaaagagtaaaatttactaaagatcacttgatcaggaagaaagaagatgtctcagagtctgttggagcatctggtcaacgccctgttttctgccctgtacacaaacaagaacagttgaaacttttctgtgaaacatgtgatagattgacatgtagagactgtcagctattggaacacaaagaacataggtatcagtttttggaagaagcttttcaaaatcagaagggtgcaattgagaatctactggcgaaacttcttgagaagaagaattatgttcattttgcagctactcaggtgcagaataggataaaagaagtaaatgagactaacaaacgagtagaacaggaaattaaagtggccattttcacccttatcaatgaaattaataagaaaggaaaatctctcttacaacagctagagaatgttacaaaggaaagacagatgaagttactacagcagcagaatgacatcacaggcctttcccggcaggtgaagcatgttatgaacttcacaaattgggcaattgcaagtggcagcagcacagcactactatacagcaagcgactgattactttccagttgcgtcatattttgaaagcacggtgtgatcctgtccctgctgctaatggagcaatacgtttccattgtgatcccaccttctgggcaaagaatgtagtcaatttaggtaatctagtaatagagagtaaaccagctcctggttatactcctaatgttgtagttgggcaagttcctccagggacaaaccacattagtaaaacccctggacagattaacttagcacagcttcgactccagcacatgcaacaacaagtatatgcacagaaacatcagcagttgcaacagatgaggatgcagcaaccaccagcacctgtaccaactacaacaacaacaacacaacagcatcctagacaagcagcccctcagatgttacaacaacagcctcctcgattgatcagtgtgcaaacaatgcaaagaggcaacatgaactgtggagcttttcaagcccatcagatgagactggctcagaatgctgccagaataccagggatacccaggcacagcggccctcaatattccatgatgcagccacacctccaaagacaattggaagatgctggctcaagtagtttagataatctactaagtagatacatctcaggcagtcacctacccccacagcctacaagcaccatgaatccttctccaggtccctctgccctttctccgggatcatcaggtttatccaattctcacacacctgtgagacccccaagtacttctagtactggcagtcgaggcagctgtgggtcatcaggaagaactgctgagaagacaagtcttagtttcaaatctgatcaggtgaaggtcaagcaagaacctgggactgaagatgaaatatgtagcttttcaggaggtgtaaaacaagaaaaaacagaggatggcaggaggagtgcttgcatgttgagcagtcctgagagtagcttgacaccacctctctcaaccaacctgcatctagaaagtgaattggatgcattggcaagcctggaaaaccatgtgaaaactgaacctgcagatatgaatgaaagctgcaaacagtcagggctcagcagccttgttaatggaaagtccccaattcgaagcctcatgcacaggtcggcaaggattggaggagatggcaacaataaagatgatgacccaaatgaagactggtgtgctgtctgccaaaacggaggagatctcttgtgctgcgaaaaatgtccaaaggtctttcatctaacttgtcatgttccaacactacttagctttccaagtggggactggatatgcacattttgtagagatattggaaagccagaagttgaatatgattgtgataatttgcaacatagtaagaaggggaaaactgcgcaggggttaagccccgtggaccaaaggaaatgtgaacgtcttctgctttacctctattgccatgaattaagtattgaattccaggagcctgttcctgcttcgataccaaactactataaaattataaagaaaccaatggatttatccaccgtgaaaaagaagcttcagaaaaaacattcccaacactaccaaatcccggatgactttgtggccgatgtccgtttgatcttcaagaactgtgaaaggtttaatgaaatgatgaaagttgttcaagtttatgcagacacacaagagattaatttgaaggctgattcagaagtagctcaggcagggaaagcagttgcattgtactttgaagataaactcacagagatctactcagacaggaccttcgcacctttgccagagtttgagcaggaagaggatgatggtgaggtaactgaggactctgatgaagactttatacagccccgcagaaaacgcctaaagtcagatgagagaccagtacatataaagtaaaatgacatggatttaaatcaattgtttaaaaaaaaaaaacgaaaaaaaaaaaaaaaaacacaaaaacccagaaaacttttaagctgttgctggaatatcctgcctacagtgggcacctccttgaagaagctgatagcttttacacagtattagattgaaataatggacagaaacacattcttgtcaagaaagggggagagaagtctgtttgcaagtttcaaagcaaaaagcaaaagtgaaatgatttgaggatttctgttctaatggagatgattctctgattgttagaaatggcaaatattgatgattgtgtgctattgattggtgcaggatacttggtatacgagtaaatacttgagactcgtgtcacttgataaattttctttttggactaggtcgcacagttattaaaacaacttttaaccctcccccttcacacacatacatatcaggttgttttctagttaaaaacccaagtagctcagattctactttaatgtcagtgcagatttgcattgaatcatgccattatgttttttctcatttttatgctgttgggtcttagtttttaaattgatataaagaactcagcaatggttttattttctactcatacttagggtttaggaaacactaccactagttatcatttaatcaacttcaatggtctactgaaacaaaaatggtaacttttcattagtggattatttagagttatagtagttgtttccagaaaacacttcctcacaattgtacttcccaatcaaatcatgtgatcatacagttattcccatgaaaggcagaatgtttgtttcaaaattaatctagttttctgtacatttaaatttgagaaggtgacaactggctcttttccagtcttccttcatgtcagttttctgatagaccactattggcaaacagtatctgtcaactaccaaatgtgtaaaattttctgtatttcactttgtcttatttgtaaatagtgaactaaaacttttggcagatcagcaacatttgctgagcctgttttttaagctaatgtgtattcttactaatgttcctatcaagaatggatttgtaatatatgctgtctatttctaatgttcacattcatattttgaggttctatcttattttaatagagaacagacttctcaaaaaatcttcagaagcagcttattattgaaatatcgaaatattgaaataaacccggtggggttagattactcatctgtccaccaagtgggacatttgcatggactgggggcttaaaggacttagaagagacctgtaagtaaatcctgaaaatgagccaatccccacttgaatggttactggagtaaacccacctttaccaccccaattacagcacccgaggccgataaaccaacttggctctggttcatttttcttttcttcatttgtgatgctcagattcaaaatgtgtgttctacactgttacaggcttctcttttgtttgattaaagattttagtcctacttttgtatggacacattagaatattcagagaccaaaatagaagaatttgctgttagatatttttcagaagtcagcagatttgtggcaaatcatttatttgcctttttaaaaattcatttaagcagttcagagagtagactactcagaaaattatttcacgtaattgtctaagaggtcaatattttttaatgcatattgaatcaaataaagtgctctaaagaaattattatacaaattcctttgggttgtttttcttttcttaacaaggggtgggggtaaacaggaatatgattcaggctttctggttgtgtatttaaagagtattgattttattattactattgatttactttattcctggcttccttttcacttttctttcaatttttaaaaaataatttaagccgttgaaaatataccaaactgttgaaacattttactcaaattttaaattcctaaaaatgttttttaataagagggagaaaattatttaaaaatacttatgcctatgccaatttccctcttttttcacaaaatccatgatttcagtttgtaagtagacatatatctaagggcacatttttggaaagtgaggaatagcagcagtataacttcattttgtcaggcctttgagttctaatattttgtattgctcttcaaatggatccttttaaaaaaattgtagataatgagtcataaatagattctgccaactgaggggagaaacattttaagtaaatatttttcagtatttggggccttaaaaaataattgtgtttccttaaaattacatgttagatagagtttttaggtttttttggttttaagatggttaaagcaatttaaaagccacttttttgtcaacatttaatagcctccacttctgttaagataatgtatactgctgaggaattactattaatagctatcaacataccaccattaaattaaggtattcactttagattttttattaaagcttttttcttgcacactgatcgttgtgtttctaagctgattttttcagctctaatatacctatggttaaaaagtataaaaacttaaattgatatttagatatatgttttcctattagtttatgttttaaaaagacaaaattgtatctgtcagtccctgaaggcagtttgtttttatactctctcacatttgtatttgttttttaaatggcagtattttagaagatttggagaaaagtccacataataatgttttcttaaaagcttttaaagtttttgctgtacttcaatttacttcttccatcagaaaactaagaacaaagtgttgctcagtctgttccgctgacctaaatttgtgttttcagcacttggctcagccaattcactgagtgaaggaattgctttatgaggcaaagcatgtgaaagttctaaagtatggttagattgtaggtcgtgctctatatggaaacatcaaaccattactacagagaaatgataaggcattggatccactattgaaattattatttttggatcaacaagttggtactttctgacttctgtatcttaacataagggaattttaggtaatgctaagtcagttgtctcattttttgtgataagttttggaatttttagttaattgaaataaataatgcttttaaatagaagtaaaaggtttataagtgtgcaaattgtagatttatcaattacctcagcaggtatcctgccatgtaattattagtgattagtgttaataagataatagattcaggtcttccaactatgcccttggattgtggcctactgtatgttattaaatggtctcttactatccaaaatgggagtagatgctgtggccccgtctcccttggcttttacgtcccatatccacccccattcatgtacaacatgtgaaatataaaaatctcatttcttgtcaaaatcagcactgcttatttgcatactcagcatcggatcagtgagtagttttataaaaaatccacgcacccaactcccttagttaaaacagattcttaattcataccatgaattcttaatttctgtaccatctatgttaatgatctgctgaaggtgactcaagattttcaaggtgtaatacagtttgatcatgtaccggacctggatatttaattttttttccctcacagttaatctcctccttgataaagcaataacactgctttgagtctgttgcctaatagcatgtcagaatcctctcctggatggtgattttataggaaagtttgtatgcatatcacccagtctatcttttaaaaattaagaaatttaaatgtatgctggaagtaatgacactatattgtggcattttattttaaaaattggggaaagttgcatatttttttaaaagtaagtgtttgagtaaaaaaattgaaggtacttttttaaggaaaaaaatttatatgccacagtttacatagacatttcagattcaacacgtactcttgaatataatggtttcttttacttggtcaaaatgcatgtatagcatttctttcatcttagttccttgtgtttgcctatgtggtcctttatatatttttattgtatcgaagaaacaaaactatcttcaaaaataagttaatttggatatatttgtcatatcaaactacaaagtgtacaaagttaagtttagcccttttctagaaagtgatctttaaaattaaaaatgctcctcttttaaattcaccaaatttatgtgtgggaaggcaccaaaatgattttgtaagtgccactgcaatattccctttcaagtgtggcctaaatttcaatcttaaggatggaatgcatgtctgctccttgttctgaaaaatgtaggcatctactacattttaaaacacagtgaaacatatacataagcctataaaaaaagatttgtgcaatttgaaagcctgttaattttttatgtagacatacctacacacgaaagggttaaattcacagccttactagttccttgcttccagtatttcaattggtctcctcccctcattattattattactactagtactattatttttgcacatagttaactgcccttcaatatgattcttaaaaagtgctgtttctgtggtatcgtattctctaaataatcatatttaattttttaaaacaaggttgcagtttctaattgtttcgttcctgtgtttttgctggtgtgtaataaaagcaagttttttcttttcatggttatttaatacattagctgcctgtaaataattcttgttataatgctctggaatgtgttgtagaagttgtattagattagttttaaacccttgtttgaaagccacattgttttggttatttctattaaattagaaaattgaaaaagttttcaaatgaa

SEQ ID NO: 370547 - DNA, 6883 bp, Homo sapiens
tcacgccatgtcacaaacaagaacagttgaaacttttctgtgaaacatgtgatagattgacatgtagagactgtcagctattggaacacaaagaacatagttggtgtaatacggtgcccagtatgccgccaagaatgcagacagatagaccttgtggataattattttgtgaaagacacatctgaagctcctagcagttctgatgaaaaatcagaacaggtatgtactagttgtgaagacaatgcaagtgcagttggcttttgtgtagaatgtggagagtggctatgtaagacatgtatcgaagcacatcaaagagtaaaatttactaaagatcacttgatcaggaagaaagaagatgtctcagagtctgttggagcatctggtcaacgccctgttttctgccctgtacacaaacaagaacagttgaaacttttctgtgaaacatgtgatagattgacatgtagagactgtcagctattggaacacaaagaacataggtatcagtttttggaagaagcttttcaaaatcagaagggtgcaattgagaatctactggcgaaacttcttgagaagaagaattatgttcattttgcagctactcaggtgcagaataggataaaagaagtaaatgagactaacaaacgagtagaacaggaaattaaagtggccattttcacccttatcaatgaaattaataagaaaggaaaatctctcttacaacagctagagaatgttacaaaggaaagacagatgaagttactacagcagcagaatgacatcacaggcctttcccggcaggtgaagcatgttatgaacttcacaaattgggcaattgcaagtggcagcagcacagcactactatacagcaagcgactgattactttccagttgcgtcatattttgaaagcacggtgtgatcctgtccctgctgctaatggagcaatacgtttccattgtgatcccaccttctgggcaaagaatgtagtcaatttaggtaatctagtaatagagagtaaaccagctcctggttatactcctaatgttgtagttgggcaagttcctccagggacaaaccacattagtaaaacccctggacagattaacttagcacagcttcgactccagcacatgcaacaacaagtatatgcacagaaacatcagcagttgcaacagatgaggatgcagcaaccaccagcacctgtaccaactacaacaacaacaacacaacagcatcctagacaagcagcccctcagatgttacaacaacagcctcctcgattgatcagtgtgcaaacaatgcaaagaggcaacatgaactgtggagcttttcaagcccatcagatgagactggctcagaatgctgccagaataccagggatacccaggcacagcggccctcaatattccatgatgcagccacacctccaaagacaacactcaaacccagggcatgctggaccctttcccgtagtatcggtacacaacaccacaatcaacccaacgagccctactacagcaactatggcaaatgcaaaccgaggtcccaccagcccatctgttacagcaatagagctaatcccctcagttaccaatccagaaaaccttccatcgctgccagatattccacccatacagttggaagatgctggctcaagtagtttagataatctactaagtagatacatctcaggcagtcacctacccccacagcctacaagcaccatgaatccttctccaggtccctctgccctttctccgggatcatcaggtttatccaattctcacacacctgtgagacccccaagtacttctagtactggcagtcgaggcagctgtgggtcatcaggaagaactgctgagaagacaagtcttagtttcaaatctgatcaggtgaaggtcaagcaagaacctgggactgaagatgaaatatgtagcttttcaggaggtgtaaaacaagaaaaaacagaggatggcaggaggagtgcttgcatgttgagcagtcctgagagtagcttgacaccacctctctcaaccaacctgcatctagaaagtgaattggatgcattggcaagcctggaaaaccatgtgaaaactgaacctgcagatatgaatgaaagctgcaaacagtcagggctcagcagccttgttaatggaaagtccccaattcgaagcctcatgcacaggtcggcaaggattggaggagatggcaacaataaagatgatgacccaaatgaagactggtgtgctgtctgccaaaacggaggagatctcttgtgctgcgaaaaatgtccaaaggtctttcatctaacttgtcatgttccaacactacttagctttccaagtggggactggatatgcacattttgtagagatattggaaagccagaagttgaatatgattgtgataatttgcaacatagtaagaaggggaaaactgcgcaggggttaagccccgtggaccaaaggaaatgtgaacgtcttctgctttacctctattgccatgaattaagtattgaattccaggagcctgttcctgcttcgataccaaactactataaaattataaagaaaccaatggatttatccaccgtgaaaaagaagcttcagaaaaaacattcccaacactaccaaatcccggatgactttgtggccgatgtccgtttgatcttcaagaactgtgaaaggtttaatgaaatgatgaaagttgttcaagtttatgcagacacacaagagattaatttgaaggctgattcagaagtagctcaggcagggaaagcagttgcattgtactttgaagataaactcacagagatctactcagacaggaccttcgcacctttgccagagtttgagcaggaagaggatgatggtgaggtaactgaggactctgatgaagactttatacagccccgcagaaaacgcctaaagtcagatgagagaccagtacatataaagtaaaatgacatggatttaaatcaattgtttaaaaaaaaaaaacgaaaaaaaaaaaaaaaaacacaaaaacccagaaaacttttaagctgttgctggaatatcctgcctacagtgggcacctccttgaagaagctgatagcttttacacagtattagattgaaataatggacagaaacacattcttgtcaagaaagggggagagaagtctgtttgcaagtttcaaagcaaaaagcaaaagtgaaatgatttgaggatttctgttctaatggagatgattctctgattgttagaaatggcaaatattgatgattgtgtgctattgattggtgcaggatacttggtatacgagtaaatacttgagactcgtgtcacttgataaattttctttttggactaggtcgcacagttattaaaacaacttttaaccctcccccttcacacacatacatatcaggttgttttctagttaaaaacccaagtagctcagattctactttaatgtcagtgcagatttgcattgaatcatgccattatgttttttctcatttttatgctgttgggtcttagtttttaaattgatataaagaactcagcaatggttttattttctactcatacttagggtttaggaaacactaccactagttatcatttaatcaacttcaatggtctactgaaacaaaaatggtaacttttcattagtggattatttagagttatagtagttgtttccagaaaacacttcctcacaattgtacttcccaatcaaatcatgtgatcatacagttattcccatgaaaggcagaatgtttgtttcaaaattaatctagttttctgtacatttaaatttgagaaggtgacaactggctcttttccagtcttccttcatgtcagttttctgatagaccactattggcaaacagtatctgtcaactaccaaatgtgtaaaattttctgtatttcactttgtcttatttgtaaatagtgaactaaaacttttggcagatcagcaacatttgctgagcctgttttttaagctaatgtgtattcttactaatgttcctatcaagaatggatttgtaatatatgctgtctatttctaatgttcacattcatattttgaggttctatcttattttaatagagaacagacttctcaaaaaatcttcagaagcagcttattattgaaatatcgaaatattgaaataaacccggtggggttagattactcatctgtccaccaagtgggacatttgcatggactgggggcttaaaggacttagaagagacctgtaagtaaatcctgaaaatgagccaatccccacttgaatggttactggagtaaacccacctttaccaccccaattacagcacccgaggccgataaaccaacttggctctggttcatttttcttttcttcatttgtgatgctcagattcaaaatgtgtgttctacactgttacaggcttctcttttgtttgattaaagattttagtcctacttttgtatggacacattagaatattcagagaccaaaatagaagaatttgctgttagatatttttcagaagtcagcagatttgtggcaaatcatttatttgcctttttaaaaattcatttaagcagttcagagagtagactactcagaaaattatttcacgtaattgtctaagaggtcaatattttttaatgcatattgaatcaaataaagtgctctaaagaaattattatacaaattcctttgggttgtttttcttttcttaacaaggggtgggggtaaacaggaatatgattcaggctttctggttgtgtatttaaagagtattgattttattattactattgatttactttattcctggcttccttttcacttttctttcaatttttaaaaaataatttaagccgttgaaaatataccaaactgttgaaacattttactcaaattttaaattcctaaaaatgttttttaataagagggagaaaattatttaaaaatacttatgcctatgccaatttccctcttttttcacaaaatccatgatttcagtttgtaagtagacatatatctaagggcacatttttggaaagtgaggaatagcagcagtataacttcattttgtcaggcctttgagttctaatattttgtattgctcttcaaatggatccttttaaaaaaattgtagataatgagtcataaatagattctgccaactgaggggagaaacattttaagtaaatatttttcagtatttggggccttaaaaaataattattagtgattagtgttaataagataatagattcaggtcttccaactatgcccttggattgtggcctactgtatgttattaaatggtctcttactatccaaaatgggagtagatgctgtggccccgtctcccttggcttttacgtcccatatccacccccattcatgtacaacatgtgaaatataaaaatctcatttcttgtcaaaatcagcactgcttatttgcatactcagcatcggatcagtgagtagttttataaaaaatccacgcacccaactcccttagttaaaacagattcttaattcataccatgaattcttaatttctgtaccatctatgttaatgatctgctgaaggtgactcaagattttcaaggtgtaatacagtttgatcatgtaccggacctggatatttaattttttttccctcacagttaatctcctccttgataaagcaataacactgctttgagtctgttgcctaatagcatgtcagaatcctctcctggatggtgattttataggaaagtttgtatgcatatcacccagtctatcttttaaaaattaagaaatttaaatgtatgctggaagtaatgacactatattgtggcattttattttaaaaattggggaaagttgcatatttttttaaaagtaagtgtttgagtaaaaaaattgaaggtacttttttaaggaaaaaaatttatatgccacagtttacatagacatttcagattcaacacgtactcttgaatataatggtttcttttacttggtcaaaatgcatgtatagcatttctttcatcttagttccttgtgtttgcctatgtggtcctttatatatttttattgtatcgaagaaacaaaactatcttcaaaaataagttaatttggatatatttgtcatatcaaactacaaagtgtacaaagttaagtttagcccttttctagaaagtgatctttaaaattaaaaatgctcctcttttaaattcaccaaatttatgtgtgggaaggcaccaaaatgattttgtaagtgccactgcaatattccctttcaagtgtggcctaaatttcaatcttaaggatggaatgcatgtctgctccttgttctgaaaaatgtaggcatctactacattttaaaacacagtgaaacatatacataagcctataaaaaaagatttgtgcaatttgaaagcctgttaattttttatgtagacatacctacacacgaaagggttaaattcacagccttactagttccttgcttccagtatttcaattggtctcctcccctcattattattattactactagtactattatttttgcacatagttaactgcccttcaatatgattcttaaaaagtgctgtttctgtggtatcgtattctctaaataatcatatttaattttttaaaacaaggttgcagtttctaattgtttcgttcctgtgtttttgctggtgtgtaataaaagcaagttttttcttttcatggttatttaatacattagctgcctgtaaataattcttgttataatgctctggaatgtgttgtagaagttgtattagattagttttaaacccttgtttgaaagccacattgttttggttatttctattaaattagaaaattgaaaaagttttcaaatgaa

SEQ ID NO: 370548 - DNA, 5949 bp, Homo sapiens
tctgtctccaaaaaaaaggaggtatatatacatgtgcttgtgcctgcaggtatgtgtttgtgtgttctaggttttgaccacgaaaaaagaactgatttacttgtggcattttaatacatgccaaaacagtacaagatacctgagaaactctgcaacctgtgctcttcttcttcataaataactgagtccacataatggtgatactgggatctgagagaattggtcttaggccttatgctgcaagtactgctcatcactactaagagacccccttttaatgcggaggtgccatttttataatgcattccagaaagtaatcaattgatgcgtgactaggaaaatttagaggagtttttaatcacatgacttcacctgacgagatttcacaactataaaacctcccttttttcaaaaaattattaagaaaataaaccaggccccagtccagggaagtagcttctctagagcaggctttcttataattacgtggactaattgcctatttccctgtctagtggggactggatatgcacattttgtagagatattggaaagccagaagttgaatatgattgtgataatttgcaacatagtaagaaggggaaaactgcgcaggggttaagccccgtggaccaaaggaaatgtgaacgtcttctgctttacctctattgccatgaattaagtattgaattccaggagcctgttcctgcttcgataccaaactactataaaattataaagaaaccaatggatttatccaccgtgaaaaagaagcttcagaaaaaacattcccaacactaccaaatcccggatgactttgtggccgatgtccgtttgatcttcaagaactgtgaaaggtttaatgaagctgattcagaagtagctcaggcagggaaagcagttgcattgtactttgaagataaactcacagagatctactcagacaggaccttcgcacctttgccagagtttgagcaggaagaggatgatggtgaggtaactgaggactctgatgaagactttatacagccccgcagaaaacgcctaaagtcagatgagagaccagtacatataaagtaaaatgacatggatttaaatcaattgtttaaaaaaaaaaaacgaaaaaaaaaaaaaaaaacacaaaaacccagaaaacttttaagctgttgctggaatatcctgcctacagtgggcacctccttgaagaagctgatagcttttacacagtattagattgaaataatggacagaaacacattcttgtcaagaaagggggagagaagtctgtttgcaagtttcaaagcaaaaagcaaaagtgaaatgatttgaggatttctgttctaatggagatgattctctgattgttagaaatggcaaatattgatgattgtgtgctattgattggtgcaggatacttggtatacgagtaaatacttgagactcgtgtcacttgataaattttctttttggactaggtcgcacagttattaaaacaacttttaaccctcccccttcacacacatacatatcaggttgttttctagttaaaaacccaagtagctcagattctactttaatgtcagtgcagatttgcattgaatcatgccattatgttttttctcatttttatgctgttgggtcttagtttttaaattgatataaagaactcagcaatggttttattttctactcatacttagggtttaggaaacactaccactagttatcatttaatcaacttcaatggtctactgaaacaaaaatggtaacttttcattagtggattatttagagttatagtagttgtttccagaaaacacttcctcacaattgtacttcccaatcaaatcatgtgatcatacagttattcccatgaaaggcagaatgtttgtttcaaaattaatctagttttctgtacatttaaatttgagaaggtgacaactggctcttttccagtcttccttcatgtcagttttctgatagaccactattggcaaacagtatctgtcaactaccaaatgtgtaaaattttctgtatttcactttgtcttatttgtaaatagtgaactaaaacttttggcagatcagcaacatttgctgagcctgttttttaagctaatgtgtattcttactaatgttcctatcaagaatggatttgtaatatatgctgtctatttctaatgttcacattcatattttgaggttctatcttattttaatagagaacagacttctcaaaaaatcttcagaagcagcttattattgaaatatcgaaatattgaaataaacccggtggggttagattactcatctgtccaccaagtgggacatttgcatggactgggggcttaaaggacttagaagagacctgtaagtaaatcctgaaaatgagccaatccccacttgaatggttactggagtaaacccacctttaccaccccaattacagcacccgaggccgataaaccaacttggctctggttcatttttcttttcttcatttgtgatgctcagattcaaaatgtgtgttctacactgttacaggcttctcttttgtttgattaaagattttagtcctacttttgtatggacacattagaatattcagagaccaaaatagaagaatttgctgttagatatttttcagaagtcagcagatttgtggcaaatcatttatttgcctttttaaaaattcatttaagcagttcagagagtagactactcagaaaattatttcacgtaattgtctaagaggtcaatattttttaatgcatattgaatcaaataaagtgctctaaagaaattattatacaaattcctttgggttgtttttcttttcttaacaaggggtgggggtaaacaggaatatgattcaggctttctggttgtgtatttaaagagtattgattttattattactattgatttactttattcctggcttccttttcacttttctttcaatttttaaaaaataatttaagccgttgaaaatataccaaactgttgaaacattttactcaaattttaaattcctaaaaatgttttttaataagagggagaaaattatttaaaaatacttatgcctatgccaatttccctcttttttcacaaaatccatgatttcagtttgtaagtagacatatatctaagggcacatttttggaaagtgaggaatagcagcagtataacttcattttgtcaggcctttgagttctaatattttgtattgctcttcaaatggatccttttaaaaaaattgtagataatgagtcataaatagattctgccaactgaggggagaaacattttaagtaaatatttttcagtatttggggccttaaaaaataattgtgtttccttaaaattacatgttagatagagtttttaggtttttttggttttaagatggttaaagcaatttaaaagccacttttttgtcaacatttaatagcctccacttctgttaagataatgtatactgctgaggaattactattaatagctatcaacataccaccattaaattaaggtattcactttagattttttattaaagcttttttcttgcacactgatcgttgtgtttctaagctgattttttcagctctaatatacctatggttaaaaagtataaaaacttaaattgatatttagatatatgttttcctattagtttatgttttaaaaagacaaaattgtatctgtcagtccctgaaggcagtttgtttttatactctctcacatttgtatttgttttttaaatggcagtattttagaagatttggagaaaagtccacataataatgttttcttaaaagcttttaaagtttttgctgtacttcaatttacttcttccatcagaaaactaagaacaaagtgttgctcagtctgttccgctgacctaaatttgtgttttcagcacttggctcagccaattcactgagtgaaggaattgctttatgaggcaaagcatgtgaaagttctaaagtatggttagattgtaggtcgtgctctatatggaaacatcaaaccattactacagagaaatgataaggcattggatccactattgaaattattatttttggatcaacaagttggtactttctgacttctgtatcttaacataagggaattttaggtaatgctaagtcagttgtctcattttttgtgataagttttggaatttttagttaattgaaataaataatgcttttaaatagaagtaaaaggtttataagtgtgcaaattgtagatttatcaattacctcagcaggtatcctgccatgtaattattagtgattagtgttaataagataatagattcaggtcttccaactatgcccttggattgtggcctactgtatgttattaaatggtctcttactatccaaaatgggagtagatgctgtggccccgtctcccttggcttttacgtcccatatccacccccattcatgtacaacatgtgaaatataaaaatctcatttcttgtcaaaatcagcactgcttatttgcatactcagcatcggatcagtgagtagttttataaaaaatccacgcacccaactcccttagttaaaacagattcttaattcataccatgaattcttaatttctgtaccatctatgttaatgatctgctgaaggtgactcaagattttcaaggtgtaatacagtttgatcatgtaccggacctggatatttaattttttttccctcacagttaatctcctccttgataaagcaataacactgctttgagtctgttgcctaatagcatgtcagaatcctctcctggatggtgattttataggaaagtttgtatgcatatcacccagtctatcttttaaaaattaagaaatttaaatgtatgctggaagtaatgacactatattgtggcattttattttaaaaattggggaaagttgcatatttttttaaaagtaagtgtttgagtaaaaaaattgaaggtacttttttaaggaaaaaaatttatatgccacagtttacatagacatttcagattcaacacgtactcttgaatataatggtttcttttacttggtcaaaatgcatgtatagcatttctttcatcttagttccttgtgtttgcctatgtggtcctttatatatttttattgtatcgaagaaacaaaactatcttcaaaaataagttaatttggatatatttgtcatatcaaactacaaagtgtacaaagttaagtttagcccttttctagaaagtgatctttaaaattaaaaatgctcctcttttaaattcaccaaatttatgtgtgggaaggcaccaaaatgattttgtaagtgccactgcaatattccctttcaagtgtggcctaaatttcaatcttaaggatggaatgcatgtctgctccttgttctgaaaaatgtaggcatctactacattttaaaacacagtgaaacatatacataagcctataaaaaaagatttgtgcaatttgaaagcctgttaattttttatgtagacatacctacacacgaaagggttaaattcacagccttactagttccttgcttccagtatttcaattggtctcctcccctcattattattattactactagtactattatttttgcacatagttaactgcccttcaatatgattcttaaaaagtgctgtttctgtggtatcgtattctctaaataatcatatttaattttttaaaacaaggttgcagtttctaattgtttcgttcctgtgtttttgctggtgtgtaataaaagcaagttttttcttttcatggttatttaatacattagctgcctgtaaataattcttgttataatgctctggaatgtgttgtagaagttgtattagattagttttaaacccttgtttgaaagccacattgttttggttatttctattaaattagaaaattgaaaaagttttcaaatgaa

SEQ ID NO: 370549 - DNA, 4693 bp, Homo sapiens
tcacgccatgtcacaaacaagaacagttgaaacttttctgtgaaacatgtgatagattgacatgtagagactgtcagctattggaacacaaagaacatagttggtgtaatacggtgcccagtatgccgccaagaatgcagacagatagaccttgtggataattattttgtgaaagacacatctgaagctcctagcagttctgatgaaaaatcagaacaggtatgtactagttgtgaagacaatgcaagtgcagttggcttttgtgtagaatgtggagagtggctatgtaagacatgtatcgaagcacatcaaagagtaaaatttactaaagatcacttgatcaggaagaaagaagatgtctcagagtctgttggagcatctggtcaacgccctgttttctgccctgtacacaaacaagaacagttgaaacttttctgtgaaacatgtgatagattgacatgtagagactgtcagctattggaacacaaagaacataggtatcagtttttggaagaagcttttcaaaatcagaagggtgcaattgagaatctactggcgaaacttcttgagaagaagaattatgttcattttgcagctactcaggtgcagaataggataaaagaagtaaatgagactaacaaacgagtagaacaggaaattaaagtggccattttcacccttatcaatgaaattaataagaaaggaaaatctctcttacaacagctagagaatgttacaaaggaaagacagatgaagttactacagcagcagaatgacatcacaggcctttcccggcaggtgaagcatgttatgaacttcacaaattgggcaattgcaagtggcagcagcacagcactactatacagcaagcgactgattactttccagttgcgtcatattttgaaagcacggtgtgatcctgtccctgctgctaatggagcaatacgtttccattgtgatcccaccttctgggcaaagaatgtagtcaatttaggtaatctagtaatagagagtaaaccagctcctggttatactcctaatgttgtagttgggcaagttcctccagggacaaaccacattagtaaaacccctggacagattaacttagcacagcttcgactccagcacatgcaacaacaagtatatgcacagaaacatcagcagttgcaacagatgaggatgcagcaaccaccagcacctgtaccaactacaacaacaacaacacaacagcatcctagacaagcagcccctcagatgttacaacaacagcctcctcgattgatcagtgtgcaaacaatgcaaagaggcaacatgaactgtggagcttttcaagcccatcagatgagactggctcagaatgctgccagaataccagggatacccaggcacagcggccctcaatattccatgatgcagccacacctccaaagacaacactcaaacccagggcatgctggaccctttcccgtagtatcggtacacaacaccacaatcaacccaacgagccctactacagcaactatggcaaatgcaaaccgaggtcccaccagcccatctgttacagcaatagagctaatcccctcagttaccaatccagaaaaccttccatcgctgccagatattccacccatacagttggaagatgctggctcaagtagtttagataatctactaagtagatacatctcaggcagtcacctacccccacagcctacaagcaccatgaatccttctccaggtccctctgccctttctccgggatcatcaggtttatccaattctcacacacctgtgagacccccaagtacttctagtactggcagtcgaggcagctgtgggtcatcaggaagaactgctgagaagacaagtcttagtttcaaatctgatcaggtgaaggtcaagcaagaacctgggactgaagatgaaatatgtagcttttcaggaggtgtaaaacaagaaaaaacagaggatggcaggaggagtgcttgcatgttgagcagtcctgagagtagcttgacaccacctctctcaaccaacctgcatctagaaagtgaattggatgcattggcaagcctggaaaaccatgtgaaaactgaacctgcagatatgaatgaaagctgcaaacagtcagggctcagcagccttgttaatggaaagtccccaattcgaagcctcatgcacaggtcggcaaggattggaggagatggcaacaataaagatgatgacccaaatgaagactggtgtgctgtctgccaaaacggaggagatctcttgtgctgcgaaaaatgtccaaaggtctttcatctaacttgtcatgttccaacactacttagctttccaagtggggactggatatgcacattttgtagagatattggaaagccagaagttgaatatgattgtgataatttgcaacatagtaagaaggggaaaactgcgcaggggttaagccccgtggaccaaaggaaatgtgaacgtcttctgctttacctctattgccatgaattaagtattgaattccaggagcctgttcctgcttcgataccaaactactataaaattataaagaaaccaatggatttatccaccgtgaaaaagaagcttcagaaaaaacattcccaacactaccaaatcccggatgactttgtggccgatgtccgtttgatcttcaagaactgtgaaaggtttaatgaaatgatgaaagttgttcaagtttatgcagacacacaagagattaatttgaaggctgattcagaagtagctcaggcagggaaagcagttgcattgtactttgaagataaactcacagagatctactcagacaggaccttcgcacctttgccagagtttgagcaggaagaggatgatggtgaggtaactgaggactctgatgaagactttatacagccccgcagaaaacgcctaaagtcagatgagagaccagtacatataaagtaaaatgacatggatttaaatcaattgtttaaaaaaaaaaaacgaaaaaaaaaaaaaaaaacacaaaaacccagaaaacttttaagctgttgctggaatatcctgcctacagtgggcacctccttgaagaagctgatagcttttacacagtattagattgaaataatggacagaaacacattcttgtcaagaaagggggagagaagtctgtttgcaagtttcaaagcaaaaagcaaaagtgaaatgatttgaggatttctgttctaatggagatgattctctgattgttagaaatggcaaatattgatgattgtgtgctattgattggtgcaggatacttggtatacgagtaaatacttgagactcgtgtcacttgataaattttctttttggactaggtcgcacagttattaaaacaacttttaaccctcccccttcacacacatacatatcaggttgttttctagttaaaaacccaagtagctcagattctactttaatgtcagtgcagatttgcattgaatcatgccattatgttttttctcatttttatgctgttgggtcttagtttttaaattgatataaagaactcagcaatggttttattttctactcatacttagggtttaggaaacactaccactagttatcatttaatcaacttcaatggtctactgaaacaaaaatggtaacttttcattagtggattatttagagttatagtagttgtttccagaaaacacttcctcacaattgtacttcccaatcaaatcatgtgatcatacagttattcccatgaaaggcagaatgtttgtttcaaaattaatctagttttctgtacatttaaatttgagaaggtgacaactggctcttttccagtcttccttcatgtcagttttctgatagaccactattggcaaacagtatctgtcaactaccaaatgtgtaaaattttctgtatttcactttgtcttatttgtaaatagtgaactaaaacttttggcagatcagcaacatttgctgagcctgttttttaagctaatgtgtattcttactaatgttcctatcaagaatggatttgtaatatatgctgtctatttctaatgttcacattcatattttgaggttctatcttattttaatagagaacagacttctcaaaaaatcttcagaagcagcttattattgaaatatcgaaatattgaaataaacccggtggggttagattactcatctgtccaccaagtgggacatttgcatggactgggggcttaaaggacttagaagagacctgtaagtaaatcctgaaaatgagccaatccccacttgaatggttactggagtaaacccacctttaccaccccaattacagcacccgaggccgataaaccaacttggctctggttcatttttcttttcttcatttgtgatgctcagattcaaaatgtgtgttctacactgttacaggcttctcttttgtttgattaaagattttagtcctacttttgtatggacacattagaatattcagagaccaaaatagaagaatttgctgttagatatttttcagaagtcagcagatttgtggcaaatcatttatttgcctttttaaaaattcatttaagcagttcagagagtagactactcagaaaattatttcacgtaattgtctaagaggtcaatattttttaatgcatattgaatcaaataaagtgctctaaagaaattattatacaaa

SEQ ID NO: 370550 - DNA, 3541 bp, Homo sapiens
tcacgccatgtcacaaacaagaacagttgaaacttttctgtgaaacatgtgatagattgacatgtagagactgtcagctattggaacacaaagaacatagttggtgtaatacggtgcccagtatgccgccaagaatgcagacagatagaccttgtggataattattttgtgaaagacacatctgaagctcctagcagttctgatgaaaaatcagaacaggtatgtactagttgtgaagacaatgcaagtgcagttggcttttgtgtagaatgtggagagtggctatgtaagacatgtatcgaagcacatcaaagagtaaaatttactaaagatcacttgatcaggaagaaagaagatgtctcagagtctgttggagcatctggtcaacgccctgttttctgccctgtacacaaacaagaacagttgaaacttttctgtgaaacatgtgatagattgacatgtagagactgtcagctattggaacacaaagaacataggtatcagtttttggaagaagcttttcaaaatcagaagggtgcaattgagaatctactggcgaaacttcttgagaagaagaattatgttcattttgcagctactcaggtgcagaataggataaaagaagtaaatgagactaacaaacgagtagaacaggaaattaaagtggccattttcacccttatcaatgaaattaataagaaaggaaaatctctcttacaacagctagagaatgttacaaaggaaagacagatgaagttactacagcagcagaatgacatcacaggcctttcccggcaggtgaagcatgttatgaacttcacaaattgggcaattgcaagtggcagcagcacagcactactatacagcaagcgactgattactttccagttgcgtcatattttgaaagcacggtgtgatcctgtccctgctgctaatggagcaatacgtttccattgtgatcccaccttctgggcaaagaatgtagtcaatttaggtaatctagtaatagagagtaaaccagctcctggttatactcctaatgttgtagttgggcaagttcctccagggacaaaccacattagtaaaacccctggacagattaacttagcacagcttcgactccagcacatgcaacaacaagtatatgcacagaaacatcagcagttgcaacagatgaggatgcagcaaccaccagcacctgtaccaactacaacaacaacaacacaacagcatcctagacaagcagcccctcagatgttacaacaacagcctcctcgattgatcagtgtgcaaacaatgcaaagaggcaacatgaactgtggagcttttcaagcccatcagatgagactggctcagaatgctgccagaataccagggatacccaggcacagcggccctcaatattccatgatgcagccacacctccaaagacaacactcaaacccagggcatgctggaccctttcccgtagtatcggtacacaacaccacaatcaacccaacgagccctactacagcaactatggcaaatgcaaaccgaggtcccaccagcccatctgttacagcaatagagctaatcccctcagttaccaatccagaaaaccttccatcgctgccagatattccacccatacagttggaagatgctggctcaagtagtttagataatctactaagtagatacatctcaggcagtcacctacccccacagcctacaagcaccatgaatccttctccaggtccctctgccctttctccgggatcatcaggtttatccaattctcacacacctgtgagacccccaagtacttctagtactggcagtcgaggcagctgtgggtcatcaggaagaactgctgagaagacaagtcttagtttcaaatctgatcaggtgaaggtcaagcaagaacctgggactgaagatgaaatatgtagcttttcaggaggtgtaaaacaagaaaaaacagaggatggcaggaggagtgcttgcatgttgagcagtcctgagagtagcttgacaccacctctctcaaccaacctgcatctagaaagtgaattggatgcattggcaagcctggaaaaccatgtgaaaactgaacctgcagatatgaatgaaagctgcaaacagtcagggctcagcagccttgttaatggaaagtccccaattcgaagcctcatgcacaggtcggcaaggattggaggagatggcaacaataaagatgatgacccaaatgaagactggtgtgctgtctgccaaaacggaggagatctcttgtgctgcgaaaaatgtccaaaggtctttcatctaacttgtcatgttccaacactacttagctttccaagtggggactggatatgcacattttgtagagatattggaaagccagaagttgaatatgattgtgataatttgcaacatagtaagaaggggaaaactgcgcaggggttaagccccgtggaccaaaggaaatgtgaacgtcttctgctttacctctattgccatgaattaagtattgaattccaggagcctgttcctgcttcgataccaaactactataaaattataaagaaaccaatggatttatccaccgtgaaaaagaagcttcagaaaaaacattcccaacactaccaaatcccggatgactttgtggccgatgtccgtttgatcttcaagaactgtgaaaggtttaatgaaatgatgaaagttgttcaagtttatgcagacacacaagagattaatttgaaggctgattcagaagtagctcaggcagggaaagcagttgcattgtactttgaagataaactcacagagatctactcagacaggaccttcgcacctttgccagagtttgagcaggaagaggatgatggtgaggtaactgaggactctgatgaagactttatacagccccgcagaaaacgcctaaagtcagatgagagaccagtacatataaagtaaaatgacatggatttaaatcaattgtttaaaaaaaaaaaacgaaaaaaaaaaaaaaaaacacaaaaacccagaaaacttttaagctgttgctggaatatcctgcctacagtgggcacctccttgaagaagctgatagcttttacacagtattagattgaaataatggacagaaacacattcttgtcaagaaagggggagagaagtctgtttgcaagtttcaaagcaaaaagcaaaagtgaaatgatttgaggatttctgttctaatggagatgattctctgattgttagaaatggcaaatattgatgattgtgtgctattgattggtgcaggatacttggtatacgagtaaatacttgagactcgtgtcacttgataaattttctttttggactaggtcgcacagttattaaaacaacttttaaccctcccccttcacacacatacatatcaggttgttttctagttaaaaacccaagtagctcagattctactttaatgtcagtgcagatttgcattgaatcatgccattatgttttttctcatttttatgctgttggtaccgtcgacggagatcctctagat

SEQ ID NO: 370551 - DNA, 3065 bp, Homo sapiens
tcacgccatgtcacaaacaagaacagttgaaacttttctgtgaaacatgtgatagattgacatgtagagactgtcagctattggaacacaaagaacatagttggtgtaatacggtgcccagtatgccgccaagaatgcagacagatagaccttgtggataattattttgtgaaagacacatctgaagctcctagcagttctgatgaaaaatcagaacaggtatgtactagttgtgaagacaatgcaagtgcagttggcttttgtgtagaatgtggagagtggctatgtaagacatgtatcgaagcacatcaaagagtaaaatttactaaagatcacttgatcaggaagaaagaagatgtctcagagtctgttggagcatctggtcaacgccctgttttctgccctgtacacaaacaagaacagttgaaacttttctgtgaaacatgtgatagattgacatgtagagactgtcagctattggaacacaaagaacataggtatcagtttttggaagaagcttttcaaaatcagaagggtgcaattgagaatctactggcgaaacttcttgagaagaagaattatgttcattttgcagctactcaggtgcagaataggataaaagaagtaaatgagactaacaaacgagtagaacaggaaattaaagtggccattttcacccttatcaatgaaattaataagaaaggaaaatctctcttacaacagctagagaatgttacaaaggaaagacagatgaagttactacagcagcagaatgacatcacaggcctttcccggcaggtgaagcatgttatgaacttcacaaattgggcaattgcaagtggcagcagcacagcactactatacagcaagcgactgattactttccagttgcgtcatattttgaaagcacggtgtgatcctgtccctgctgctaatggagcaatacgtttccattgtgatcccaccttctgggcaaagaatgtagtcaatttaggtaatctagtaatagagagtaaaccagctcctggttatactcctaatgttgtagttgggcaagttcctccagggacaaaccacattagtaaaacccctggacagattaacttagcacagcttcgactccagcacatgcaacaacaagtatatgcacagaaacatcagcagttgcaacagatgaggatgcagcaaccaccagcacctgtaccaactacaacaacaacaacacaacagcatcctagacaagcagcccctcagatgttacaacaacagcctcctcgattgatcagtgtgcaaacaatgcaaagaggcaacatgaactgtggagcttttcaagcccatcagatgagactggctcagaatgctgccagaataccagggatacccaggcacagcggccctcaatattccatgatgcagccacacctccaaagacaacactcaaacccagggcatgctggaccctttcccgtagtatcggtacacaacaccacaatcaacccaacgagccctactacagcaactatggcaaatgcaaaccgaggtcccaccagcccatctgttacagcaatagagctaatcccctcagttaccaatccagaaaaccttccatcgctgccagatattccacccatacagttggaagatgctggctcaagtagtttagataatctactaagtagatacatctcaggcagtcacctacccccacagcctacaagcaccatgaatccttctccaggtccctctgccctttctccgggatcatcaggtttatccaattctcacacacctgtgagacccccaagtacttctagtactggcagtcgaggcagctgtgggtcatcaggaagaactgctgagaagacaagtcttagtttcaaatctgatcaggtgaaggtcaagcaagaacctgggactgaagatgaaatatgtagcttttcaggaggtgtaaaacaagaaaaaacagaggatggcaggaggagtgcttgcatgttgagcagtcctgagagtagcttgacaccacctctctcaaccaacctgcatctagaaagtgaattggatgcattggcaagcctggaaaaccatgtgaaaactgaacctgcagatatgaatgaaagctgcaaacagtcagggctcagcagccttgttaatggaaagtccccaattcgaagcctcatgcacaggtcggcaaggattggaggagatggcaacaataaagatgatgacccaaatgaagactggtgtgctgtctgccaaaacggaggagatctcttgtgctgcgaaaaatgtccaaaggtctttcatctaacttgtcatgttccaacactacttagctttccaagtggggactggatatgcacattttgtagagatattggaaagccagaagttgaatatgattgtgataatttgcaacatagtaagaaggggaaaactgcgcaggggttaagccccgtggaccaaaggaaatgtgaacgtcttctgctttacctctattgccatgaattaagtattgaattccaggagcctgttcctgcttcgataccaaactactataaaattataaagaaaccaatggatttatccaccgtgaaaaagaagcttcagaaaaaacattcccaacactaccaaatcccggatgactttgtggccgatgtccgtttgatcttcaagaactgtgaaaggtttaatgaaatgatgaaagttgttcaagtttatgcagacacacaagagattaatttgaaggtaagcttttcagaccatgcaaacttggtgaaggaatatgcattaccaataggtgaatattcctatcttttgcttgcaggctgattcagaagtagctcaggcagggaaagcagttgcattgtactttgaagataaactcacagagatctactcagacaggaccttcgcacctttgccagagtttgagcaggaagaggatgatggtgaggtaactgaggactctgatgaagactttatacagccccgcagaaaacgcctaaagtcagatgagagaccagtacatataaagtaaaatgacatggatttaaatcaattgttta

SEQ ID NO: 370552 - DNA, 1151 bp, Homo sapiens
agagagagagagagagagagagagagagagagagagagagagagagagagagagagagagagagagagagagagatcaaaccattactacagagaaatgataaggcattggatccactattgaaattattatttttggatcaacaagttggtactttctgacttctgtatcttaacataagggaattttaggtaatgctaagtcagttgtctcattttttgtgataagttttggaatttttagttaattgaaataaataatgcttttacttggtcaaaatgcatgtatagcatttctttcatcttagttccttgtgtttgcctatgtggtcctttatatatttttattgtatcgaagaaacaaaactatcttcaaaaataagttaatttggatatatttgtcatatcaaactacaaagtgtacaaagttaagtttagcccttttctagaaagtgatctttaaaattaaaaatgctcctcttttaaattcaccaaatttatgtgtgggaaggcaccaaaatgattttgtaagtgccactgcaatattccctttcaagtgtggcctaaatttcaatcttaaggatggaatgcatgtctgctccttgttctgaaaaatgtaggcatctactacattttaaaacacagtgaaacatatacataagcctataaaaaaagatttgtgcaatttgaaagcctgttaattttttatgtagacatacctacacacgaaagggttaaattcacagccttactagttccttgcttccagtatttcaattggtctcctcccctcattattattattactactagtactattatttttgcacatagttaactgcccttcaatatgattcttaaaaagtgctgtttctgtggtatcgtattctctaaataatcatatttaattttttaaaacaaggttgcagtttctaattgtttcgttcctgtgtttttgctggtgtgtaataaaagcaagttttttcttttcatggttatttaatacattagctgcctgtaaataattcttgttataatgctctggaatgtgttgtagaagttgtattagattagttttaaacccttgtttgaaagccacattgttttggttatttctattaaattagaaaattgaaaaagttttcaaatgaa

SEQ ID NO: 370553 - DNA, 1686 bp, Homo sapiens
tcacgccatgtcacaaacaagaacagttgaaacttttctgtgaaacatgtgatagattgacatgtagagactgtcagctattggaacacaaagaacatagttggtgtaatacggtgcccagtatgccgccaagaatgcagacagatagaccttgtggataattattttgtgaaagacacatctgaagctcctagcagttctgatgaaaaatcagaacaggtatgtactagttgtgaagacaatgcaagtgcagttggcttttgtgtagaatgtggagagtggctatgtaagacatgtatcgaagcacatcaaagagtaaaatttactaaagatcacttgatcaggaagaaagaagatgtctcagagtctgttggagcatctggtcaacgccctgttttctgccctgtacacaaacaagaacagttgaaacttttctgtgaaacatgtgatagattgacatgtagagactgtcagctattggaacacaaagaacataggtatcagtttttggaagaagcttttcaaaatcagaagggtgcaattgagaatctactggcgaaacttcttgagaagaagaattatgttcattttgcagctactcaggtgcagaataggataaaagaagtaaatgagactaacaaacgagtagaacaggaaattaaagtggccattttcacccttatcaatgaaattaataagaaaggaaaatctctcttacaacagctagagaatgttacaaaggaaagacagatgaagttactacagcagcagaatgacatcacaggcctttcccggcaggtgaagcatgttatgaacttcacaaattgggcaattgcaagtggcagcagcacagcactactatacagcaagcgactgattactttccagttgcgtcatattttgaaagcacggtgtgatcctgtccctgctgctaatggagcaatacgtttccattgtgatcccaccttctgggcaaagaatgtagtcaatttaggtaatctagtaatagagagtaaaccagctcctggttatactcctaatgttgtagttgggcaagttcctccagggacaaaccacattagtaaaacccctggacagattaacttagcacagcttcgactccagcacatgcaacaacaagtatatgcacagaaacatcagcagttgcaacagatgaggatgcagcaaccaccagcacctgtaccaactacaacaacaacaacacaacagcatcctagacaagcagcccctcagatgttacaacaacagcctcctcgattgatcagtgtgcaaacaatgcaaagaggcaacatgaactgtggagcttttcaagcccatcagatgagactggctcagaatgctgccagaataccagggatacccaggcacagcggccctcaatattccatgatgcagccacacctccaaagacaacactcaaacccagggcatgctggaccctttcccgtagtatcggtacacaacaccacaatcaacccaacgagccctactacagcaactatggcaaatgcaaaccgaggtcccaccagcccatctgttacagcaatagagctaatcccctcagttaccaatccagaaaaccttccatcgctgccagatattccacccatacaggtttgtatttgagttgaatgaggcttcattaaacttaatgttaattacaga

SEQ ID NO: 370554 - DNA, 552 bp, Homo sapiens
agggctttgtaaagaaaatggttccatgttctgtagaattttagaaaagcactttatctggttatagcaatttgttctccctagtatggctgacttttcgtcgccaatcctatgcagtctcataactttagaaaggattataatttcccttttttttttttgactctggtatcctttttagatgatgaaagttgttcaagtttatgcagacacacaagagattaatttgaaggtaagcttttcagaccatgcaaacttggtgaaggaatatgcattaccaataggtgaatattcctatcttttgcttgcaggctgattcagaagtagctcaggcagggaaagcagttgcattgtactttgaagataaactcacagagatctactcagacaggaccttcgcacctttgccagagtttgagcaggaagaggatgatggtgaggtaactgaggactctgatgaagactttatacagccccgcagaaaacgcctaaagtcagatgagagaccagtacatataaagtaaaatgacatggatttaaatcaattgttta

SEQ ID NO: 370555 - DNA, 409 bp, Homo sapiens
aatgtgaacgtcttctgctttacctctattgccatgaattaagtattgaattccaggagcctgttcctgcttcggtgagttgcctaccttagtagctcggtggggaagtctcataatacttaagagtatgggctctggcggccgggcgcggtggctcacgcctgtaatcccagcactttgggaggccgaggcaggcggatcacgaggtcaggaaatagagaccacggtgaaaccccgtgtctactaaaaatacaaaaaactagccgggcacggtggcgggcacctgtagtcccagctactccggaggctgaggcaggagaatggcatgaacccgggaggcggagcttgcagtgagccgagatcgcgccactgcactccagcctgggcgacagagcgagactccgtctca

SEQ ID NO: 370556 - DNA, 7776 bp, Homo sapiens
tcacgccatgtcacaaacaagaacagttgaaacttttctgtgaaacatgtgatagattgacatgtagagactgtcagctattggaacacaaagaacatagttggtgtaatacggtgcccagtatgccgccaagaatgcagacagatagaccttgtggataattattttgtgaaagacacatctgaagctcctagcagttctgatgaaaaatcagaacaggtatgtactagttgtgaagacaatgcaagtgcagttggcttttgtgtagaatgtggagagtggctatgtaagacatgtatcgaagcacatcaaagagtaaaatttactaaagatcacttgatcaggaagaaagaagatgtctcagagtctgttggagcatctggtcaacgccctgttttctgccctgtacacaaacaagaacagttgaaacttttctgtgaaacatgtgatagattgacatgtagagactgtcagctattggaacacaaagaacataggtatcagtttttggaagaagcttttcaaaatcagaagggtgcaattgagaatctactggcgaaacttcttgagaagaagaattatgttcattttgcagctactcaggtgcagaataggataaaagaagtaaatgagactaacaaacgagtagaacaggaaattaaagtggccattttcacccttatcaatgaaattaataagaaaggaaaatctctcttacaacagctagagaatgttacaaaggaaagacagatgaagttactacagcagcagaatgacatcacaggcctttcccggcaggtgaagcatgttatgaacttcacaaattgggcaattgcaagtggcagcagcacagcactactatacagcaagcgactgattactttccagttgcgtcatattttgaaagcacggtgtgatcctgtccctgctgctaatggagcaatacgtttccattgtgatcccaccttctgggcaaagaatgtagtcaatttaggtaatctagtaatagagagtaaaccagctcctggttatactcctaatgttgtagttgggcaagttcctccagggacaaaccacattagtaaaacccctggacagattaacttagcacagcttcgactccagcacatgcaacaacaagtatatgcacagaaacatcagcagttgcaacagatgaggatgcagcaaccaccagcacctgtaccaactacaacaacaacaacacaacagcatcctagacaagcagcccctcagatgttacaacaacagcctcctcgattgatcagtgtgcaaacaatgcaaagaggcaacatgaactgtggagcttttcaagcccatcagatgagactggctcagaatgctgccagaataccagggatacccaggcacagcggccctcaatattccatgatgcagccacacctccaaagacaacactcaaacccagggcatgctggaccctttcccgtagtatcggtacacaacaccacaatcaacccaacgagccctactacagcaactatggcaaatgcaaaccgaggtcccaccagcccatctgttacagcaatagagctaatcccctcagttaccaatccagaaaaccttccatcgctgccagatattccacccatacagttggaagatgctggctcaagtagtttagataatctactaagtagatacatctcaggcagtcacctacccccacagcctacaagcaccatgaatccttctccaggtccctctgccctttctccgggatcatcaggtttatccaattctcacacacctgtgagacccccaagtacttctagtactggcagtcgaggcagctgtgggtcatcaggaagaactgctgagaagacaagtcttagtttcaaatctgatcaggtgaaggtcaagcaagaacctgggactgaagatgaaatatgtagcttttcaggaggtgtaaaacaagaaaaaacagaggatggcaggaggagtgcttgcatgttgagcagtcctgagagtagcttgacaccacctctctcaaccaacctgcatctagaaagtgaattggatgcattggcaagcctggaaaaccatgtgaaaactgaacctgcagatatgaatgaaagctgcaaacagtcagggctcagcagccttgttaatggaaagtccccaattcgaagcctcatgcacaggtcggcaaggattggaggagatggcaacaataaagatgatgacccaaatgaagactggtgtgctgtctgccaaaacggaggagatctcttgtgctgcgaaaaatgtccaaaggtctttcatctaacttgtcatgttccaacactacttagctttccaagtggggactggatatgcacattttgtagagatattggaaagccagaagttgaatatgattgtgataatttgcaacatagtaagaaggggaaaactgcgcaggggttaagccccgtggaccaaaggaaatgtgaacgtcttctgctttacctctattgccatgaattaagtattgaattccaggagcctgttcctgcttcgataccaaactactataaaattataaagaaaccaatggatttatccaccgtgaaaaagaagcttcagaaaaaacattcccaacactaccaaatcccggatgactttgtggccgatgtccgtttgatcttcaagaactgtgaaaggtttaatgaagctgattcagaagtagctcaggcagggaaagcagttgcattgtactttgaagataaactcacagagatctactcagacaggaccttcgcacctttgccagagtttgagcaggaagaggatgatggtgaggtaactgaggactctgatgaagactttatacagccccgcagaaaacgcctaaagtcagatgagagaccagtacatataaagtaaaatgacatggatttaaatcaattgtttaaaaaaaaaaaacgaaaaaaaaaaaaaaaaacacaaaaacccagaaaacttttaagctgttgctggaatatcctgcctacagtgggcacctccttgaagaagctgatagcttttacacagtattagattgaaataatggacagaaacacattcttgtcaagaaagggggagagaagtctgtttgcaagtttcaaagcaaaaagcaaaagtgaaatgatttgaggatttctgttctaatggagatgattctctgattgttagaaatggcaaatattgatgattgtgtgctattgattggtgcaggatacttggtatacgagtaaatacttgagactcgtgtcacttgataaattttctttttggactaggtcgcacagttattaaaacaacttttaaccctcccccttcacacacatacatatcaggttgttttctagttaaaaacccaagtagctcagattctactttaatgtcagtgcagatttgcattgaatcatgccattatgttttttctcatttttatgctgttgggtcttagtttttaaattgatataaagaactcagcaatggttttattttctactcatacttagggtttaggaaacactaccactagttatcatttaatcaacttcaatggtctactgaaacaaaaatggtaacttttcattagtggattatttagagttatagtagttgtttccagaaaacacttcctcacaattgtacttcccaatcaaatcatgtgatcatacagttattcccatgaaaggcagaatgtttgtttcaaaattaatctagttttctgtacatttaaatttgagaaggtgacaactggctcttttccagtcttccttcatgtcagttttctgatagaccactattggcaaacagtatctgtcaactaccaaatgtgtaaaattttctgtatttcactttgtcttatttgtaaatagtgaactaaaacttttggcagatcagcaacatttgctgagcctgttttttaagctaatgtgtattcttactaatgttcctatcaagaatggatttgtaatatatgctgtctatttctaatgttcacattcatattttgaggttctatcttattttaatagagaacagacttctcaaaaaatcttcagaagcagcttattattgaaatatcgaaatattgaaataaacccggtggggttagattactcatctgtccaccaagtgggacatttgcatggactgggggcttaaaggacttagaagagacctgtaagtaaatcctgaaaatgagccaatccccacttgaatggttactggagtaaacccacctttaccaccccaattacagcacccgaggccgataaaccaacttggctctggttcatttttcttttcttcatttgtgatgctcagattcaaaatgtgtgttctacactgttacaggcttctcttttgtttgattaaagattttagtcctacttttgtatggacacattagaatattcagagaccaaaatagaagaatttgctgttagatatttttcagaagtcagcagatttgtggcaaatcatttatttgcctttttaaaaattcatttaagcagttcagagagtagactactcagaaaattatttcacgtaattgtctaagaggtcaatattttttaatgcatattgaatcaaataaagtgctctaaagaaattattatacaaattcctttgggttgtttttcttttcttaacaaggggtgggggtaaacaggaatatgattcaggctttctggttgtgtatttaaagagtattgattttattattactattgatttactttattcctggcttccttttcacttttctttcaatttttaaaaaataatttaagccgttgaaaatataccaaactgttgaaacattttactcaaattttaaattcctaaaaatgttttttaataagagggagaaaattatttaaaaatacttatgcctatgccaatttccctcttttttcacaaaatccatgatttcagtttgtaagtagacatatatctaagggcacatttttggaaagtgaggaatagcagcagtataacttcattttgtcaggcctttgagttctaatattttgtattgctcttcaaatggatccttttaaaaaaattgtagataatgagtcataaatagattctgccaactgaggggagaaacattttaagtaaatatttttcagtatttggggccttaaaaaataattgtgtttccttaaaattacatgttagatagagtttttaggtttttttggttttaagatggttaaagcaatttaaaagccacttttttgtcaacatttaatagcctccacttctgttaagataatgtatactgctgaggaattactattaatagctatcaacataccaccattaaattaaggtattcactttagattttttattaaagcttttttcttgcacactgatcgttgtgtttctaagctgattttttcagctctaatatacctatggttaaaaagtataaaaacttaaattgatatttagatatatgttttcctattagtttatgttttaaaaagacaaaattgtatctgtcagtccctgaaggcagtttgtttttatactctctcacatttgtatttgttttttaaatggcagtattttagaagatttggagaaaagtccacataataatgttttcttaaaagcttttaaagtttttgctgtacttcaatttacttcttccatcagaaaactaagaacaaagtgttgctcagtctgttccgctgacctaaatttgtgttttcagcacttggctcagccaattcactgagtgaaggaattgctttatgaggcaaagcatgtgaaagttctaaagtatggttagattgtaggtcgtgctctatatggaaacatcaaaccattactacagagaaatgataaggcattggatccactattgaaattattatttttggatcaacaagttggtactttctgacttctgtatcttaacataagggaattttaggtaatgctaagtcagttgtctcattttttgtgataagttttggaatttttagttaattgaaataaataatgcttttaaatagaagtaaaaggtttataagtgtgcaaattgtagatttatcaattacctcagcaggtatcctgccatgtaattattagtgattagtgttaataagataatagattcaggtcttccaactatgcccttggattgtggcctactgtatgttattaaatggtctcttactatccaaaatgggagtagatgctgtggccccgtctcccttggcttttacgtcccatatccacccccattcatgtacaacatgtgaaatataaaaatctcatttcttgtcaaaatcagcactgcttatttgcatactcagcatcggatcagtgagtagttttataaaaaatccacgcacccaactcccttagttaaaacagattcttaattcataccatgaattcttaatttctgtaccatctatgttaatgatctgctgaaggtgactcaagattttcaaggtgtaatacagtttgatcatgtaccggacctggatatttaattttttttccctcacagttaatctcctccttgataaagcaataacactgctttgagtctgttgcctaatagcatgtcagaatcctctcctggatggtgattttataggaaagtttgtatgcatatcacccagtctatcttttaaaaattaagaaatttaaatgtatgctggaagtaatgacactatattgtggcattttattttaaaaattggggaaagttgcatatttttttaaaagtaagtgtttgagtaaaaaaattgaaggtacttttttaaggaaaaaaatttatatgccacagtttacatagacatttcagattcaacacgtactcttgaatataatggtttcttttacttggtcaaaatgcatgtatagcatttctttcatcttagttccttgtgtttgcctatgtggtcctttatatatttttattgtatcgaagaaacaaaactatcttcaaaaataagttaatttggatatatttgtcatatcaaactacaaagtgtacaaagttaagtttagcccttttctagaaagtgatctttaaaattaaaaatgctcctcttttaaattcaccaaatttatgtgtgggaaggcaccaaaatgattttgtaagtgccactgcaatattccctttcaagtgtggcctaaatttcaatcttaaggatggaatgcatgtctgctccttgttctgaaaaatgtaggcatctactacattttaaaacacagtgaaacatatacataagcctataaaaaaagatttgtgcaatttgaaagcctgttaattttttatgtagacatacctacacacgaaagggttaaattcacagccttactagttccttgcttccagtatttcaattggtctcctcccctcattattattattactactagtactattatttttgcacatagttaactgcccttcaatatgattcttaaaaagtgctgtttctgtggtatcgtattctctaaataatcatatttaattttttaaaacaaggttgcagtttctaattgtttcgttcctgtgtttttgctggtgtgtaataaaagcaagttttttcttttcatggttatttaatacattagctgcctgtaaataattcttgttataatgctctggaatgtgttgtagaagttgtattagattagttttaaacccttgtttgaaagccacattgttttggttatttctattaaattagaaaattgaaaaagttttcaaatgaa

SEQ ID NO: 370557 - DNA, 7239 bp, Homo sapiens
tctgccttgcatattttggcaattcaaaggcagatggaatcagtattggcaatcttgagtatccttgagtaagtcttgtcatgggagaattgatttagattgattagataggcctcttctaatagataatctcttttactgtcttaattttctgtatgtctaagtaaaaaagaataaggacagagagtatatttttctgaataaccaaacgtcatttattcagctttggaatgtattaagtttctgatcatcatcatcatctttaaactgactccattccctgctgtactgttggagctttgaggtgctgatagttgtcagaggaaagaggaaaacatggtgattactcaacaaagtagatgatttagttgattatatgcaaattctcattttttaaatttttcaggtaatctagtaatagagagtaaaccagctcctggttatactcctaatgttgtagttgggcaagttcctccagggacaaaccacattagtaaaacccctggacagattaacttagcacagcttcgactccagcacatgcaacaacaagtatatgcacagaaacatcagcagttgcaacagatgaggatgcagcaaccaccagcacctgtaccaactacaacaacaacaacacaacagcatcctagacaagcagcccctcagatgttacaacaacagcctcctcgattgatcagtgtgcaaacaatgcaaagaggcaacatgaactgtggagcttttcaagcccatcagatgagactggctcagaatgctgccagaataccagggatacccaggcacagcggccctcaatattccatgatgcagccacacctccaaagacaacactcaaacccagggcatgctggaccctttcccgtagtatcggtacacaacaccacaatcaacccaacgagccctactacagcaactatggcaaatgcaaaccgaggtcccaccagcccatctgttacagcaatagagctaatcccctcagttaccaatccagaaaaccttccatcgctgccagatattccacccatacagttggaagatgctggctcaagtagtttagataatctactaagtagatacatctcaggcagtcacctacccccacagcctacaagcaccatgaatccttctccaggtccctctgccctttctccgggatcatcaggtttatccaattctcacacacctgtgagacccccaagtacttctagtactggcagtcgaggcagctgtgggtcatcaggaagaactgctgagaagacaagtcttagtttcaaatctgatcaggtgaaggtcaagcaagaacctgggactgaagatgaaatatgtagcttttcaggaggtgtaaaacaagaaaaaacagaggatggcaggaggagtgcttgcatgttgagcagtcctgagagtagcttgacaccacctctctcaaccaacctgcatctagaaagtgaattggatgcattggcaagcctggaaaaccatgtgaaaactgaacctgcagatatgaatgaaagctgcaaacagtcagggctcagcagccttgttaatggaaagtccccaattcgaagcctcatgcacaggtcggcaaggattggaggagatggcaacaataaagatgatgacccaaatgaagactggtgtgctgtctgccaaaacggaggagatctcttgtgctgcgaaaaatgtccaaaggtctttcatctaacttgtcatgttccaacactacttagctttccaagtggggactggatatgcacattttgtagagatattggaaagccagaagttgaatatgattgtgataatttgcaacatagtaagaaggggaaaactgcgcaggggttaagccccgtggaccaaaggaaatgtgaacgtcttctgctttacctctattgccatgaattaagtattgaattccaggagcctgttcctgcttcgataccaaactactataaaattataaagaaaccaatggatttatccaccgtgaaaaagaagcttcagaaaaaacattcccaacactaccaaatcccggatgactttgtggccgatgtccgtttgatcttcaagaactgtgaaaggtttaatgaaatgatgaaagttgttcaagtttatgcagacacacaagagattaatttgaaggctgattcagaagtagctcaggcagggaaagcagttgcattgtactttgaagataaactcacagagatctactcagacaggaccttcgcacctttgccagagtttgagcaggaagaggatgatggtgaggtaactgaggactctgatgaagactttatacagccccgcagaaaacgcctaaagtcagatgagagaccagtacatataaagtaaaatgacatggatttaaatcaattgtttaaaaaaaaaaaacgaaaaaaaaaaaaaaaaacacaaaaacccagaaaacttttaagctgttgctggaatatcctgcctacagtgggcacctccttgaagaagctgatagcttttacacagtattagattgaaataatggacagaaacacattcttgtcaagaaagggggagagaagtctgtttgcaagtttcaaagcaaaaagcaaaagtgaaatgatttgaggatttctgttctaatggagatgattctctgattgttagaaatggcaaatattgatgattgtgtgctattgattggtgcaggatacttggtatacgagtaaatacttgagactcgtgtcacttgataaattttctttttggactaggtcgcacagttattaaaacaacttttaaccctcccccttcacacacatacatatcaggttgttttctagttaaaaacccaagtagctcagattctactttaatgtcagtgcagatttgcattgaatcatgccattatgttttttctcatttttatgctgttgggtcttagtttttaaattgatataaagaactcagcaatggttttattttctactcatacttagggtttaggaaacactaccactagttatcatttaatcaacttcaatggtctactgaaacaaaaatggtaacttttcattagtggattatttagagttatagtagttgtttccagaaaacacttcctcacaattgtacttcccaatcaaatcatgtgatcatacagttattcccatgaaaggcagaatgtttgtttcaaaattaatctagttttctgtacatttaaatttgagaaggtgacaactggctcttttccagtcttccttcatgtcagttttctgatagaccactattggcaaacagtatctgtcaactaccaaatgtgtaaaattttctgtatttcactttgtcttatttgtaaatagtgaactaaaacttttggcagatcagcaacatttgctgagcctgttttttaagctaatgtgtattcttactaatgttcctatcaagaatggatttgtaatatatgctgtctatttctaatgttcacattcatattttgaggttctatcttattttaatagagaacagacttctcaaaaaatcttcagaagcagcttattattgaaatatcgaaatattgaaataaacccggtggggttagattactcatctgtccaccaagtgggacatttgcatggactgggggcttaaaggacttagaagagacctgtaagtaaatcctgaaaatgagccaatccccacttgaatggttactggagtaaacccacctttaccaccccaattacagcacccgaggccgataaaccaacttggctctggttcatttttcttttcttcatttgtgatgctcagattcaaaatgtgtgttctacactgttacaggcttctcttttgtttgattaaagattttagtcctacttttgtatggacacattagaatattcagagaccaaaatagaagaatttgctgttagatatttttcagaagtcagcagatttgtggcaaatcatttatttgcctttttaaaaattcatttaagcagttcagagagtagactactcagaaaattatttcacgtaattgtctaagaggtcaatattttttaatgcatattgaatcaaataaagtgctctaaagaaattattatacaaattcctttgggttgtttttcttttcttaacaaggggtgggggtaaacaggaatatgattcaggctttctggttgtgtatttaaagagtattgattttattattactattgatttactttattcctggcttccttttcacttttctttcaatttttaaaaaataatttaagccgttgaaaatataccaaactgttgaaacattttactcaaattttaaattcctaaaaatgttttttaataagagggagaaaattatttaaaaatacttatgcctatgccaatttccctcttttttcacaaaatccatgatttcagtttgtaagtagacatatatctaagggcacatttttggaaagtgaggaatagcagcagtataacttcattttgtcaggcctttgagttctaatattttgtattgctcttcaaatggatccttttaaaaaaattgtagataatgagtcataaatagattctgccaactgaggggagaaacattttaagtaaatatttttcagtatttggggccttaaaaaataattgtgtttccttaaaattacatgttagatagagtttttaggtttttttggttttaagatggttaaagcaatttaaaagccacttttttgtcaacatttaatagcctccacttctgttaagataatgtatactgctgaggaattactattaatagctatcaacataccaccattaaattaaggtattcactttagattttttattaaagcttttttcttgcacactgatcgttgtgtttctaagctgattttttcagctctaatatacctatggttaaaaagtataaaaacttaaattgatatttagatatatgttttcctattagtttatgttttaaaaagacaaaattgtatctgtcagtccctgaaggcagtttgtttttatactctctcacatttgtatttgttttttaaatggcagtattttagaagatttggagaaaagtccacataataatgttttcttaaaagcttttaaagtttttgctgtacttcaatttacttcttccatcagaaaactaagaacaaagtgttgctcagtctgttccgctgacctaaatttgtgttttcagcacttggctcagccaattcactgagtgaaggaattgctttatgaggcaaagcatgtgaaagttctaaagtatggttagattgtaggtcgtgctctatatggaaacatcaaaccattactacagagaaatgataaggcattggatccactattgaaattattatttttggatcaacaagttggtactttctgacttctgtatcttaacataagggaattttaggtaatgctaagtcagttgtctcattttttgtgataagttttggaatttttagttaattgaaataaataatgcttttaaatagaagtaaaaggtttataagtgtgcaaattgtagatttatcaattacctcagcaggtatcctgccatgtaattattagtgattagtgttaataagataatagattcaggtcttccaactatgcccttggattgtggcctactgtatgttattaaatggtctcttactatccaaaatgggagtagatgctgtggccccgtctcccttggcttttacgtcccatatccacccccattcatgtacaacatgtgaaatataaaaatctcatttcttgtcaaaatcagcactgcttatttgcatactcagcatcggatcagtgagtagttttataaaaaatccacgcacccaactcccttagttaaaacagattcttaattcataccatgaattcttaatttctgtaccatctatgttaatgatctgctgaaggtgactcaagattttcaaggtgtaatacagtttgatcatgtaccggacctggatatttaattttttttccctcacagttaatctcctccttgataaagcaataacactgctttgagtctgttgcctaatagcatgtcagaatcctctcctggatggtgattttataggaaagtttgtatgcatatcacccagtctatcttttaaaaattaagaaatttaaatgtatgctggaagtaatgacactatattgtggcattttattttaaaaattggggaaagttgcatatttttttaaaagtaagtgtttgagtaaaaaaattgaaggtacttttttaaggaaaaaaatttatatgccacagtttacatagacatttcagattcaacacgtactcttgaatataatggtttcttttacttggtcaaaatgcatgtatagcatttctttcatcttagttccttgtgtttgcctatgtggtcctttatatatttttattgtatcgaagaaacaaaactatcttcaaaaataagttaatttggatatatttgtcatatcaaactacaaagtgtacaaagttaagtttagcccttttctagaaagtgatctttaaaattaaaaatgctcctcttttaaattcaccaaatttatgtgtgggaaggcaccaaaatgattttgtaagtgccactgcaatattccctttcaagtgtggcctaaatttcaatcttaaggatggaatgcatgtctgctccttgttctgaaaaatgtaggcatctactacattttaaaacacagtgaaacatatacataagcctataaaaaaagatttgtgcaatttgaaagcctgttaattttttatgtagacatacctacacacgaaagggttaaattcacagccttactagttccttgcttccagtatttcaattggtctcctcccctcattattattattactactagtactattatttttgcacatagttaactgcccttcaatatgattcttaaaaagtgctgtttctgtggtatcgtattctctaaataatcatatttaattttttaaaacaaggttgcagtttctaattgtttcgttcctgtgtttttgctggtgtgtaataaaagcaagttttttcttttcatggttatttaatacattagctgcctgtaaataattcttgttataatgctctggaatgtgttgtagaagttgtattagattagttttaaacccttgtttgaaagccacattgttttggttatttctattaaattagaaaattgaaaaagttttcaaatgaa

SEQ ID NO: 370558 - DNA, 6601 bp, Homo sapiens
tcacgccatgtcacaaacaagaacagttgaaacttttctgtgaaacatgtgatagattgacatgtagagactgtcagctattggaacacaaagaacatagttggtgtaatacggtgcccagtatgccgccaagaatgcagacagatagaccttgtggataattattttgtgaaagacacatctgaagctcctagcagttctgatgaaaaatcagaacaggtatgtactagttgtgaagacaatgcaagtgcagttggcttttgtgtagaatgtggagagtggctatgtaagacatgtatcgaagcacatcaaagagtaaaatttactaaagatcacttgatcaggaagaaagaagatgtctcagagtctgttggagcatctggtcaacgccctgttttctgccctgtacacaaacaagaacagttgaaacttttctgtgaaacatgtgatagattgacatgtagagactgtcagctattggaacacaaagaacataggtatcagtttttggaagaagcttttcaaaatcagaagggtgcaattgagaatctactggcgaaacttcttgagaagaagaattatgttcattttgcagctactcaggtgcagaataggataaaagaagtaaatgagactaacaaacgagtagaacaggaaattaaagtggccattttcacccttatcaatgaaattaataagaaaggaaaatctctcttacaacagctagagaatgttacaaaggaaagacagatgaagttactacagcagcagaatgacatcacaggcctttcccggcaggtgaagcatgttatgaacttcacaaattgggcaattgcaagtggcagcagcacagcactactatacagcaagcgactgattactttccagttgcgtcatattttgaaagcacggtgtgatcctgtccctgctgctaatggagcaatacgtttccattgtgatcccaccttctgggcaaagaatgtagtcaatttaggtaatctagtaatagagagtaaaccagctcctggttatactcctaatgttgtagttgggcaagttcctccagggacaaaccacattagtaaaacccctggacagattaacttagcacagcttcgactccagcacatgcaacaacaagtatatgcacagaaacatcagcagttgcaacagatgaggatgcagcaaccaccagcacctgtaccaactacaacaacaacaacacaacagcatcctagacaagcagcccctcagatgttacaacaacagcctcctcgattgatcagtgtgcaaacaatgcaaagaggcaacatgaactgtggagcttttcaagcccatcagatgagactggctcagaatgctgccagaataccagggatacccaggcacagcggccctcaatattccatgatgcagccacacctccaaagacaacactcaaacccagggcatgctggaccctttcccgtagtatcggtacacaacaccacaatcaacccaacgagccctactacagcaactatggcaaatgcaaaccgaggtcccaccagcccatctgttacagcaatagagctaatcccctcagttaccaatccagaaaaccttccatcgctgccagatattccacccatacagttggaagatgctggctcaagtagtttagataatctactaagtagatacatctcaggcagtcacctacccccacagcctacaagcaccatgaatccttctccaggtccctctgccctttctccgggatcatcaggtttatccaattctcacacacctgtgagacccccaagtacttctagtactggcagtcgaggcagctgtgggtcatcaggaagaactgctgagaagacaagtcttagtttcaaatctgatcaggtgaaggtcaagcaagaacctgggactgaagatgaaatatgtagcttttcaggaggtgtaaaacaagaaaaaacagaggatggcaggaggagtgcttgcatgttgagcagtcctgagagtagcttgacaccacctctctcaaccaacctgcatctagaaagtgaattggatgcattggcaagcctggaaaaccatgtgaaaactgaacctgcagatatgaatgaaagctgcaaacagtcagggctcagcagccttgttaatggaaagtccccaattcgaagcctcatgcacaggtcggcaaggattggaggagatggcaacaataaagatgatgacccaaatgaagactggtgtgctgtctgccaaaacggaggagatctcttgtgctgcgaaaaatgtccaaaggtctttcatctaacttgtcatgttccaacactacttagctttccaagtggggactggatatgcacattttgtagagatattggaaagccagaagttgaatatgattgtgataatttgcaacatagtaagaaggggaaaactgcgcaggggttaagccccgtggaccaaaggaaatgtgaacgtcttctgctttacctctattgccatgaattaagtattgaattccaggagcctgttcctgcttcgataccaaactactataaaattataaagaaaccaatggatttatccaccgtgaaaaagaagcttcagaaaaaacattcccaacactaccaaatcccggatgactttgtggccgatgtccgtttgatcttcaagaactgtgaaaggtttaatgaaatgatgaaagttgttcaagtttatgcagacacacaagagattaatttgaaggctgattcagaagtagctcaggcagggaaagcagttgcattgtactttgaagataaactcacagagatctactcagacaggaccttcgcacctttgccagagtttgagcaggaagaggatgatggtgagagaacagacttctcaaaaaatcttcagaagcagcttattattgaaatatcgaaatattgaaataaacccggtggggttagattactcatctgtccaccaagtgggacatttgcatggactgggggcttaaaggacttagaagagacctgtaagtaaatcctgaaaatgagccaatccccacttgaatggttactggagtaaacccacctttaccaccccaattacagcacccgaggccgataaaccaacttggctctggttcatttttcttttcttcatttgtgatgctcagattcaaaatgtgtgttctacactgttacaggcttctcttttgtttgattaaagattttagtcctacttttgtatggacacattagaatattcagagaccaaaatagaagaatttgctgttagatatttttcagaagtcagcagatttgtggcaaatcatttatttgcctttttaaaaattcatttaagcagttcagagagtagactactcagaaaattatttcacgtaattgtctaagaggtcaatattttttaatgcatattgaatcaaataaagtgctctaaagaaattattatacaaattcctttgggttgtttttcttttcttaacaaggggtgggggtaaacaggaatatgattcaggctttctggttgtgtatttaaagagtattgattttattattactattgatttactttattcctggcttccttttcacttttctttcaatttttaaaaaataatttaagccgttgaaaatataccaaactgttgaaacattttactcaaattttaaattcctaaaaatgttttttaataagagggagaaaattatttaaaaatacttatgcctatgccaatttccctcttttttcacaaaatccatgatttcagtttgtaagtagacatatatctaagggcacatttttggaaagtgaggaatagcagcagtataacttcattttgtcaggcctttgagttctaatattttgtattgctcttcaaatggatccttttaaaaaaattgtagataatgagtcataaatagattctgccaactgaggggagaaacattttaagtaaatatttttcagtatttggggccttaaaaaataattgtgtttccttaaaattacatgttagatagagtttttaggtttttttggttttaagatggttaaagcaatttaaaagccacttttttgtcaacatttaatagcctccacttctgttaagataatgtatactgctgaggaattactattaatagctatcaacataccaccattaaattaaggtattcactttagattttttattaaagcttttttcttgcacactgatcgttgtgtttctaagctgattttttcagctctaatatacctatggttaaaaagtataaaaacttaaattgatatttagatatatgttttcctattagtttatgttttaaaaagacaaaattgtatctgtcagtccctgaaggcagtttgtttttatactctctcacatttgtatttgttttttaaatggcagtattttagaagatttggagaaaagtccacataataatgttttcttaaaagcttttaaagtttttgctgtacttcaatttacttcttccatcagaaaactaagaacaaagtgttgctcagtctgttccgctgacctaaatttgtgttttcagcacttggctcagccaattcactgagtgaaggaattgctttatgaggcaaagcatgtgaaagttctaaagtatggttagattgtaggtcgtgctctatatggaaacatcaaaccattactacagagaaatgataaggcattggatccactattgaaattattatttttggatcaacaagttggtactttctgacttctgtatcttaacataagggaattttaggtaatgctaagtcagttgtctcattttttgtgataagttttggaatttttagttaattgaaataaataatgcttttaaatagaagtaaaaggtttataagtgtgcaaattgtagatttatcaattacctcagcaggtatcctgccatgtaattattagtgattagtgttaataagataatagattcaggtcttccaactatgcccttggattgtggcctactgtatgttattaaatggtctcttactatccaaaatgggagtagatgctgtggccccgtctcccttggcttttacgtcccatatccacccccattcatgtacaacatgtgaaatataaaaatctcatttcttgtcaaaatcagcactgcttatttgcatactcagcatcggatcagtgagtagttttataaaaaatccacgcacccaactcccttagttaaaacagattcttaattcataccatgaattcttaatttctgtaccatctatgttaatgatctgctgaaggtgactcaagattttcaaggtgtaatacagtttgatcatgtaccggacctggatatttaattttttttccctcacagttaatctcctccttgataaagcaataacactgctttgagtctgttgcctaatagcatgtcagaatcctctcctggatggtgattttataggaaagtttgtatgcatatcacccagtctatcttttaaaaattaagaaatttaaatgtatgctggaagtaatgacactatattgtggcattttattttaaaaattggggaaagttgcatatttttttaaaagtaagtgtttgagtaaaaaaattgaaggtacttttttaaggaaaaaaatttatatgccacagtttacatagacatttcagattcaacacgtactcttgaatataatggtttcttttacttggtcaaaatgcatgtatagcatttctttcatcttagttccttgtgtttgcctatgtggtcctttatatatttttattgtatcgaagaaacaaaactatcttcaaaaataagttaatttggatatatttgtcatatcaaactacaaagtgtacaaagttaagtttagcccttttctagaaagtgatctttaaaattaaaaatgctcctcttttaaattcaccaaatttatgtgtgggaaggcaccaaaatgattttgtaagtgccactgcaatattccctttcaagtgtggcctaaatttcaatcttaaggatggaatgcatgtctgctccttgttctgaaaaatgtaggcatctactacattttaaaacacagtgaaacatatacataagcctataaaaaaagatttgtgcaatttgaaagcctgttaattttttatgtagacatacctacacacgaaagggttaaattcacagccttactagttccttgcttccagtatttcaattggtctcctcccctcattattattattactactagtactattatttttgcacatagttaactgcccttcaatatgattcttaaaaagtgctgtttctgtggtatcgtattctctaaataatcatatttaattttttaaaacaaggttgcagtttctaattgtttcgttcctgtgtttttgctggtgtgtaataaaagcaagttttttcttttcatggttatttaatacattagctgcctgtaaataattcttgttataatgctctggaatgtgttgtagaagttgtattagattagttttaaacccttgtttgaaagccacattgttttggttatttctattaaattagaaaattgaaaaagttttcaaatgaa

SEQ ID NO: 370559 - DNA, 6890 bp, Homo sapiens
tcacgccatgtcacaaacaagaacagttgaaacttttctgtgaaacatgtgatagattgacatgtagagactgtcagctattggaacacaaagaacatagttggtgtaatacggtgcccagtatgccgccaagaatgcagacagatagaccttgtggataattattttgtgaaagacacatctgaagctcctagcagttctgatgaaaaatcagaacaggtatgtactagttgtgaagacaatgcaagtgcagttggcttttgtgtagaatgtggagagtggctatgtaagacatgtatcgaagcacatcaaagagtaaaatttactaaagatcacttgatcaggaagaaagaagatgtctcagagtctgttggagcatctggtcaacgccctgttttctgccctgtacacaaacaagaacagttgaaacttttctgtgaaacatgtgatagattgacatgtagagactgtcagctattggaacacaaagaacataggtatcagtttttggaagaagcttttcaaaatcagaagggtgcaattgagaatctactggcgaaacttcttgagaagaagaattatgttcattttgcagctactcaggtgcagaataggataaaagaagtaaatgagactaacaaacgagtagaacaggaaattaaagtggccattttcacccttatcaatgaaattaataagaaaggaaaatctctcttacaacagctagagaatgttacaaaggaaagacagatgaagttactacagcagcagaatgacatcacaggcctttcccggcaggtgaagcatgttatgaacttcacaaattgggcaattgcaagtggcagcagcacagcactactatacagcaagcgactgattactttccagttgcgtcatattttgaaagcacggtgtgatcctgtccctgctgctaatggagcaatacgtttccattgtgatcccaccttctgggcaaagaatgtagtcaatttaggtaatctagtaatagagagtaaaccagctcctggttatactcctaatgttgtagttgggcaagttcctccagggacaaaccacattagtaaaacccctggacagattaacttagcacagcttcgactccagcacatgcaacaacaagtatatgcacagaaacatcagcagttgcaacagatgaggatgcagcaaccaccagcacctgtaccaactacaacaacaacaacacaacagcatcctagacaagcagcccctcagatgttacaacaacagcctcctcgattgatcagtgtgcaaacaatgcaaagaggcaacatgaactgtggagcttttcaagcccatcagatgagactggctcagaatgctgccagaataccagggatacccaggcacagcggccctcaatattccatgatgcagccacacctccaaagacaacactcaaacccagggcatgctggaccctttcccgtagtatcggtacacaacaccacaatcaacccaacgagccctactacagcaactatggcaaatgcaaaccgaggtcccaccagcccatctgttacagcaatagagctaatcccctcagttaccaatccagaaaaccttccatcgctgccagatattccacccatacagttggaagatgctggctcaagtagtttagataatctactaagtagatacatctcaggcagtcacctacccccacagcctacaagcaccatgaatccttctccaggtccctctgccctttctccgggatcatcaggtttatccaattctcacacacctgtgagacccccaagtacttctagtactggcagtcgaggcagctgtgggtcatcaggaagaactgctgagaagacaagtcttagtttcaaatctgatcaggtgaaggtcaagcaagaacctgggactgaagatgaaatatgtagcttttcaggaggtgtaaaacaagaaaaaacagaggatggcaggaggagtgcttgcatgttgagcagtcctgagagtagcttgacaccacctctctcaaccaacctgcatctagaaagtgaattggatgcattggcaagcctggaaaaccatgtgaaaactgaacctgcagatatgaatgaaagctgcaaacagtcagggctcagcagccttgttaatggaaagtccccaattcgaagcctcatgcacaggtcggcaaggattggaggagatggcaacaataaagatgatgacccaaatgaagactggtgtgctgtctgccaaaacggaggagatctcttgtgctgcgaaaaatgtccaaaggtctttcatctaacttgtcatgttccaacactacttagctttccaagtggggactggatatgcacattttgtagagatattggaaagccagaagttgaatatgattgtgataatttgcaacatagtaagaaggggaaaactgcgcaggggttaagccccgtggaccaaaggaaatgtgaacgtcttctgctttacctctattgccatgaattaagtattgaattccaggagcctgttcctgcttcgataccaaactactataaaattataaagaaaccaatggatttatccaccgtgaaaaagaagcttcagaaaaaacattcccaacactaccaaatcccggatgactttgtggccgatgtccgtttgatcttcaagaactgtgaaaggtttaatgaaatgatgaaagttgttcaagtttatgcagacacacaagagattaatttgaaggctgattcagaagtagctcaggcagggaaagcagttgcattgtactttgaagataaactcacagagatctactcagacaggaccttcgcacctttgccagagtttgagcaggaagaggatgatggtgaggtaactgaggactctgatgaagactttatacagccccgcagaaaacgcctaaagtcagatgagagaccagtacatataaagtaaaatgacatggatttaaatcaattgtttaaaaaaaaaaaacgaaaaaaaaaaaaaaaaacacaaaaacccagaaaacttttaagctgttgctggaatatcctgcctacagtgggcacctccttgaagaagctgatagcttttacacagtattagattgaaataatggacagaaacacattcttgtcaagaaagggggagagaagtctgtttgcaagtttcaaagcaaaaagcaaaagtgaaatgatttgaggatttctgttctaatggagatgattctctgattgttagaaatggcaaatattgatgattgtgtgctattgattggtgcaggatacttggtatacgagtaaatacttgagactcgtgtcacttgataaattttctttttggactaggtcgcacagttattaaaacaacttttaaccctcccccttcacacacatacatatcaggttgttttctagttaaaaacccaagtagctcagattctactttaatgtcagtgcagatttgcattgaatcatgccattatgttttttctcatttttatgctgttgggtcttagtttttaaattgatataaagaactcagcaatggttttattttctactcatacttagggtttaggaaacactaccactagttatcatttaatcaacttcaatggtctactgaaacaaaaatggtaacttttcattagtggattatttagagttatagtagttgtttccagaaaacacttcctcacaattgtacttcccaatcaaatcatgtgatcatacagttattcccatgaaaggcagaatgtttgtttcaaaattaatctagttttctgtacatttaaatttgagaaggtgacaactggctcttttccagtcttccttcatgtcagttttctgatagaccactattggcaaacagtatctgtcaactaccaaatgtgtaaaattttctgtatttcactttgtcttatttgtaaatagtgaactaaaacttttggcagatcagcaacatttgctgagcctgttttttaagctaatgtgtattcttactaatgttcctatcaagaatggatttgtaatatatgctgtctatttctaatgttcacattcatattttgaggttctatcttattttaatagagaacagacttctcaaaaaatcttcagaagcagcttattattgaaatatcgaaatattgaaataaacccggtggggttagattactcatctgtccaccaagtgggacatttgcatggactgggggcttaaaggacttagaagagacctgtaagtaaatcctgaaaatgagccaatccccacttgaatggttactggagtaaacccacctttaccaccccaattacagcacccgaggccgataaaccaacttggctctggttcatttttcttttcttcatttgtgatgctcagattcaaaatgtgtgttctacactgttacaggcttctcttttgtttgattaaagattttagtcctacttttgtatggacacattagaatattcagagaccaaaatagaagaatttgctgttagatatttttcagaagtcagcagatttgtggcaaatcatttatttgcctttttaaaaattcatttaagcagttcagagagtagactactcagaaaattatttcacgtaattgtctaagaggtcaatattttttaatgcatattgaatcaaataaagtgctctaaagaaattattatacaaattcctttgggttgtttttcttttcttaacaaggggtgggggtaaacaggaatatgattcaggctttctggttgtgtatttaaagagtattgattttattattactattgatttactttattcctggcttccttttcacttttctttcaatttttaaaaaataatttaagccgttgaaaatataccaaactgttgaaacattttactcaaattttaaattcctaaaaatgttttttaataagagggagaaaattatttaaaaatacttatgcctatgccaatttccctcttttttcacaaaatccatgatttcagtttgtaagtagacatatatctaagggcacatttttggaaagtgaggaatagcagcagtataacttcattttgtcaggcctttgagttctaatattttgtattgctcttcaaatggatccttttaaaaaaattgtagataatgagtcataaatagattctgccaactgaggggagaaacattttaagtaaatatttttcagtatttggggccttaaaaaataattgtgtttccttaaaattacatgttagatagagtttttaggtttttttggttttaagatggttaaagcaatttaaaagccacttttttgtcaacatttaatagcctccacttctgttaagataatgtatactgctgaggaattactattaatagctatcaacataccaccattaaattaaggtattcactttagattttttattaaagcttttttcttgcacactgatcgttgtgtttctaagctgattttttcagctctaatatacctatggttaaaaagtataaaaacttaaattgatatttagatatatgttttcctattagtttatgttttaaaaagacaaaattgtatctgtcagtccctgaaggcagtttgtttttatactctctcacatttgtatttgttttttaaatggcagtattttagaagatttggagaaaagtccacataataatgttttcttaaaagcttttaaagtttttgctgtacttcaatttacttcttccatcagaaaactaagaacaaagtgttgctcagtctgttccgctgacctaaatttgtgttttcagcacttggctcagccaattcactgagtgaaggaattgctttatgaggcaaagcatgtgaaagttctaaagtatggttagattgtaggtcgtgctctatatggaaacatcaaaccattactacagagaaatgataaggcattggatccactattgaaattattatttttggatcaacaagttggtactttctgacttctgtatcttaacataagggaattttaggtaatgctaagtcagttgtctcattttttgtgataagttttggaatttttagttaattgaaataaataatgcttttaaatagaagtaaaaggtttataagtgtgcaaattgtagatttatcaattacctcagcaggtatcctgccatgtaattattagtgattagtgttaataagataatagattcaggtcttccaactatgcccttggattgtggcctactgtatgttattaaatggtctcttactatccaaaatgggagtagatgctgtggccccgtctcccttggcttttacgtcccatatccacccccattcatgtacaacatgtgaaatataaaaatctcatttcttgtcaaaatcagcactgcttatttgcatactcagcatcggatcagtgagtagttttataaaaaatccacgcacccaactcccttagttaaaacagattcttaattcataccatgaattcttaatttctgtaccatctatgttaatgatctgctgaaggtgactcaagattttcaaggtgtaatacagtttgatcatgtaccggacctggatatttaattttttttccctcacagttaatctcctccttgataaagcaataacactgctttgagtctgttgcctaatagcatgtcagaatcctctcctggatggtgattttataggaaagtttgtatgcatatcacccagtctatcttttaaaaattaagaaatttaaatgtatgctggaagtaatgacactatattgtggcattttattttaaaaattggggaaagttgcatatttttttaaaagtaagtgtttgagtaaaaaaattgaaggtacttttttaaggatattggtttcttttcttggtc

SEQ ID NO: 370560 - DNA, 3058 bp, Homo sapiens
tcacgccatgtcacaaacaagaacagttgaaacttttctgtgaaacatgtgatagattgacatgtagagactgtcagctattggaacacaaagaacatagttggtgtaatacggtgcccagtatgccgccaagaatgcagacagatagaccttgtggataattattttgtgaaagacacatctgaagctcctagcagttctgatgaaaaatcagaacaggtatgtactagttgtgaagacaatgcaagtgcagttggcttttgtgtagaatgtggagagtggctatgtaagacatgtatcgaagcacatcaaagagtaaaatttactaaagatcacttgatcaggaagaaagaagatgtctcagagtctgttggagcatctggtcaacgccctgttttctgccctgtacacaaacaagaacagttgaaacttttctgtgaaacatgtgatagattgacatgtagagactgtcagctattggaacacaaagaacataggtatcagtttttggaagaagcttttcaaaatcagaagggtgcaattgagaatctactggcgaaacttcttgagaagaagaattatgttcattttgcagctactcaggtgcagaataggataaaagaagtaaatgagactaacaaacgagtagaacaggaaattaaagtggccattttcacccttatcaatgaaattaataagaaaggaaaatctctcttacaacagctagagaatgttacaaaggaaagacagatgaagttactacagcagcagaatgacatcacaggcctttcccggcaggtgaagcatgttatgaacttcacaaattgggcaattgcaagtggcagcagcacagcactactatacagcaagcgactgattactttccagttgcgtcatattttgaaagcacggtgtgatcctgtccctgctgctaatggagcaatacgtttccattgtgatcccaccttctgggcaaagaatgtagtcaatttaggtaatctagtaatagagagtaaaccagctcctggttatactcctaatgttgtagttgggcaagttcctccagggacaaaccacattagtaaaacccctggacagattaacttagcacagcttcgactccagcacatgcaacaacaagtatatgcacagaaacatcagcagttgcaacagatgaggatgcagcaaccaccagcacctgtaccaactacaacaacaacaacacaacagcatcctagacaagcagcccctcagatgttacaacaacagcctcctcgattgatcagtgtgcaaacaatgcaaagaggcaacatgaactgtggagcttttcaagcccatcagatgagactggctcagaatgctgccagaataccagggatacccaggcacagcggccctcaatattccatgatgcagccacacctccaaagacaacactcaaacccagggcatgctggaccctttcccgtagtatcggtacacaacaccacaatcaacccaacgagccctactacagcaactatggcaaatgcaaaccgaggtcccaccagcccatctgttacagcaatagagctaatcccctcagttaccaatccagaaaaccttccatcgctgccagatattccacccatacaggcaaacgttgttccgatgatgcactcctggtatgagtttggagccagagagaagacccaggaccaaaatgtgttggaagatgctggctcaagtagtttagataatctactaagtagatacatctcaggcagtcacctacccccacagcctacaagcaccatgaatccttctccaggtccctctgccctttctccgggatcatcaggtttatccaattctcacacacctgtgagacccccaagtacttctagtactggcagtcgaggcagctgtgggtcatcaggaagaactgctgagaagacaagtcttagtttcaaatctgatcaggtgaaggtcaagcaagaacctgggactgaagatgaaatatgtagcttttcaggaggtgtaaaacaagaaaaaacagaggatggcaggaggagtgcttgcatgttgagcagtcctgagagtagcttgacaccacctctctcaaccaacctgcatctagaaagtgaattggatgcattggcaagcctggaaaaccatgtgaaaactgaacctgcagatatgaatgaaagctgcaaacagtcagggctcagcagccttgttaatggaaagtccccaattcgaagcctcatgcacaggtcggcaaggattggaggagatggcaacaataaagatgatgacccaaatgaagactggtgtgctgtctgccaaaacggaggagatctcttgtgctgcgaaaaatgtccaaaggtctttcatctaacttgtcatgttccaacactacttagctttccaagtggggactggatatgcacattttgtagagatattggaaagccagaagttgaatatgattgtgataatttgcaacatagtaagaaggggaaaactgcgcaggggttaagccccgtggaccaaaggaaatgtgaacgtcttctgctttacctctattgccatgaattaagtattgaattccaggagcctgttcctgcttcgataccaaactactataaaattataaagaaaccaatggatttatccaccgtgaaaaagaagcttcagaaaaaacattcccaacactaccaaatcccggatgactttgtggccgatgtccgtttgatcttcaagaactgtgaaaggtttaatgaaatgatgaaagttgttcaagtttatgcagacacacaagagattaatttgaaggctgattcagaagtagctcaggcagggaaagcagttgcattgtactttgaagataaactcacagagatctactcagacaggaccttcgcacctttgccagagtttgagcaggaagaggatgatggtgaggtaactgaggactctgatgaagactttatacagccccgcagaaaacgcctaaagtcagatgagagaccagtacatataaagtaaaatgacatggatttaaatcaattgttta

SEQ ID NO: 370561 - DNA, 3425 bp, Homo sapiens
tcacgccatgtcacaaacaagaacagttgaaacttttctgtgaaacatgtgatagattgacatgtagagactgtcagctattggaacacaaagaacatagttggtgtaatacggtgcccagtatgccgccaagaatgcagacagatagaccttgtggataattattttgtgaaagacacatctgaagctcctagcagttctgatgaaaaatcagaacaggtatgtactagttgtgaagacaatgcaagtgcagttggcttttgtgtagaatgtggagagtggctatgtaagacatgtatcgaagcacatcaaagagtaaaatttactaaagatcacttgatcaggaagaaagaagatgtctcagagtctgttggagcatctggtcaacgccctgttttctgccctgtacacaaacaagaacagttgaaacttttctgtgaaacatgtgatagattgacatgtagagactgtcagctattggaacacaaagaacataggtatcagtttttggaagaagcttttcaaaatcagaagggtgcaattgagaatctactggcgaaacttcttgagaagaagaattatgttcattttgcagctactcaggtgcagaataggataaaagaagtaaatgagactaacaaacgagtagaacaggaaattaaagtggccattttcacccttatcaatgaaattaataagaaaggaaaatctctcttacaacagctagagaatgttacaaaggaaagacagatgaagttactacagcagcagaatgacatcacaggcctttcccggcaggtgaagcatgttatgaacttcacaaattgggcaattgcaagtggcagcagcacagcactactatacagcaagcgactgattactttccagttgcgtcatattttgaaagcacggtgtgatcctgtccctgctgctaatggagcaatacgtttccattgtgatcccaccttctgggcaaagaatgtagtcaatttaggtaatctagtaatagagagtaaaccagctcctggttatactcctaatgttgtagttgggcaagttcctccagggacaaaccacattagtaaaacccctggacagattaacttagcacagcttcgactccagcacatgcaacaacaagtatatgcacagaaacatcagcagttgcaacagatgaggatgcagcaaccaccagcacctgtaccaactacaacaacaacaacacaacagcatcctagacaagcagcccctcagatgttacaacaacagcctcctcgattgatcagtgtgcaaacaatgcaaagaggcaacatgaactgtggagcttttcaagcccatcagatgagactggctcagaatgctgccagaataccagggatacccaggcacagcggccctcaatattccatgatgcagccacacctccaaagacaacactcaaacccagggcatgctggaccctttcccgtagtatcggtacacaacaccacaatcaacccaacgagccctactacagcaactatggcaaatgcaaaccgaggtcccaccagcccatctgttacagcaatagagctaatcccctcagttaccaatccagaaaaccttccatcgctgccagatattccacccatacagttggaagatgctggctcaagtagtttagataatctactaagtagatacatctcaggcagtcacctacccccacagcctacaagcaccatgaatccttctccaggtccctctgccctttctccgggatcatcaggtttatccaattctcacacacctgtgagacccccaagtacttctagtactggcagtcgaggcagctgtgggtcatcaggaagaactgctgagaagacaagtcttagtttcaaatctgatcaggtgaaggtcaagcaagaacctgggactgaagatgaaatatgtagcttttcaggaggtgtaaaacaagaaaaaacagaggatggcaggaggagtgcttgcatgttgagcagtcctgagagtagcttgacaccacctctctcaaccaacctgcatctagaaagtgaattggatgcattggcaagcctggaaaaccatgtgaaaactgaacctgcagatatgaatgaaagctgcaaacagtcagggctcagcagccttgttaatggaaagtccccaattcgaagcctcatgcacaggtcggcaaggattggaggagatggcaacaataaagatgatgacccaaatgaagactggtgtgctgtctgccaaaacggaggagatctcttgtgctgcgaaaaatgtccaaaggtctttcatctaacttgtcatgttccaacactacttagctttccaaggtaccagtgaaataattgatttttggtgttgattttcataagctaaaaataaataacagaagaatgttcagggcagatggccttctaaccagtgcatagtatttctataaaacagggagcctgttattcttttggtattagcttccagagaaactaacaataaaatatctaagatctaagtagtacattaatgttaaagagtagatttcatctcctggcctttagtttatattcagtataaggaaaatagataaaactctaaattaatagggggctaaggttacaaaacctgcagtctggttctaattctgtagtaagcttgagcaattcactaattatcagggatcagtttttgcatctacaagtggtaggttttggtttagcagagctgtagttcttcccttccatttattattttatgttcatgcaacctcttgtctcttgatttcagagaccataaaatagtagagtcatacttgtttttttcagtcttctccttcctctcttgtcccccaatttctttttggtgaaagtaagtcagtattcttggggtaaacccagcttttttcttgctataaattgaaaaaaaaaaaaaaaaagatatatcttctcaaattcctgagaagcagtaactttaattgaataatagtgccctctttgaaagtgttaaccttttggattagaaaactagtagatatttaaacagtgccagaatatttttctgaagaattgtaatttcttacctaagtctttggagatagagttatttgctagagatgtaataagggccttctttttctttactcttatttagaaaagaaaagcattggcactttgatcttgaaattaagaattttcttttctttgggtagtaatatttactggaatgtcagaattttgccactgaatgccttctttcaatagcaaatgctttgaaagggttgtaaaatgttggcgtaaattagccaggtgtggtagctcacacctgtaatcccagcactttgggaggctgaggcaggcggagcacttgaggtcaggagtttgagaccagcctggccaacatggcaaaaccccatctctact

SEQ ID NO: 370562 - DNA, 3538 bp, Homo sapiens
tcaaacgcgcgacgcgagggcgggggcgccgcgtgcgcgcgcgctctcgttggttcgctctctcgctagctctcggctgccgctcttgctgcgcctgcggctggggctgggggcggcggcggcggcgacggggcggcgggcggcgcggggcggtccggcgggttcaaagaggaaaacatggcggaaaacaaaggcggcggcgaggctgagagcggcggcgggggcagcggcagcgcgccggtaactgccggggccgccgggcccgccgcgcaggaggcggagccgcctctcaccgcggtgctggtggaggaggaggaggaggaaggcggcagggccggcgctgagggcggcgcggccgggcccgacgacgggggggtggccgcggcctcctcgggctcggcccaggctgcttcatctcctgcggcctcagtgggcactggagttgccgggggcgcagtatcgacgccggctccagctccagcctcggctcccgctccgggtccctcggcagggccgcctcctggaccgccagcctcgctcctggacacctgcgccgtgtgtcagcagagcttgcagagccggcgtgaggcggagcccaagctgctgccctgtcttcactccttctgcctgcgctgcctgcccgagccggagcgccagctcagcgtgcccatcccggggggcagcaacggcgacatccagcaagttggtgtaatacggtgcccagtatgccgccaagaatgcagacagatagaccttgtggataattattttgtgaaagacacatctgaagctcctagcagttctgatgaaaaatcagaacaggtatgtactagttgtgaagacaatgcaagtgcagttggcttttgtgtagaatgtggagagtggctatgtaagacatgtatcgaagcacatcaaagagtaaaatttactaaagatcacttgatcaggaagaaagaagatgtctcagagtctgttggagcatctggtcaacgccctgttttctgccctgtacacaaacaagaacagttgaaacttttctgtgaaacatgtgatagattgacatgtagagactgtcagctattggaacacaaagaacataggtatcagtttttggaagaagcttttcaaaatcagaagggtgcaattgagaatctactggcgaaacttcttgagaagaagaattatgttcattttgcagctactcaggtgcagaataggataaaagaagtaaatgagactaacaaacgagtagaacaggaaattaaagtggccattttcacccttatcaatgaaattaataagaaaggaaaatctctcttacaacagctagagaatgttacaaaggaaagacagatgaagttactacagcagcagaatgacatcacaggcctttcccggcaggtgaagcatgttatgaacttcacaaattgggcaattgcaagtggcagcagcacagcactactatacagcaagcgactgattactttccagttgcgtcatattttgaaagcacggtgtgatcctgtccctgctgctaatggagcaatacgtttccattgtgatcccaccttctgggcaaagaatgtagtcaatttaggtaatctagtaatagagagtaaaccagctcctggttatactcctaatgttgtagttgggcaagttcctccagggacaaaccacattagtaaaacccctggacagattaacttagcacagcttcgactccagcacatgcaacaacaagtatatgcacagaaacatcagcagttgcaacagatgaggatgcagcaaccaccagcacctgtaccaactacaacaacaacaacacaacagcatcctagacaagcagcccctcagatgttacaacaacagcctcctcgattgatcagtgtgcaaacaatgcaaagaggcaacatgaactgtggagcttttcaagcccatcagatgagactggctcagaatgctgccagaataccagggatacccaggcacagcggccctcaatattccatgatgcagccacacctccaaagacaacactcaaacccagggcatgctggaccctttcccgtagtatcggtacacaacaccacaatcaacccaacgagccctactacagcaactatggcaaatgcaaaccgaggtcccaccagcccatctgttacagcaatagagctaatcccctcagttaccaatccagaaaaccttccatcgctgccagatattccacccatacagttggaagatgctggctcaagtagtttagataatctactaagtagatacatctcaggcagtcacctacccccacagcctacaagcaccatgaatccttctccaggtccctctgccctttctccgggatcatcaggtttatccaattctcacacacctgtgagacccccaagtacttctagtactggcagtcgaggcagctgtgggtcatcaggaagaactgctgagaagacaagtcttagtttcaaatctgatcaggtgaaggtcaagcaagaacctgggactgaagatgaaatatgtagcttttcaggaggtgtaaaacaagaaaaaacagaggatggcaggaggagtgcttgcatgttgagcagtcctgagagtagcttgacaccacctctctcaaccaacctgcatctagaaagtgaattggatgcattggcaagcctggaaaaccatgtgaaaactgaacctgcagatatgaatgaaagctgcaaacagtcagggctcagcagccttgttaatggaaagtccccaattcgaagcctcatgcacaggtcggcaaggattggaggagatggcaacaataaagatgatgacccaaatgaagactggtgtgctgtctgccaaaacggaggagatctcttgtgctgcgaaaaatgtccaaaggtctttcatctaacttgtcatgttccaacactacttagctttccaagtggggactggatatgcacattttgtagagatattggaaagccagaagttgaatatgattgtgataatttgcaacatagtaagaaggggaaaactgcgcaggggttaagccccgtggaccaaaggaaatgtgaacgtcttctgctttacctctattgccatgaattaagtattgaattccaggagcctgttcctgcttcgataccaaactactataaaattataaagaaaccaatggatttatccaccgtgaaaaagaagcttcagaaaaaacattcccaacactaccaaatcccggatgactttgtggccgatgtccgtttgatcttcaagaactgtgaaaggtttaatgaagctgattcagaagtagctcaggcagggaaagcagttgcattgtactttgaagataaactcacagagatctactcagacaggaccttcgcacctttgccagagtttgagcaggaagaggatgatggtgaggtaactgaggactctgatgaagactttatacagccccgcagaaaacgcctaaagtcagatgagagaccagtacatataaagtaaaatgacatggatttaaatcaattgttta

SEQ ID NO: 370563 - DNA, 1847 bp, Homo sapiens
  misc_feature (1828)..(1828): n is a, c, g, or t
gaaactgagatatggttcccatacaccaggaacataaaccatgaagacagtcataaaatattaaaagcttaatataaacatataagctttgtcacggtttaagtacaggaagcttcggagttacaaatgcctactgaatacctgtttttgagaaacaaccacaatcattgaatttcacacgtgatatttcttttggctttggtgatgcccagggatgctcttcttgtcattcctgagagtgacaatgtctccttgtgagtcagagaggagagaaggggacatgccaagtcacatggcacccccagaggcttgagctccagagaaagatctcttcccagcttcccaaagtccagcttggaagtcaggacacgttttccttgaaaacaatgaggaacgacgacaggactaataatacattgtaggttaaagaggcttccatgggccagctggaaatccaaccaccatttattccaagttctaaacaatgaaagtacaagtaaacttttcaatgacaagcctgccataatttggggtctgcttgtacataattaattccaaagaagtgatacagacggtaattgctatgaattcagaaaagggaacattttcccaaagttatgtgggtctcagagccttcttgagaacattgagatggtctagaattgagggcatgtacgtaatgaaaagatgtcatttgggaaagaccaactagtctctatccaaaatttgctatacttttaccatcatggtacctataaaaatgacatctcgatatgatgttttgccagtctcagaaatcaagtgctgaccaactgaattgttatttcgttcacaggagtggaatttcatggttaagtcatatttgctagttattccttagactcctgagttcaggcatcagatacttgataaacatactagaccaactaacagatttatgcagctagctctattcttacaccagggatactctgtcagaaatgccaatggaatagcagccacaaggtctgtgtgctactttaaacaaatcaatatctcaaaaggaaaaggcgtcgtctgtcactaattagatcaaattaaaatgtgctgctgtatctcctttgaatattcatgaggtgctctcaatcagaagccctaagtctgagaccagaaacttaagccagaaaaaactaaatactgtgagattcagataactcggtcctttgccaactagaacttcaaagagaagaggaatagcttaggtgcagagtaagcctcctgaaaagatgacaaaatcagcttaatgcagaatcgtggggttcccacccaacctaaagatggatcgtcaaaatagcccaggagctgataatcctagactctgttgacacacaggacacatagtttagcctctcttgtgatttacttgtccttctgtctggcggaaaccatggagattacacttgtccttatttgaattctggacttcatttttcatgaatgaagtgattcaaaaaatacagctgggtctaagcatgaattctaactttcaaaaatcacagatcttaaaaagtctgtattgaactgggtgcagtaactcatgcctgtaattccagcatgttaggaggctgaggcaggagggccacttgagccctggagttcaagaccagcctgggcaacagagtgagatcccatctctacaaaagactttttgaaaaattaggtgtggtggcacatgcttgtagccctaggtgctcaggaggctaaggtggaaggatcacttgagcccaggagttggaggctgcagtgagctatgattgcactactgcactccagcctgggcaacagagcnagatcctgtctcaaaaaaa

SEQ ID NO: 370564 - DNA, 1420 bp, Homo sapiens
agcgggggcggctcccggcgtgcagcttggtggcggctgagccggcagcgggccgcctcaggcagccccggccgggccgcccgggtccccggcagcggggtaggatggcgctaaagcggatccagaaggaattaaccgacttgcagagggatcctcctgcccagtgttctgcaggacctgtcggtgatgacttgttccactggcaggccaccatcatgggcccgaatgacagtccttaccaaggaggtgttttcttcctgaccatccactttcctacagattacccgttcaagcccccaaaggttgctttcacaaccaaaatttatcaccctaatatcaacagcaatggcagcatctgccttgatatcctgcggtctcagtggtctccagcgttgactgtgtcaaaagttctcttgtccatctgctcgctgctctgcgaccccaaccccgatgaccccctggtgccagagatagcacacacctacaaggccgacagagagaagtacaacagactagcaagagagtggacacaaaaatatgctatgtaagtgccttggaggttttacatgagacactgtccaagagaagctggcagagaggtcttcccttaaaactttgggctgttggctgagccattcaaagagcatcatctgttcttcaaacaaatgttggtcacccactctctccagctgcagcatgttggtgccattttcagcaattacggctttgacagtgccacctctttgatgccaaatcagcaaccattgttgttatgatctgcagtcttcctggtgacactggaatctctctctctgccgcctcagtttgtctgctggtctcttggggggccaggccctgcacgtctctcctacccggcctcaaatggtgctgctgcccatgatggtaccacaccagggcctcagcctggcccctcaccacataccctttgccttttagaactcagtgccatcctgggtgcccagggcagagcaggctttgttcgcacctcatctgctgcagaaccacatcctgaggagtctcagcttatcctggagggaattgggaacagtgtcactgggaagtgaaggcctagccctgtggcttccaccagtctcctcctgcagtgccacgtggtggcatttctcgcctcacaccaagaagcagcaagtggaaaatttcaggatacaaagcacataacaccccataagagatgattatgtttttagaagcaagagcaaaattatgaaacctctagagatttgggtcatgttactccatttgatgaagattctcactaccgcccgctcctcccataggagcctacactaagtccaagtgtgagccattcacagactagaacacaaggagggagagagactcttaaacgtaaataaaaatgcaattcactcacaactctaaa

SEQ ID NO: 370565 - DNA, 1518 bp, Homo sapiens
agcgggggcggctcccggcgtgcagcttggtggcggctgagccggcagcgggccgcctcaggcagccccggccgggccgcccgggtccccggcagcggggtaggatggcgctaaagcggatccagaaggctgtacaagaagcatggtgccagcatctgcttctggtgaggcctcaggaagcttacaatcatggcagaaagcaaaggagaagcaggcgtgtcacctggaattaaccgacttgcagagggatcctcctgcccagtgttctgcaggacctgtcggtgatgacttgttccactggcaggccaccatcatgggcccgaatgacagtccttaccaaggaggtgttttcttcctgaccatccactttcctacagattacccgttcaagcccccaaaggttgctttcacaaccaaaatttatcaccctaatatcaacagcaatggcagcatctgccttgatatcctgcggtctcagtggtctccagcgttgactgtgtcaaaagttctcttgtccatctgctcgctgctctgcgaccccaaccccgatgaccccctggtgccagagatagcacacacctacaaggccgacagagagaagtacaacagactagcaagagagtggacacaaaaatatgctatgtaagtgccttggaggttttacatgagacactgtccaagagaagctggcagagaggtcttcccttaaaactttgggctgttggctgagccattcaaagagcatcatctgttcttcaaacaaatgttggtcacccactctctccagctgcagcatgttggtgccattttcagcaattacggctttgacagtgccacctctttgatgccaaatcagcaaccattgttgttatgatctgcagtcttcctggtgacactggaatctctctctctgccgcctcagtttgtctgctggtctcttggggggccaggccctgcacgtctctcctacccggcctcaaatggtgctgctgcccatgatggtaccacaccagggcctcagcctggcccctcaccacataccctttgccttttagaactcagtgccatcctgggtgcccagggcagagcaggctttgttcgcacctcatctgctgcagaaccacatcctgaggagtctcagcttatcctggagggaattgggaacagtgtcactgggaagtgaaggcctagccctgtggcttccaccagtctcctcctgcagtgccacgtggtggcatttctcgcctcacaccaagaagcagcaagtggaaaatttcaggatacaaagcacataacaccccataagagatgattatgtttttagaagcaagagcaaaattatgaaacctctagagatttgggtcatgttactccatttgatgaagattctcactaccgcccgctcctcccataggagcctacactaagtccaagtgtgagccattcacagactagaacacaaggagggagagagactcttaaacgtaaataaaaatgcaattcactcacaactctaaa

SEQ ID NO: 370566 - DNA, 1524 bp, Homo sapiens
gagagagagagagagagagagagagagagagagagagagagagagagagagagagagagagagagagagagagagagcagcgggccgcctcaggcagccccggccgggccgcccgggtccccggcagcggggtaggatggcgctaaagcggatccagaaggaattaaccgacttgcagagggatcctcctgcccagtgttctgcaggacctgtcggtgatgacttgttccactggcaggccaccatcatgggcccgaatgacagtccttaccaaggaggtgttttcttcctgaccatccactttcctacagattacccgttcaagcccccaaaggtgaggtccctctcccaactcccctgatgtttggatgaaggacagcatgtgacaaggggcccttcaagtcaggttgctttcacaaccaaaatttatcaccctaatatcaacagcaatggcagcatctgccttgatatcctgcggtctcagtggtctccagcgttgactgtgtcaaaagttctcttgtccatctgctcgctgctctgcgaccccaaccccgatgaccccctggtgccagagatagcacacacctacaaggccgacagagagaagtacaacagactagcaagagagtggacacaaaaatatgctatgtaagtgccttggaggttttacatgagacactgtccaagagaagctggcagagaggtcttcccttaaaactttgggctgttggctgagccattcaaagagcatcatctgttcttcaaacaaatgttggtcacccactctctccagctgcagcatgttggtgccattttcagcaattacggctttgacagtgccacctctttgatgccaaatcagcaaccattgttgttatgatctgcagtcttcctggtgacactggaatctctctctctgccgcctcagtttgtctgctggtctcttggggggccaggccctgcacgtctctcctacccggcctcaaatggtgctgctgcccatgatggtaccacaccagggcctcagcctggcccctcaccacataccctttgccttttagaactcagtgccatcctgggtgcccagggcagagcaggctttgttcgcacctcatctgctgcagaaccacatcctgaggagtctcagcttatcctggagggaattgggaacagtgtcactgggaagtgaaggcctagccctgtggcttccaccagtctcctcctgcagtgccacgtggtggcatttctcgcctcacaccaagaagcagcaagtggaaaatttcaggatacaaagcacataacaccccataagagatgattatgtttttagaagcaagagcaaaattatgaaacctctagagatttgggtcatgttactccatttgatgaagattctcactaccgcccgctcctcccataggagcctacactaagtccaagtgtgagccattcacagactagaacacaaggagggagagagactcttaaacgtaaataaaaatgcaattcactcacaactctaaa

SEQ ID NO: 370567 - DNA, 1440 bp, Homo sapiens
gagagagagagagagagagagagagagagagagagagagagagagagagagagagagagagagagagagagagagagcagcgggccgcctcaggcagccccggccgggccgcccgggtccccggcagcggggtaggatggcgctaaagcggatccagaaggctgtacaagaagcatggtgccagcatctgcttctggtgaggcctcaggaagcttacaatcatggcagaaagcaaaggagaagcaggcgtgtcacctggaattaaccgacttgcagagggatcctcctgcccagtgttctgcaggacctgtcggtgatgactgttgctttcacaaccaaaatttatcaccctaatatcaacagcaatggcagcatctgccttgatatcctgcggtctcagtggtctccagcgttgactgtgtcaaaagttctcttgtccatctgctcgctgctctgcgaccccaaccccgatgaccccctggtgccagagatagcacacacctacaaggccgacagagagaagtacaacagactagcaagagagtggacacaaaaatatgctatgtaagtgccttggaggttttacatgagacactgtccaagagaagctggcagagaggtcttcccttaaaactttgggctgttggctgagccattcaaagagcatcatctgttcttcaaacaaatgttggtcacccactctctccagctgcagcatgttggtgccattttcagcaattacggctttgacagtgccacctctttgatgccaaatcagcaaccattgttgttatgatctgcagtcttcctggtgacactggaatctctctctctgccgcctcagtttgtctgctggtctcttggggggccaggccctgcacgtctctcctacccggcctcaaatggtgctgctgcccatgatggtaccacaccagggcctcagcctggcccctcaccacataccctttgccttttagaactcagtgccatcctgggtgcccagggcagagcaggctttgttcgcacctcatctgctgcagaaccacatcctgaggagtctcagcttatcctggagggaattgggaacagtgtcactgggaagtgaaggcctagccctgtggcttccaccagtctcctcctgcagtgccacgtggtggcatttctcgcctcacaccaagaagcagcaagtggaaaatttcaggatacaaagcacataacaccccataagagatgattatgtttttagaagcaagagcaaaattatgaaacctctagagatttgggtcatgttactccatttgatgaagattctcactaccgcccgctcctcccataggagcctacactaagtccaagtgtgagccattcacagactagaacacaaggagggagagagactcttaaacgtaaataaaaatgcaattcactcacaactctaaa

SEQ ID NO: 370568 - DNA, 997 bp, Homo sapiens
gagagagagagagagagagagagagagagagagagagagagagagagagagagagagagagagagagagagagagagcagcgggccgcctcaggcagccccggccgggccgcccgggtccccggcagcggggtaggatggcgctaaagcggatccagaaggaattaaccgacttgcagagggatcctcctgcccagtgttctgcaggacctgtcggtgatgacttgttccactggcaggccaccatcatgggcccgaatgacagtccttaccaaggaggtgttttcttcctgaccatccactttcctacagattacccgttcaagcccccaaaggttgctttcacaaccaaaatttatcaccctaatatcaacagcaatggcagcatctgccttgatatcctgcggtctcagtggtctccagcgttgactgtgtcaaaagttctcttgtccatctgctcgctgctctgcgaccccaaccccgatgaccccctggtgccagagatagcacacacctacaaggccgacagagagaaaactcagtgccatcctgggtgcccagggcagagcaggctttgttcgcacctcatctgctgcagaaccacatcctgaggagtctcagcttatcctggagggaattgggaacagtgtcactgggaagtgaaggcctagccctgtggcttccaccagtctcctcctgcagtgccacgtggtggcatttctcgcctcacaccaagaagcagcaagtggaaaatttcaggatacaaagcacataacaccccataagagatgattatgtttttagaagcaagagcaaaattatgaaacctctagagatttgggtcatgttactccatttgatgaagattctcactaccgcccgctcctcccataggagcctacactaagtccaagtgtgagccattcacagactagaacacaaggagggagagagactcttaaacgtaaataaaaatgcaattcactcacaactctaaa

SEQ ID NO: 370569 - DNA, 1039 bp, Homo sapiens
gagagagagagagagagagagagagagagagagagagagagagagagagagagagagagagagagagagagagagagcagcgggccgcctcaggcagccccggccgggccgcccgggtccccggcagcggggtaggatggcgctaaagcggatccagaaggaattaaccgacttgcagagggatcctcctgcccagtgttctgcaggacctgtcggtgatgacttgttccactggcaggccaccatcatgggcccgaatgacagtccttaccaaggaggtgttttcttcctgaccatccactttcctacagattacccgttcaagcccccaaaggttgctttcacaaccaaaatttatcaccctaatatcaacagcaatggcagcatctgccttgatatcctgcggtctcagtggtctccagcgttgactgtgtcaaaagttctcttgtccatctgctcgctgctctgcgaccccaaccccgatgaccccctggtgccagagatagcacacacctacaaggccgacagagagaagtacaacagactagcaagagagtggacacaaaaatatgctataactcagtgccatcctgggtgcccagggcagagcaggctttgttcgcacctcatctgctgcagaaccacatcctgaggagtctcagcttatcctggagggaattgggaacagtgtcactgggaagtgaaggcctagccctgtggcttccaccagtctcctcctgcagtgccacgtggtggcatttctcgcctcacaccaagaagcagcaagtggaaaatttcaggatacaaagcacataacaccccataagagatgattatgtttttagaagcaagagcaaaattatgaaacctctagagatttgggtcatgttactccatttgatgaagattctcactaccgcccgctcctcccataggagcctacactaagtccaagtgtgagccattcacagactagaacacaaggagggagagagactcttaaacgtaaataaaaatgcaattcactcacaactctaaa

SEQ ID NO: 370570 - DNA, 1416 bp, Homo sapiens
  misc_feature (1285)..(1285): n is a, c, g, or t
  misc_feature (1291)..(1291): n is a, c, g, or t
  misc_feature (1298)..(1298): n is a, c, g, or t
  misc_feature (1308)..(1308): n is a, c, g, or t
gagagagagagagagagagagagagagagagagagagagagagagagagagagagagagagagagagagagagagagcagcgggccgcctcaggcagccccggccgggccgcccgggtccccggcagcggggtaggatggcgctaaagcggatccagaaggaattaaccgacttgcagagggatcctcctgcccagtgttctgcaggacctgtcggtgatgacttgttccactggcaggccaccatcatgggcccgaatgacagtccttaccaaggaggtgttttcttcctgaccatccactttcctacagattacccgttcaagcccccaaaggttgctttcacaaccaaaatttatcaccctaatatcaacagcaatggcagcatctgccttgatatcctgcggtctcagtggtctccagcgttgactgtgtcaaaagttctcttgtccatctgctcgctgctctgcgaccccaaccccgatgaccccctggtgccagagatagcacacacctacaaggccgacagagagaagtacaacagactagcaagagagtggacacaaaaatatgctatgtaagtgccttggaggttttacatgagacactgtccaagagaagctggcagagaggtcttcccttaaaactttgggctgttggctgagccattcaaagagcatcatctgttcttcaaacaaatgttggtcacccactctctccagctgcagcatgttggtgccattttcagcaattacggctttgacagtgccacctctttgatgccaaatcagcaaccattgttgttatgatctgcagtcttcctggtgacactggaatctctctctctgccgcctcagtttgtctgctggtctcttggggggccaggccctgcacgtctctcctacccggcctcaaatggtgctgctgcccatgatggtaccacaccagggcctcagcctggcccctcaccacataccctttgccttttagaactcagtgccatcctgggtgcccagggcagagcaggctttgttcgcacctcatctgctgcagaaccacatcctgaggagtctcagcttatcctggagggaattgggaacagtgtcactgggaagtgaaggcctagccctgtggcttccaccagtctcctcctgcagtgccacgtggtggcatttctcgcctcacaccaagaagcagcaagtggaaaatttcaggatacaaagcacataacaccccataagagatgattatgtttttagaagcaagagcaaaattatgaacttaanttgggntgtcccntgggaaattnacggcggctccaaggctaatagccgggggctcccgtaacgggggggccagcgaagtgcccttgaaaaaacgctttgggggagggggggggcctagagcttaaggcgag

SEQ ID NO: 370571 - DNA, 888 bp, Homo sapiens
gagagagagagagagagagagagagagagagagagagagagagagagagagagagagagagagagagagagagagagcagcgggccgcctcaggcagccccggccgggccgcccgggtccccggcagcggggtaggatggcgctaaagcggatccagaaggctgtacaagaagcatggtgccagcatctgcttctggtgaggcctcaggaagcttacaatcatggcagaaagcaaaggagaagcaggcgtgtcacctggaattaaccgacttgcagagggatcctcctgcccagtgttctgcaggacctgtcggtgatgactgttgctttcacaaccaaaatttatcaccctaatatcaacagcaatggcagcatctgccttgatatcctgcggtctcagtggtctccagcgttgactgtgtcaaaaggtagagatgctgatggcatgctctgtgtgctcttttacacatgtttttaccccagcactgactgagtggaaatggaagctcagagaaagaagtcacctttcccaggtcacatagccctgtccactgctgtgcccttaagtggatatccttacacgcctacgaggcagcaccagcagaactttgtgccccgctccctggcgcttctcagcagtcaattgccctggtgtgctcaagactgtcacatgggtgcaagaagaaaatactgattctacttatatttttttatccaaaaataagaaaggcaaatattacattaccttctctgttccctcatttattcatctaataagcacaaaacggactgtgagtcagccctgaaggaagatacagggcatgcctccgggggcctcgaagttggtggagaaatcctcccttcccaaaataaatgatgttgagcaca

SEQ ID NO: 370572 - DNA, 878 bp, Homo sapiens
gagagagagagagagagagagagagagagagagagagagagagagagagagagagagagagagagagagagagagagcagcgggccgcctcaggcagccccggccgggccgcccgggtccccggcagcggggtaggatggcgctaaagcggatccagaaggaattaaccgacttgcagagggatcctcctgcccagtgttctgcaggacctgtcggtgatgacttgttccactggcaggccaccatcatgggcccgaatgacagtccttaccaaggaggtgttttcttcctgaccatccactttcctacagattacccgttcaagcccccaaaggtgaggtccctctcccaactcccctgatgtttggatgaaggacagcatgtgacaaggggcccttcaagtcaggtataggtaaaaagagctgtacgtggggtttctctgagggcccactgctccaccctgtggtgagagtttcccaggactttaattactggactttgggaattagcacctgttgtgatcaagggtcagtggggtgagctggtgctggccttactgaggccacagtttgaatgcttctccttgtgactgtagctgagtctggtcatgtctccaggctctggctcccttctctgcagtcccttagagttaggacaggggttctcagccggggtgattttgctactgccccagggacatttgagcaacatcttaggatattttgggttatcaaaaccgtggtgagggagtactactggtatctagtcggcaaaggccagggtattccagggattccctgcagtgcacaggagagccacccttcccatgacagataatgatcagccccaagtgtcaatagtgccaaggtggacacacc

SEQ ID NO: 370573 - DNA, 418 bp, Homo sapiens
ttgcttcttgcactttgggcttagcacatgcactgatctctttctgtgtctcatccttccagaatgacagtccttaccaaggaggtgttttcttcctgaccatccactttcctacagattacccgttcaagcccccaaaggtgaggtccctctcccaactcccctgatgtttggatgaaggacagcatgtgacaaggggcccttcaagtcaggtataggtaaaaagagctgtacgtggggtttctctgagggcccactgctccaccctgtggtgagagtttcccaggactttaattactggactttgggaattagcacctgttgtgatcaagggtcagtggggtgagctggtgctggccttactgaggccacagtttgaatgcttctccttgtgactgtagctgagtctggtcatgtc

SEQ ID NO: 370574 - DNA, 704 bp, Homo sapiens
tagaggcagcatccccagcatacagcagctctgacccactctctcatgttctaggaattaaccgacttgcagagggatcctcctgcccagtgttctgcaggacctgtcggtgatgactgtaagtattttggggggcttcaagttgtaggagcattttaattaagaccccccaacttaggccaggtgcggtggctcacgcctgtaatcccaacactttgggaagccaaggtgggtggatcacctgaggtcaggagtttgaaactagcctggctaacatggcgaaaccccgtctctactgaaagtacaaaaattagccgggcatgctggcacatgcctgtaatcccagctacttgggaggctgaggcaggagaatcgcttgaacccaggaggcagaggttgcagtgagccaagatcgtgccactgcactccagcctgggcaacagactctgtctgaaaaacaaacaaacacaaacaaaaccaaacaaccaaattatcagccaagcagtatttaagaaaaccaatcaatgcttttcccttcattttctcttgaatggcttttcatttgaggtctaggccatgagttcacagcagcttggctggtcagcttatactcaaagtagaacctgcactgcctctcatgtcccatagtcaccgcttccctcttctggcgcatgagaaagccagttggctctgaggagtcacat

SEQ ID NO: 370575 - DNA, 1452 bp, Homo sapiens
gagagagagagagagagagagagagagagagagagagagagagagagagagagagagagagagagagagagagagagcagcgggccgcctcaggcagccccggccgggccgcccgggtccccggcagcggggtaggatggcgctaaagcggatccagaaggaattaaccgacttgcagagggatcctcctgcccagtgttctgcaggacctgtcggtgatgacttgttccactggcaggccaccatcatgggcccgaatgacagtccttaccaaggaggtgttttcttcctgaccatccactttcctacagattacccgttcaagcccccaaaggttgctttcacaaccaaaatttatcaccctaatatcaacagcaatggcagcatctgccttgatatcctgcggtctcagtggtctccagcgttgactgtgtcaaaagttctcttgtccatctgctcgctgctctgcgaccccaaccccgatgaccccctggtgccagagatagcacacacctacaaggccgacagagagaagtacaacagactagcaagagagtggacacaaaaatatgctatgtaagtgccttggaggttttacatgagacactgtccaagagaagctggcagagaggtcttcccttaaaactttgggctgttggctgagccattcaaagagcatcatctgttcttcaaacaaatgttggtcacccactctctccagctgcagcatgttggtgccattttcagcaattacggctttgacagtgccacctctttgatgccaaatcagcaaccattgttgttatgatctgcagtcttcctggtgacactggaatctctctctctgccgcctcagtttgtctgctggtctcttggggggccaggccctgcacgtctctcctacccggcctcaaatggtgctgctgcccatgatggtaccacaccagggcctcagcctggcccctcaccacataccctttgccttttagaactcagtgccatcctgggtgcccagggcagagcaggctttgttcgcacctcatctgctgcagaaccacatcctgaggagtctcagcttatcctggagggaattgggaacagtgtcactgggaagtgaaggcctagccctgtggcttccaccagtctcctcctgcagtgccacgtggtggcatttctcgcctcacaccaagaagcagcaagtggaaaatttcaggatacaaagcacataacaccccataagagatgattatgtttttagaagcaagagcaaaattatgaaacctctagagatttgggtcatgttactccatttgatgaagattctcactaccgcccgctcctcccataggagcctacactaagtccaagtgtgagccattcacagactagaacacaaggagggagagagactcttaaacgtaaataaaaatgcaattcactcacaactctaaa

SEQ ID NO: 370576 - DNA, 1420 bp, Homo sapiens
gagagagagagagagagagagagagagagagagagagagagagagagagagagagagagagagagagagagagagagcagcgggccgcctcaggcagccccggccgggccgcccgggtccccggcagcggggtaggatggcgctaaagcggatccagaaggaattaaccgacttgcagagggatcctcctgcccagtgttctgcaggacctgtcggtgatgactaatgacagtccttaccaaggaggtgttttcttcctgaccatccactttcctacagattacccgttcaagcccccaaaggttgctttcacaaccaaaatttatcaccctaatatcaacagcaatggcagcatctgccttgatatcctgcggtctcagtggtctccagcgttgactgtgtcaaaagttctcttgtccatctgctcgctgctctgcgaccccaaccccgatgaccccctggtgccagagatagcacacacctacaaggccgacagagagaagtacaacagactagcaagagagtggacacaaaaatatgctatgtaagtgccttggaggttttacatgagacactgtccaagagaagctggcagagaggtcttcccttaaaactttgggctgttggctgagccattcaaagagcatcatctgttcttcaaacaaatgttggtcacccactctctccagctgcagcatgttggtgccattttcagcaattacggctttgacagtgccacctctttgatgccaaatcagcaaccattgttgttatgatctgcagtcttcctggtgacactggaatctctctctctgccgcctcagtttgtctgctggtctcttggggggccaggccctgcacgtctctcctacccggcctcaaatggtgctgctgcccatgatggtaccacaccagggcctcagcctggcccctcaccacataccctttgccttttagaactcagtgccatcctgggtgcccagggcagagcaggctttgttcgcacctcatctgctgcagaaccacatcctgaggagtctcagcttatcctggagggaattgggaacagtgtcactgggaagtgaaggcctagccctgtggcttccaccagtctcctcctgcagtgccacgtggtggcatttctcgcctcacaccaagaagcagcaagtggaaaatttcaggatacaaagcacataacaccccataagagatgattatgtttttagaagcaagagcaaaattatgaaacctctagagatttgggtcatgttactccatttgatgaagattctcactaccgcccgctcctcccataggagcctacactaagtccaagtgtgagccattcacagactagaacacaaggagggagagagactcttaaacgtaaataaaaatgcaattcactcacaactctaaa

SEQ ID NO: 370577 - DNA, 1621 bp, Homo sapiens
gagagagagagagagagagagagagagagagagagagagagagagagagagagagagagagagagagagagagagagcagcgggccgcctcaggcagccccggccgggccgcccgggtccccggcagcggggtaggatggcgctaaagcggatccagaaggctgtacaagaagcatggtgccagcatctgcttctggtgaggcctcaggaagcttacaatcatggcagaaagcaaaggagaagcaggcgtgtcacctggaattaaccgacttgcagagggatcctcctgcccagtgttctgcaggacctgtcggtgatgacttgttccactggcaggccaccatcatgggcccgaatgacagtccttaccaaggaggtgttttcttcctgaccatccactttcctacagattacccgttcaagcccccaaagagtttcgctcttgttgcccaggatggagtgcaatggcgtgatctcggctcaccgcaacatccacctcccaggttgctttcacaaccaaaatttatcaccctaatatcaacagcaatggcagcatctgccttgatatcctgcggtctcagtggtctccagcgttgactgtgtcaaaagttctcttgtccatctgctcgctgctctgcgaccccaaccccgatgaccccctggtgccagagatagcacacacctacaaggccgacagagagaagtacaacagactagcaagagagtggacacaaaaatatgctatgtaagtgccttggaggttttacatgagacactgtccaagagaagctggcagagaggtcttcccttaaaactttgggctgttggctgagccattcaaagagcatcatctgttcttcaaacaaatgttggtcacccactctctccagctgcagcatgttggtgccattttcagcaattacggctttgacagtgccacctctttgatgccaaatcagcaaccattgttgttatgatctgcagtcttcctggtgacactggaatctctctctctgccgcctcagtttgtctgctggtctcttggggggccaggccctgcacgtctctcctacccggcctcaaatggtgctgctgcccatgatggtaccacaccagggcctcagcctggcccctcaccacataccctttgccttttagaactcagtgccatcctgggtgcccagggcagagcaggctttgttcgcacctcatctgctgcagaaccacatcctgaggagtctcagcttatcctggagggaattgggaacagtgtcactgggaagtgaaggcctagccctgtggcttccaccagtctcctcctgcagtgccacgtggtggcatttctcgcctcacaccaagaagcagcaagtggaaaatttcaggatacaaagcacataacaccccataagagatgattatgtttttagaagcaagagcaaaattatgaaacctctagagatttgggtcatgttactccatttgatgaagattctcactaccgcccgctcctcccataggagcctacactaagtccaagtgtgagccattcacagactagaacacaaggagggagagagactcttaaacgtaaataaaaatgcaattcactcacaactctaaa

SEQ ID NO: 370578 - DNA, 1267 bp, Homo sapiens
agcgggggcggctcccggcgtgcagcttggtggcggctgagccggcagcgggccgcctcaggcagccccggccgggccgcccgggtccccggcagcggggtaggatggcgctaaagcggatccagaaggaattaaccgacttgcagagggatcctcctgcccagtgttctgcaggacctgtcggtgatgacttgttccactggcaggccaccatcatgggcccgaatgacagtccttaccaaggaggtgttttcttcctgaccatccactttcctacagattacccgttcaagcccccaaaggttgctttcacaaccaaaatttatcaccctaatatcaacagcaatggcagcatctgccttgatatcctgcggtctcagtggtctccagcgttgactgtgtcaaaagttctcttgtccatctgctcgctgctctgcgaccccaaccccgatgaccccctggtgccagagatagcacacacctacaaggccgacagagagaagtacaacagactagcaagagagtggacacaaaaatatgctatgtaagtgccttggaggttttacatgagacactgtccaagagaagctggcagagaggtcttcccttaaaactttgggctgttggctgagccattcaaagagcatcatctgttcttcaaacaaatgttggtcacccactctctccagctgcagcatgttggtgccattttcagcaattacggctttgacagtgctgctgcccatgatggtaccacaccagggcctcagcctggcccctcaccacataccctttgccttttagaactcagtgccatcctgggtgcccagggcagagcaggctttgttcgcacctcatctgctgcagaaccacatcctgaggagtctcagcttatcctggagggaattgggaacagtgtcactgggaagtgaaggcctagccctgtggcttccaccagtctcctcctgcagtgccacgtggtggcatttctcgcctcacaccaagaagcagcaagtggaaaatttcaggatacaaagcacataacaccccataagagatgattatgtttttagaagcaagagcaaaattatgaaacctctagagatttgggtcatgttactccatttgatgaagattctcactaccgcccgctcctcccataggagcctacactaagtccaagtgtgagccattcacagactagaacacaaggagggagagagactcttaaacgtaaataaaaatgcaattcactcacaactctaaa

SEQ ID NO: 370579 - DNA, 1714 bp, Homo sapiens
  misc_feature (1460)..(1460): n is a, c, g, or t
  misc_feature (1464)..(1464): n is a, c, g, or t
  misc_feature (1470)..(1471): n is a, c, g, or t
  misc_feature (1476)..(1476): n is a, c, g, or t
  misc_feature (1479)..(1479): n is a, c, g, or t
  misc_feature (1482)..(1482): n is a, c, g, or t
  misc_feature (1486)..(1487): n is a, c, g, or t
  misc_feature (1496)..(1496): n is a, c, g, or t
gagagagagagagagagagagagagagagagagagagagagagagagagagagagagagagagagagagagagagagcagcgggccgcctcaggcagccccggccgggccgcccgggtccccggcagcggggtaggatggcgctaaagcggatccagaaggaattaaccgacttgcagagggatcctcctgcccagtgttctgcaggacctgtcggtgatgacttgttccactggcaggccaccatcatgggcccgaatgacagtccttaccaaggaggtgttttcttcctgaccatccactttcctacagattacccgttcaagcccccaaaggttgctttcacaaccaaaatttatcaccctaatatcaacagcaatggcagcatctgccttgatatcctgcggtctcagtggtctccagcgttgactgtgtcaaaagttctcttgtccatctgctcgctgctctgcgaccccaaccccgatgaccccctggtgccagagatagcacacacctacaaggccgacagagagaagtacaacagactagcaagagagtggacacaaaaatatgctatgtaagtgccttggaggttttacatgagacactgtccaagagaagctggcagagaggtcttcccttaaaactttgggctgttggctgagccattcaaagagcatcatctgttcttcaaacaaatgttggtcacccactctctccagctgcagcatgttggtgccattttcagcaattacggctttgacagtgccacctctttgatgccaaatcagcaaccattgttgttatgatctgcagtcttcctggtgacactggaatctctctctctgccgcctcagtttgtctgctggtctcttggggggccaggccctgcacgtctctcctacccggcctcaaatggtgctgctgcccatgatggtaccacaccagggcctcagcctggcccctcaccacataccctttgccttttagaactcagtgccatcctgggtgcccagggcagagcaggctttgttcgcacctcatctgctgcagaaccacatcctgaggagtctcagcttatcctggagggaattgggaacagtgtcactgggaagtgaaggcctagccctgtggcttccaccagtctcctcctgcagtgccacgtggtggcatttctcgcctcacaccaagaagcagcaagtggaaaatttcaggatacaaagcacataacaccccataagagatgattatgtttttagaagcaagagcaaaattatgaaacctctagagatttgggtcatgttactccatttgatgaagattctcactaccgcccgctcctcccataggagcctacactaagtccaagtgtgagccattcacagactagaacacaaggagggagagagactcttaaacgtaaataaaaatgcaattcactcacaactctaaaaaaacaanaaancaaaannaaaanaanaanacannaaaaacaanaaaccaacgacggccaccacaggcaaacactaaagataaggggcaaagaacaggaggagagcaaaaacaacggagaatcgcgacaacacagggaggaggagaaccacgaacagaagaaacatacaaaataagggagggcaaaagaaaagaaaaaaggcaggacaaaaggcagaacaagagccacagaaaacacaacggcaaaagagggaagagagaag

SEQ ID NO: 370580 - DNA, 900 bp, Homo sapiens
gagagagagagagagagagagagagagagagagagagagagagagagagagagagagagagagagagagagagagagcagcgggccgcctcaggcagccccggccgggccgcccgggtccccggcagcggggtaggatggcgctaaagcggatccagaaggaattaaccgacttgcagagggatcctcctgcccagtgttctgcaggacctgtcggtgatgacttgttccactggcaggccaccatcatgggcccgaatgacagtccttaccaaggaggtgttttcttcctgaccatccactttcctacagattacccgttcaagcccccaaaggttgctttcacaaccaaaatttatcaccctaatatcaacagcaatggcagcatctgccttgatatcctgcggtctcagtggtctccagcgttgactgtgtcaaaaggtagagatgctgatggcatgctctgtgtgctcttttacacatgtttttaccccagcactgactgagtggaaatggaagctcagagaaagaagtcacctttcccaggtcacatagccctgtccactgctgtgcccttaagtggatatccttacacgcctacgaggcagcaccagcagaactttgtgccccgctccctggcgcttctcagcagtcaattgccctggtgtgctcaagactgtcacatgggtgcaagaagaaaatactgattctacttatatttttttatccaaaaataagaaaggcaaatattacattaccttctctgttccctcatttattcatctaataagcacaaaacggactgtgagtcagccctgaaggaagatacagggcatgcctccgggggcctcgaagttggtggagaaatcctcccttcccaaaataaatgatgttgagcaca

SEQ ID NO: 370581 - DNA, 677 bp, Homo sapiens
gagagagagagagagagagagagagagagagagagagagagagagagagagagagagagagagagagagagagagagcagcgggccgcctcaggcagccccggccgggccgcccgggtccccggcagcggggtaggatggcgctaaagcggatccagaaggctgtacaagaagcatggtgccagcatctgcttctggtgaggcctcaggaagcttacaatcatggcagaaagcaaaggagaagcaggcgtgtcacctggaattaaccgacttgcagagggatcctcctgcccagtgttctgcaggacctgtcggtgatgacttgttccactggcaggccaccatcatgggcccgaatgacagtccttaccaaggaggtgttttcttcctgaccatccactttcctacagattacccgttcaagcccccaaaggttgctttcacaaccaaaatttatcaccctaatatcaacagcaatggcagcatctgccttgatatcctgcggtctcagtggtctccttcagacttcaagtctgaaggagacaaagaggaagggcagggtctatgtcatggacactgctacttgttcgatgaagctggccaggtttatgtcccgttctgaaaggccggcacactcatgggtgctcagcgtgatgtggaccttgttgtacacgttaa

SEQ ID NO: 370582 - DNA, 1018 bp, Homo sapiens
  misc_feature (8)..(8): n is a, c, g, or t
  misc_feature (88)..(88): n is a, c, g, or t
  misc_feature (113)..(113): n is a, c, g, or t
  misc_feature (134)..(134): n is a, c, g, or t
  misc_feature (137)..(137): n is a, c, g, or t
  misc_feature (201)..(201): n is a, c, g, or t
  misc_feature (218)..(218): n is a, c, g, or t
  misc_feature (247)..(247): n is a, c, g, or t
  misc_feature (255)..(255): n is a, c, g, or t
  misc_feature (302)..(302): n is a, c, g, or t
  misc_feature (313)..(313): n is a, c, g, or t
  misc_feature (356)..(356): n is a, c, g, or t
  misc_feature (388)..(388): n is a, c, g, or t
  misc_feature (529)..(529): n is a, c, g, or t
  misc_feature (532)..(532): n is a, c, g, or t
ttttttgngtataataaatccccagtctcctgttagccagctctatgtatattaaactgttctctattgcaatatccccgtcttgatnaatcagcattgtctgggcagcaggnaaaatgaagcaatttaggtgntangagagccaccgccatttggaacaggggcactctgaccattgactagagctgaagtgaacctgtnacagtaggtacctagtnaagcaagaacagtgctagggaggcccccngcccctcnccaggaatgtcaggcaatcatcaggtgatggtcagggagtttttttntgtttctctanaatagtgactggtcaccgccccaggtaaaaacagtcccctaancggtagaaagaacctgaaactggtgacgcacngcttcccaataatatctcaggagttgggcaagtcgtctcaagtatgtgcattaagaggtgaagtggtgaagtttaattgatatatgaccttccagggacatttccctggtaaggaaagaatacctcaagtgaacatgtgtnccnctccagtatacacactctgcatgctcccctcccaagtgctagcaggccactgcactccagcctgggcaacaagagtgaaactctgtctcaaaaaaaaaaaagaagaaaaaaacataagtgattgcagaattttgttcttctcataatttctggtttagaaaattatggagccttacatcctgatcatgctgggccttagaattctgacacagtgagtcatcacatttcctcccactgcctgtggccttgttccaccatgactctcacagtacagtgtaggcttagtgtagtattattcccttggaaagggtctggcctaccatcacatgccccaagaaacttctggttggtaaagaagataggctgcttattgccatgtgtagtcacttccaagtgcccactgcctttccatcctgcaattgtggcctgtgtataattaaatgattttagcctcaaaaaaaaaaaaaagtcgacgcggccgcgaat

SEQ ID NO: 370583 - DNA, 139 bp, Homo sapiens
gcggccgcctactactactactactgctcgaattcaagcttctaacgatatacggggacatgtgtagtcacttccaagtgcccactgcctttccatcctgcaattgtggcctgtgtataattaaatgattttagcctca

SEQ ID NO: 370584 - DNA, 4637 bp, Homo sapiens
aacacgataaaggggacatgccgggagttgcagtaccctcaggaaggtagcgtcttgatctgcgtggcgtggttctgtgccttgggaagagatgaatgggaagcggccagcggagcccggcccagcccgggtgggaaaaaagggaaagaaggaggtgatggcggagttttcggacgctgttacggaagaaaccttgaaaaagcaggtggctgaggcctggagccgcaggacgccgttcagtcacgaagtcattgtcatggacatggacccttttcttcactgtgtgatcccaaacttcatccaaagccaagacttcttagaagggcttcagaaggaactgatgaacttggacttccatgagaagtataatgatttatataagttccagcagtctgatgatttgaagaagagaagagagcctcacatctccactttaaggaaaattctgtttgaagatttccggtcctggctttctgatatttctaaaattgacctggaatcaaccattgacatgtcctgtgctaaatatgaattcactgatgccctgctgtgccatgatgatgagctggaagggcgccggattgccttcatcctgtacctggttcctccctgggacaggagcatgggtggtaccctggacctgtacagcattgatgaacactttcagccgaagcagattgtcaagtctcttatcccttcgtggaacaaactggttttctttgaagtatctcctgtgtcctttcaccaggtgtctgaagtgctgtctgaagaaaagtcacgtttgtctataagtggctggtttcatggtccatcattgactcggcctcccaactactttgaaccccccatacctcggagccctcacatcccacaagatcatgagattttgtatgattggatcaaccctacttatctggacatggattaccaagttcaaattcaagaagagtttgaagaaagttctgaaattctcctgaaggagtttcttaagcctgagaaattcacgaaagtctgtgaggccttggagcatggacatgtggaatggagcagccgaggtccccctaacaaaaggttttatgagaaagctgaggagagtaagcttcctgagatattgaaggagtgcatgaagttatttcgctctgaggcactattcttgctgctctccaacttcacaggcctgaagcttcatttcttggccccttcggaagaagatgagatgaatgataaaaaagaggcagaaaccactgatatcactgaagaagggactagccatagtcctcctgagccagagaataatcagatggccatcagcaacaacagccaacagagcaatgagcagacagacccagagccagaggaaaatgaaacaaagaaagaatcaagtgttcccatgtgccaaggggaactgaggcattggaagaccggtcactacactttaattcatgaccatagcaaggctgaatttgccctagacttaattctgtactgtggctgtgaaggctgggagccagaatatggcggttttacttcttacattgccaaaggtgaagatgaagagctgctaacagtgaatccagaaagcaattctttggcattggtctacagagacagagagactctgaaatttgtcaagcatattaaccaccgaagcctggaacaaaagaaaaccttcccaaacagaacaggtttctgggacttttcattcatctattatgaatgacagcactgggcaaagctgaacaaaaatgtgacccttcgtaattactgggaagtctgaaagagctaagcatggagtcaaggagaactacatggtagcttgcctgacagtgttcttaaaactggttgtcttttactaggactcataatgattgtcctcaaccgagaccttgagcttgcagctacgtacttatctcttgattaaaaaaaaaaagttggcttttttttttttaacatttagtcctttttccatattggcttcttcagtgaatttttaagttcaatttgtttttattgaggtaaaatatttataacataaaactgaccagcttacccatttttaaatatgcaattcagtggattaagtacattctcattgttgtccagccatcaccatcatccatctccagaagttttccatcttcccaaattctgtgcccattgaacaataactccccacctccccttcccctagcaacagccatactttttgtctctatcatcaacttcactactcatatttctcatgtaagtggaatcatacagtatttgtccttttgtgactggtttcacttagcataaagtctttaagatgcatccatgtttccagtgtttcggtttttttagaaaaactcatacgtgattgcagccgggcatggtggctcacgcctgtaatcccagcacttgggaggccaaggcaggcggatcacctgaggtcaggagttaaagaccagcctgacaaacatggagaaaccccatctctactaaaaatacaaaattagctgggcgtggtggcacatgcctgtaatcccagctactcaggaggctggggcaggagaattggttgaacccaggaggcggaggttgcagtgagccgagattgtgccactgcactccagcctgggcaacaagagtgaaactctgtctcaaaaaaaaaaaagaagaaaaaaacataagtgattgcagaattttgttcttctcataatttctggtttagaaaattatggagccttacatcctgatcatgctgggccttagaattctgacacagtgagtcatcacatttcctcccactgcctgtggccttgttccaccatgactctcacagtacagtgtaggcttagtgtagtattattcccttggaaagggtctggcctaccatcacatgccccaagaaacttctggttggtaaagaagataggctgcttattgccatgtgtagtcacttccaagtgcccactgcctttccatcctgcaattgtggcctgtgtataattaaatgattttagcctcacgtgttgcttctgttttcctaaatactgtagggtcaactatataactaattgctttttattttaagagacggaatgctaaaaccacatcagaatgccaagaggctgtgcatcttgttaatttttttcttgaactgttccagggagttacatcataattacctgtgtgtgggtatgcatgggtggatgaaagatgctgttctcattccatcccaatagagtcttctgtttcctttctcttttttacatttatttttagcttttgcagtagtgtttagtgtgggttttactaattaatagaaaaagcactgggcctttaaacttcttaactactcttctctttcatctcctaaaacttttgagtattcattcttttctgaagtttgcatttaaatgaaaatgactttcgctttggcttttaggtttagtttcaaaaaggtttaattctgcaccctagccagttaagaaatgttttagcaggtatgcccttgatatggatatttatatattttacacatgtagtaatattatttctataacttactgttataaaacactaatttttaaatgatgagataaaaagaaatatctagaactagttctaacattgtcttcccctatgcatatggtaacgaaccattttacaccatactattttggagaccacaattttttttgcgtttgagatggagtctcactctgtggcccaggctggagtacagtggcatgatatcggctcactgtgacctctgtctcctgggttcaagcaattctcctgcctcagcctcctaagtagctgggattacaggcacctgcctccatacccagctaatttttttatatttttagtagagacagggtttcaccatgttggccaggctggagaccacaattttttaaccacagtgtagcaacactcaagtgggattgcgaatactgttactaatggttaatgtcacagcttgccttttctatattccagctgactaaaggtcatctcactcacttgccttctgatgtgttttcatgagttgaggggaaagggtgtcagtggcataacttcaggaagacccagggaaaagtgcttgggtaggtgaaactgtcatgtgtgccaagcttggaaaatagtttgagactcatggctgtaggcaccatccaaggccaattttccaattctggaaagccaaatctgaatcttagaatacctcacaagtgttaaaatgtgctttttagtgtctcctttatctcagtgtgtttatgatctgtcaacacataatcatcttttatacactacaaaaagggactcgggtgtctgaggggagagaatccctaggagcccaactctgatgttgctgtcagttacatcatctacagcagcacctcttagattgtgaaggatggtgtaacttaaaagattgtgtttctgcactgaagatagatacacagtgatagtgaagtttgttttccttatagtacttcattttgcatcttgattgctttttagggcctggggccaatgtcaacaactcttaggtagcaaaagaagaattagaacatgggcatcttttttatacctctttcagataaaagctatgatgttcacctgtaaaatatatggtttctctcttt

SEQ ID NO: 370585 - DNA, 2811 bp, Homo sapiens
aacacgataaaggggacatgccgggagttgcagtaccctcaggaagaagtcattgtcatggacatggacccttttcttcactgtgtgatcccaaacttcatccaaagccaagacttcttagaagggcttcagaaggaactgatgaacttggacttccatgagaagtataatgatttatataagttccagcagtctgatgatttgaagaagagaagagagcctcacatctccactttaaggaaaattctgtttgaagatttccggtcctggctttctgatatttctaaaattgacctggaatcaaccattgacatgtcctgtgctaaatatgaattcactgatgccctgctgtgccatgatgatgagctggaagggcgccggattgccttcatcctgtacctggttcctccctgggacaggagcatgggtggtaccctggacctgtacagcattgatgaacactttcagccgaagcagattgtcaagtctcttatcccttcgtggaacaaactggttttctttgaagtatctcctgtgtcctttcaccaggtgtctgaagtgctgtctgaagaaaagtcacgtttgtctataagtggctggtttcatggtccatcattgactcggcctcccaactactttgaaccccccatacctcggagccctcacatcccacaagatcatgagattttgtatgattggatcaaccctacttatctggacatggattaccaagttcaaattcaagaagagtttgaagaaagttctgaaattctcctgaaggagtttcttaagcctgagaaattcacgaaagtctgtgaggccttggagcatggacatgtggaatggagcagccgaggtccccctaacaaaaggttttatgagaaagctgaggagagtaagcttcctgagatattgaaggagtgcatgaagttatttcgctctgaggcactattcttgctgctctccaacttcacaggcctgaagcttcatttcttggccccttcggaagaagatgagatgaatgataaaaaagaggcagaaaccactgatatcactgaagaagggactagccatagtcctcctgagccagagaataatcagatggccatcagcaacaacagccaacagagcaatgagcagacagacccagagccagaggaaaatgaaacaaagaaagaatcaagtgttcccatgtgccaaggggaactgaggcattggaagaccggtcactacactttaattcatgaccatagcaaggctgaatttgccctagacttaattctgtactgtggctgtgaaggctgggagccagaatatggcggttttacttcttacattgccaaaggtgaagatgaagagctgctaacagtgaatccagaaagcaattctttggcattggtctacagagacagagagactctgaaatttgtcaagcatattaaccaccgaagcctggaacaaaagaaaaccttcccaaacagaacaggtttctgggacttttcattcatctattatgaatgacagcactgggcaaagctgaacaaaaatgtgacccttcgtaattactgggaagtctgaaagagctaagcatggagtcaaggagaactacatggtagcttgcctgacagtgttcttaaaactggttgtcttttactaggactcataatgattgtcctcaaccgagaccttgagcttgcagctacgtacttatctcttgattaaaaaaaaaaagttggcttttttttttttaacatttagtcctttttccatattggcttcttcagtgaatttttaagttcaatttgtttttattgaggtaaaatatttataacataaaactgaccagcttacccatttttaaatatgcaattcagtggattaagtacattctcattgttgtccagccatcaccatcatccatctccagaagttttccatcttcccaaattctgtgcccattgaacaataactccccacctccccttcccctagcaacagccatactttttgtctctatcatcaacttcactactcatatttctcatgtaagtggaatcatacagtatttgtccttttgtgactggtttcacttagcataaagtctttaagatgcatccatgtttccagtgtttcggtttttttagaaaaactcatacgtgattgcagccgggcatggtggctcacgcctgtaatcccagcacttgggaggccaaggcaggcggatcacctgaggtcaggagttaaagaccagcctgacaaacatggagaaaccccatctctactaaaaatacaaaattagctgggcgtggtggcacatgcctgtaatcccagctactcaggaggctggggcaggagaattggttgaacccaggaggcggaggttgcagtgagccgagattgtgccactgcactccagcctgggcaacaagagtgaaactctgtctcaaaaaaaaaaaagaagaaaaaaacataagtgattgcagaattttgttcttctcataatttctggtttagaaaattatggagccttacatcctgatcatgctgggccttagaattctgacacagtgagtcatcacatttcctcccactgcctgtggccttgttccaccatgactctcacagtacagtgtaggcttagtgtagtattattcccttggaaagggtctggcctaccatcacatgccccaagaaacttctggttggtaaagaagataggctgcttattgccatgtgtagtcacttccaagtgcccactgcctttccatcctgcaattgtggcctgtgtataattaaatgattttagcctca

SEQ ID NO: 370586 - DNA, 2962 bp, Homo sapiens
aacacgataaaggggacatgccgggagttgcagtaccctcaggaaggtagcgtcttgatctgcgtggcgtggttctgtgccttgggaagagatgaatgggaagcggccagcggagcccggcccagcccgggtgggaaaaaagggaaagaaggaggtgatggcggagttttcggacgctgttacggaagaaaccttgaaagtcattgtcatggacatggacccttttcttcactgtgtgatcccaaacttcatccaaagccaagacttcttagaagggcttcagaaggaactgatgaacttggacttccatgagaagtataatgatttatataagttccagcagtctgatgatttgaagaagagaagagagcctcacatctccactttaaggaaaattctgtttgaagatttccggtcctggctttctgatatttctaaaattgacctggaatcaaccattgacatgtcctgtgctaaatatgaattcactgatgccctgctgtgccatgatgatgagctggaagggcgccggattgccttcatcctgtacctggttcctccctgggacaggagcatgggtggtaccctggacctgtacagcattgatgaacactttcagccgaagcagattgtcaagtctcttatcccttcgtggaacaaactggttttctttgaagtatctcctgtgtcctttcaccaggtgtctgaagtgctgtctgaagaaaagtcacgtttgtctataagtggctggtttcatggtccatcattgactcggcctcccaactactttgaaccccccatacctcggagccctcacatcccacaagatcatgagattttgtatgattggatcaaccctacttatctggacatggattaccaagttcaaattcaagaagagtttgaagaaagttctgaaattctcctgaaggagtttcttaagcctgagaaattcacgaaagtctgtgaggccttggagcatggacatgtggaatggagcagccgaggtccccctaacaaaaggttttatgagaaagctgaggagagtaagcttcctgagatattgaaggagtgcatgaagttatttcgctctgaggcactattcttgctgctctccaacttcacaggcctgaagcttcatttcttggccccttcggaagaagatgagatgaatgataaaaaagaggcagaaaccactgatatcactgaagaagggactagccatagtcctcctgagccagagaataatcagatggccatcagcaacaacagccaacagagcaatgagcagacagacccagagccagaggaaaatgaaacaaagaaagaatcaagtgttcccatgtgccaaggggaactgaggcattggaagaccggtcactacactttaattcatgaccatagcaaggctgaatttgccctagacttaattctgtactgtggctgtgaaggctgggagccagaatatggcggttttacttcttacattgccaaaggtgaagatgaagagctgctaacagtgaatccagaaagcaattctttggcattggtctacagagacagagagactctgaaatttgtcaagcatattaaccaccgaagcctggaacaaaagaaaaccttcccaaacagaacaggtttctgggacttttcattcatctattatgaatgacagcactgggcaaagctgaacaaaaatgtgacccttcgtaattactgggaagtctgaaagagctaagcatggagtcaaggagaactacatggtagcttgcctgacagtgttcttaaaactggttgtcttttactaggactcataatgattgtcctcaaccgagaccttgagcttgcagctacgtacttatctcttgattaaaaaaaaaaagttggcttttttttttttaacatttagtcctttttccatattggcttcttcagtgaatttttaagttcaatttgtttttattgaggtaaaatatttataacataaaactgaccagcttacccatttttaaatatgcaattcagtggattaagtacattctcattgttgtccagccatcaccatcatccatctccagaagttttccatcttcccaaattctgtgcccattgaacaataactccccacctccccttcccctagcaacagccatactttttgtctctatcatcaacttcactactcatatttctcatgtaagtggaatcatacagtatttgtccttttgtgactggtttcacttagcataaagtctttaagatgcatccatgtttccagtgtttcggtttttttagaaaaactcatacgtgattgcagccgggcatggtggctcacgcctgtaatcccagcacttgggaggccaaggcaggcggatcacctgaggtcaggagttaaagaccagcctgacaaacatggagaaaccccatctctactaaaaatacaaaattagctgggcgtggtggcacatgcctgtaatcccagctactcaggaggctggggcaggagaattggttgaacccaggaggcggaggttgcagtgagccgagattgtgccactgcactccagcctgggcaacaagagtgaaactctgtctcaaaaaaaaaaaagaagaaaaaaacataagtgattgcagaattttgttcttctcataatttctggtttagaaaattatggagccttacatcctgatcatgctgggccttagaattctgacacagtgagtcatcacatttcctcccactgcctgtggccttgttccaccatgactctcacagtacagtgtaggcttagtgtagtattattcccttggaaagggtctggcctaccatcacatgccccaagaaacttctggttggtaaagaagataggctgcttattgccatgtgtagtcacttccaagtgcccactgcctttccatcctgcaattgtggcctgtgtataattaaatgattttagcctca

SEQ ID NO: 370587 - DNA, 2339 bp, Homo sapiens
aacacgataaaggggacatgccgggagttgcagtaccctcaggaaggtagcgtcttgatctgcgtggcgtggttctgtgccttgggaagagatgaatgggaagcggccagcggagcccggcccagcccgggtgggaaaaaagggaaagaaggaggtgatggcggagttttcggacgctgttacggaagaaaccttgaaaaagcaggtggctgaggcctggagccgcaggacgccgttcagtcacgaagtcattgtcatggacatggacccttttcttcactgtgtgatcccaaacttcatccaaagccaagacttcttagaagggcttcagaaggaactgatgaacttggacttccatgagaagtataatgatttatataagttccagcagtctgatgatttgaagaagagaagagagcctcacatctccactttaaggaaaattctgtttgaagatttccggtcctggctttctgatatttctaaaattgacctggaatcaaccattgacatgtcctgtgctaaatatgaattcactgatgccctgctgtgccatgatgatgagctggaagggcgccggattgccttcatcctgtacctggttcctccctgggacaggagcatgggtggtaccctggacctgtacagcattgatgaacactttcagccgaagcagattgtcaagtctcttatcccttcgtggaacaaactggttttctttgaagtatctcctgtgtcctttcaccaggtgtctgaagtgctgtctgaagaaaagtcacgtttgtctataagtggctggtttcatggtccatcattgactcggcctcccaactactttgaaccccccatacctcggagccctcacatcccacaagatcatgagattttgtatgattggatcaaccctacttatctggacatggattaccaagttcaaattcaagaagagtttgaagaaagttctgaaattctcctgaaggagtttcttaagcctgagaaattcacgaaagtctgtgaggccttggagcatggacatgtggaatggagcagccgaggtccccctaacaaaaggttttatgagaaagctgaggagagtaagcttcctgagatattgaaggagtgcatgaagttatttcgctctgaggcactattcttgctgctctccaacttcacaggcctgaagcttcatttcttggccccttcggaagaagatgagatgaatgataaaaaagaggcagaaaccactgatatcactgaagaagggactagccatagtcctcctgagccagagaataatcagatggccatcagcaacaacagccaacagagcaatgagcagacagacccagagccagaggaaaatgaaacaaagaaagaatcaagtgttcccatgtgccaaggggaactgaggcattggaagaccggtcactacactttaattcatgaccatagcaaggctgaatttgccctagacttaattctgtactgtggctgtgaaggctgggagccagaatatggcggttttacttcttacattgccaaaggtgaagatgaagagctgctaacagtgaatccagaaagcaattctttggcattggtctacagagacagagagactctgaaatttgtcaagcatattaaccaccgaagcctggaacaaaagaaaaccttcccaaacagaacaggtttctgggacttttcattcatctattatgaatgacagcactgggcaaagctgaacaaaaatgtgacccttcgtaattactgggaagtctgaaagagctaagcatggagtcaaggagaactacatggtagcttgcctgacagtgttcttaaaactggttgtcttttactaggactcataatgattgtcctcaaccgagaccttgagcttgcagctacgtacttatctcttgattaaaaaaaaaaagttggcttttttttttttaacatttagtcctttttccatattggcttcttcagtgaatttttaagttcaatttgtttttattgaggtaaaatatttataacataaaactgaccagcttacccatttttaaatatgcaattcagtggattaagtacattctcattgttgtccagccatcaccatcatccatctccagaagttttccatcttcccaaattctgtgcccattgaacaataactccccacctccccttcccctagcaacagccatactttttgtctctatcatcaacttcactactcatatttctcatgtaagtggaatcatacagtatttgtccttttgtgactggtttcacttagcataaagtctttaagatgtgcggtgtttggggatcctcagagtcac

SEQ ID NO: 370588 - DNA, 1449 bp, Homo sapiens
cgctcacaacatgctaagggcatcagtgaattcatatttagcacaggacatgtcaatggttgattccaggtcaattttagaaatatcagaaagccaggaccggaaatcttcccaaacagaacaggtttctgggacttttcattcatctattatgaatgacagcactgggcaaagctgaacaaaaatgtgacccttcgtaattactgggaagtctgaaagagctaagcatggagtcaaggagaactacatggtagcttgcctgacagtgttcttaaaactggttgtcttttactaggactcataatgattgtcctcaaccgagaccttgagcttgcagctacgtacttatctcttgattaaaaaaaaaaagttggcttttttttttttaacatttagtcctttttccatattggcttcttcagtgaatttttaagttcaatttgtttttattgaggtaaaatatttataacataaaactgaccagcttacccatttttaaatatgcaattcagtggattaagtacattctcattgttgtccagccatcaccatcatccatctccagaagttttccatcttcccaaattctgtgcccattgaacaataactccccacctccccttcccctagcaacagccatactttttgtctctatcatcaacttcactactcatatttctcatgtaagtggaatcatacagtatttgtccttttgtgactggtttcacttagcataaagtctttaagatgcatccatgtttccagtgtttcggtttttttagaaaaactcatacgtgattgcagccgggcatggtggctcacgcctgtaatcccagcacttgggaggccaaggcaggcggatcacctgaggtcaggagttaaagaccagcctgacaaacatggagaaaccccatctctactaaaaatacaaaattagctgggcgtggtggcacatgcctgtaatcccagctactcaggaggctggggcaggagaattggttgaacccaggaggcggaggttgcagtgagccgagattgtgccactgcactccagcctgggcaacaagagtgaaactctgtctcaaaaaaaaaaaagaagaaaaaaacataagtgattgcagaattttgttcttctcataatttctggtttagaaaattatggagccttacatcctgatcatgctgggccttagaattctgacacagtgagtcatcacatttcctcccactgcctgtggccttgttccaccatgactctcacagtacagtgtaggcttagtgtagtattattcccttggaaagggtctggcctaccatcacatgccccaagaaacttctggttggtaaagaagataggctgcttattgccatgtgtagtcacttccaagtgcccactgcctttccatcctgcaattgtggcctgtgtataattaaatgattttagcctca

SEQ ID NO: 370589 - DNA, 1899 bp, Homo sapiens
aacacgataaaggggacatgccgggagttgcagtaccctcaggaaggtagcgtcttgatctgcgtggcgtggttctgtgccttgggaagagatgaatgggaagcggccagcggagcccggcccagcccgggtgggaaaaaagggaaagaaggaggtgatggcggagttttcggacgctgttacggaagaaaccttgaaagtcattgtcatggacatggacccttttcttcactgtgtgatcccaaacttcatccaaagccaagacttcttagaagggcttcagaaggaactgatgaacttggacttccatgagaagtataatgatttatataagttccagcagtctgatgatttgaagaagagaagagagcctcacatctccactttaaggaaaattctgtttgaagatttccggtcctggctttctgatatttctaaaattgacctggaatcaaccattgacatgtcctgtgctaaatatgaattcactgatgccctgctgtgccatgatgatgagctggaagggcgccggattgccttcatcctgtacctggttcctccctgggacaggagcatgggtggtaccctggacctgtacagcattgatgaacactttcagccgaagcagattgtcaagtctcttatcccttcgtggaacaaactggttttctttgaagtatctcctgtgtcctttcaccaggtgtctgaagtgctgtctgaagaaaagtcacgtttgtctataagtggctggtttcatggtccatcattgactcggcctcccaactactttgaaccccccatacctcggagccctcacatcccacaagatcatgagattttgtatgattggatcaaccctacttatctggacatggattaccaagttcaaattcaagaagagtttgaagaaagttctgaaattctcctgaaggagtttcttaagcctgagaaattcacgaaagtctgtgaggccttggagcatggacatgtggaatggagcagccgaggtccccctaacaaaaggttttatgagaaagctgaggagagtaagcttcctgagatattgaaggagtgcatgaagttatttcgctctgaggcactattcttgctgctctccaacttcacaggcctgaagcttcatttcttggccccttcggaagaagatgagatgaatgataaaaaagaggcagaaaccactgatatcactgaagaagggactagccatagtcctcctgagccagagaataatcagatggccatcagcaacaacagccaacagagcaatgagcagacagacccagagccagaggaaaatgaaacaaagaaagaatcaagtgttcccatgtgccaaggggaactgaggcattggaagaccggtcactacactttaattcatgaccatagcaaggctgaatttgccctagacttaattctgtactgtggctgtgaaggctgggagccagaatatggcggttttacttcttacattgccaaaggtgaagatgaagagctgctaacagtgaatccagaaagcaattctttggcattggtctacagagacagagagactctgaaatttgtcaagcatattaaccaccgaagcctggaacaaaagaaaaccttcccaaacagaacaggtttctgggacttttcattcatctattatgaatgacagcactgggcaaagctgaacaaaaatgtgacccttcgtaattactgggaagtctgaaagagctaagcatggagtcaaggagaactacatggtagcttgcctgacagtgttcttaaaactggttgtcttttactaggactcataatgattgtcctcaaccgagaccttgagcttgcagctacgtacttatctcttgattaaaaaaaaaaagttggcttttttttttt

SEQ ID NO: 370590 - DNA, 1548 bp, Homo sapiens
aacacgataaaggggacatgccgggagttgcagtaccctcaggaaggtagcgtcttgatctgcgtggcgtggttctgtgccttgggaagagatgaatgggaagcggccagcggagcccggcccagcccgggtgggaaaaaagggaaagaaggaggtgatggcggagttttcggacgctgttacggaagaaaccttgaaagtcattgtcatggacatggacccttttcttcactgtgtgatcccaaacttcatccaaagccaagacttcttagaagggcttcagaaggaactgatgaacttggacttccatgagaagtataatgatttatataagttccagcagtctgatgatttgaagaagagaagagagcctcacatctccactttaaggaaaattctgtttgaagatttccggtcctggctttctgatatttctaaaattgacctggaatcaaccattgacatgtcctgtgctaaatatgaattcactgatgccctgctgtgccatgatgatgagctggaagggcgccggattgccttcatcctgtacctggttcctccctgggacaggagcatgggtggtaccctggacctgtacagcattgatgaacactttcagccgaagcagattgtcaagtctcttatcccttcgtggaacaaactggttttctttgaagtatctcctgtgtcctttcaccaggtgtctgaagtgctgtctgaagaaaagtcacgtttgtctataagtggctggtttcatggtccatcattgactcggcctcccaactactttgaaccccccatacctcggagccctcacatcccacaagatcatgagattttgtatgattggatcaaccctacttatctggacatggattaccaagttcaaattcaagaagagtttgaagaaagttctgaaattctcctgaaggagtttcttaagcctgagaaattcacgaaagtctgtgaggccttggagcatggacatgtggaatggagcagccgaggtccccctaacaaaaggttttatgagaaagctgaggagagtaagcttcctgagatattgaaggagtgcatgaagttatttcgctctgaggcactattcttgctgctctccaacttcacaggcctgaagcttcatttcttggccccttcggaagaagatgagatgaatgataaaaaagaggcagaaaccactgatatcactgaagaagggactagccatagtcctcctgagccagagaataatcagatggccatcagcaacaacagccaacagagcaatgagcagacagacccagagccagaggaaaatgaaacaaagaaagaatcaagtgttcccatgtgccaaggggaactgaggcattggaagaccggtcactacactttaattcatgaccatagcaaggctgaatttgccctagacttaattctgtactgtggctgtgaaggctgggagccagaatatggcggttttacttcttacattgccaaaggtgaagatgaagagctgctacagttgatcccatcgtggggaccctctagacc

SEQ ID NO: 370591 - DNA, 987 bp, Homo sapiens
  misc_feature (8)..(8): n is a, c, g, or t
  misc_feature (88)..(88): n is a, c, g, or t
  misc_feature (113)..(113): n is a, c, g, or t
  misc_feature (134)..(134): n is a, c, g, or t
  misc_feature (137)..(137): n is a, c, g, or t
  misc_feature (201)..(201): n is a, c, g, or t
  misc_feature (218)..(218): n is a, c, g, or t
  misc_feature (247)..(247): n is a, c, g, or t
  misc_feature (255)..(255): n is a, c, g, or t
  misc_feature (302)..(302): n is a, c, g, or t
  misc_feature (313)..(313): n is a, c, g, or t
  misc_feature (356)..(356): n is a, c, g, or t
  misc_feature (388)..(388): n is a, c, g, or t
  misc_feature (529)..(529): n is a, c, g, or t
  misc_feature (532)..(532): n is a, c, g, or t
ttttttgngtataataaatccccagtctcctgttagccagctctatgtatattaaactgttctctattgcaatatccccgtcttgatnaatcagcattgtctgggcagcaggnaaaatgaagcaatttaggtgntangagagccaccgccatttggaacaggggcactctgaccattgactagagctgaagtgaacctgtnacagtaggtacctagtnaagcaagaacagtgctagggaggcccccngcccctcnccaggaatgtcaggcaatcatcaggtgatggtcagggagtttttttntgtttctctanaatagtgactggtcaccgccccaggtaaaaacagtcccctaancggtagaaagaacctgaaactggtgacgcacngcttcccaataatatctcaggagttgggcaagtcgtctcaagtatgtgcattaagaggtgaagtggtgaagtttaattgatatatgaccttccagggacatttccctggtaaggaaagaatacctcaagtgaacatgtgtnccnctccagtatacacactctgcatgctcccctcccaagtgctagcaggccactgcactccagcctgggcaacaagagtgaaactctgtctcaaaaaaaaaaaagaagaaaaaaacataagtgattgcagaattttgttcttctcataatttctggtttagaaaattatggagccttacatcctgatcatgctgggccttagaattctgacacagtgagtcatcacatttcctcccactgcctgtggccttgttccaccatgactctcacagtacagtgtaggcttagtgtagtattattcccttggaaagggtctggcctaccatcacatgccccaagaaacttctggttggtaaagaagataggctgcttattgccatgtgtagtcacttccaagtgcccactgcctttccatcctgcaattgtggcctgtgtataattaaatgattttagcctca

SEQ ID NO: 370592 - DNA, 1937 bp, Homo sapiens
tgctaaaaccacatcagaatgccaagaggctgtgcatcttgttaatttttttcttgaactgttccagtgagtcatcacatttcctcccactgcctgtggccttgttccaccatgactctcacagtacagtgtaggcttagtgtagtattattcccttggaaagggtctggcctaccatcacatgccccaagaaacttctggttggtaaagaagataggctgcttattgccatgtgtagtcacttccaagtgcccactgcctttccatcctgcaattgtggcctgtgtataattaaatgattttagcctcacgtgttgcttctgttttcctaaatactgtagggtcaactatataactaattgctttttattttaagagacggaatgctaaaaccacatcagaatgccaagaggctgtgcatcttgttaatttttttcttgaactgttccagggagttacatcataattacctgtgtgtgggtatgcatgggtggatgaaagatgctgttctcattccatcccaatagagtcttctgtttcctttctcttttttacatttatttttagcttttgcagtagtgtttagtgtgggttttactaattaatagaaaaagcactgggcctttaaacttcttaactactcttctctttcatctcctaaaacttttgagtattcattcttttctgaagtttgcatttaaatgaaaatgactttcgctttggcttttaggtttagtttcaaaaaggtttaattctgcaccctagccagttaagaaatgttttagcaggtatgcccttgatatggatatttatatattttacacatgtagtaatattatttctataacttactgttataaaacactaatttttaaatgatgagataaaaagaaatatctagaactagttctaacattgtcttcccctatgcatatggtaacgaaccattttacaccatactattttggagaccacaattttttttgcgtttgagatggagtctcactctgtggcccaggctggagtacagtggcatgatatcggctcactgtgacctctgtctcctgggttcaagcaattctcctgcctcagcctcctaagtagctgggattacaggcacctgcctccatacccagctaatttttttatatttttagtagagacagggtttcaccatgttggccaggctggagaccacaattttttaaccacagtgtagcaacactcaagtgggattgcgaatactgttactaatggttaatgtcacagcttgccttttctatattccagctgactaaaggtcatctcactcacttgccttctgatgtgttttcatgagttgaggggaaagggtgtcagtggcataacttcaggaagacccagggaaaagtgcttgggtaggtgaaactgtcatgtgtgccaagcttggaaaatagtttgagactcatggctgtaggcaccatccaaggccaattttccaattctggaaagccaaatctgaatcttagaatacctcacaagtgttaaaatgtgctttttagtgtctcctttatctcagtgtgtttatgatctgtcaacacataatcatcttttatacactacaaaaagggactcgggtgtctgaggggagagaatccctaggagcccaactctgatgttgctgtcagttacatcatctacagcagcacctcttagattgtgaaggatggtgtaacttaaaagattgtgtttctgcactgaagatagatacacagtgatagtgaagtttgttttccttatagtacttcattttgcatcttgattgctttttagggcctggggccaatgtcaacaactcttaggtagcaaaagaagaattagaacatgggcatcttttttatacctctttcagataaaagctatgatgttcacctgtaaaatatatggtttctctcttt

SEQ ID NO: 370593 - DNA, 508 bp, Homo sapiens
aatcaagtgttcccatgtgccaaggggaactgaggcattggaagaccggtcactacactttaattcatgaccatagcaaggctgaatttgccctagacttaattctgtactgtggctgtgaaggtaagagggaggaaagcaagcggtggattattccccgtaggaggggcagtctcttctgagggaccctttccagctgaaccaattcataagtaatttgcctagttcagaatctcacatcatgggatctcaaagtcaaagggattttacgggtcatgaattccagtctcccagctcaaaataggatttatatctgtgactaggaaatggggagatggaccacaccataattttcccctaagtgtgctcccagatctatagattttatgtaattgcccttctgggaatatttagcatttaattctctcttaattttcatattcaaagtttattgaaataagactgcatttcagttcagctgtctcaggaaattaggcatttaggggaa

SEQ ID NO: 370594 - DNA, 748 bp, Homo sapiens
aacacgataaaggggacatgccgggagttgcagtaccctcaggaaggtagcgtcttgatctgcgtggcgtggttctgtgccttgggaagagatgaatgggaagcggccagcggagcccggcccagcccgggtgggaaaaaagggaaagaaggaggtgatggcggagttttcggacgctgttacggaagaaaccttgaaaaagcaggtggctgaggcctggagccgcaggacgccgttcagtcacgaagtcattgtcatggacatggacccttttcttcactgtgtgatcccaaacttcatccaaagccaagacttcttagaagggcttcagaaggaactgatgaacttggacttccatgagaagtataatgatttatataagttccagcagtctgatgatttgaagaagagaagagagcctcacatctccactttaaggaaaacaagtaatcatatttgttgggtgctaatatgtgccaggcagagtagtaagtgctttaaatgttacaacattgtgtatgtcatataaattcttgttgacattgttaacccactttgtagaggaggaaagagaccgagaaattgagtttgcatagcttaaaattcacgggagctagcatacaaacctaagtctgtctgattccaagggccaagttctcagtgataaaatgctcaatcttgttagtaatcaaggacacagaagttaacactgtagataccatttttcaccatgttcggttggttaata

SEQ ID NO: 370595 - DNA, 2842 bp, Homo sapiens
aacacgataaaggggacatgccgggagttgcagtaccctcaggaagaagtcattgtcatggacatggacccttttcttcactgtgtgatcccaaacttcatccaaagccaagacttcttagaagggcttcagaaggaactgatgaacttggacttccatgagaagtataatgatttatataagttccagcagtctgatgatttgaagaagagaagagagcctcacatctccactttaaggaaaattctgtttgaagatttccggtcctggctttctgatatttctaaaattgacctggaatcaaccattgacatgtcctgtgctaaatatgaattcactgatgccctgctgtgccatgatgatgagctggaagggcgccggattgccttcatcctgtacctggttcctccctgggacaggagcatgggtggtaccctggacctgtacagcattgatgaacactttcagccgaagcagattgtcaagtctcttatcccttcgtggaacaaactggttttctttgaagtatctcctgtgtcctttcaccaggtgtctgaagtgctgtctgaagaaaagtcacgtttgtctataagtggctggtttcatggtccatcattgactcggcctcccaactactttgaaccccccatacctcggagccctcacatcccacaagatcatgagattttgtatgattggatcaaccctacttatctggacatggattaccaagttcaaattcaagaagagtttgaagaaagttctgaaattctcctgaaggagtttcttaagcctgagaaattcacgaaagtctgtgaggccttggagcatggacatgtggaatggagcagccgaggtccccctaacaaaaggttttatgagaaagctgaggagagtaagcttcctgagatattgaaggagtgcatgaagttatttcgctctgaggcactattcttgctgctctccaacttcacaggcctgaagcttcatttcttggccccttcggaagaagatgagatgaatgataaaaaagaggcagaaaccactgatatcactgaagaagggactagccatagtcctcctgagccagagaataatcagatggccatcagcaacaacagccaacagagcaatgagcagacagacccagagccagaggaaaatgaaacaaagaaagaatcaagtgttcccatgtgccaaggggaactgaggcattggaagaccggtcactacactttaattcatgaccatagcaaggctgaatttgccctagacttaattctgtactgtggctgtgaaggctgggagccagaatatggcggttttacttcttacattgccaaaggtgaagatgaagagctgctaacagtgaatccagaaagcaattctttggcattggtctacagagacagagagactctgaaatttgtcaagcatattaaccaccgaagcctggaacaaaagaaaaccttcccaaacagaacaggtttctgggacttttcattcatctattatgaatgacagcactgggcaaagctgaacaaaaatgtgacccttcgtaattactgggaagtctgaaagagctaagcatggagtcaaggagaactacatggtagcttgcctgacagtgttcttaaaactggttgtcttttactaggactcataatgattgtcctcaaccgagaccttgagcttgcagctacgtacttatctcttgattaaaaaaaaaaagttggcttttttttttttaacatttagtcctttttccatattggcttcttcagtgaatttttaagttcaatttgtttttattgaggtaaaatatttataacataaaactgaccagcttacccatttttaaatatgcaattcagtggattaagtacattctcattgttgtccagccatcaccatcatccatctccagaagttttccatcttcccaaattctgtgcccattgaacaataactccccacctccccttcccctagcaacagccatactttttgtctctatcatcaacttcactactcatatttctcatgtaagtggaatcatacagtatttgtccttttgtgactggtttcacttagcataaagtctttaagatgcatccatgtttccagtgtttcggtttttttagaaaaactcatacgtgattgcagccgggcatggtggctcacgcctgtaatcccagcacttgggaggccaaggcaggcggatcacctgaggtcaggagttaaagaccagcctgacaaacatggagaaaccccatctctactaaaaatacaaaattagctgggcgtggtggcacatgcctgtaatcccagctactcaggaggctggggcaggagaattggttgaacccaggaggcggaggttgcagtgagccgagattgtgccactgcactccagcctgggcaacaagagtgaaactctgtctcaaaaaaaaaaaagaagaaaaaaacataagtgattgcagaattttgttcttctcataatttctggtttagaaaattatggagccttacatcctgatcatgctgggccttagaattctgacacagtgagtcatcacatttcctcccactgcctgtggccttgttccaccatgactctcacagtacagtgtaggcttagtgtagtattattcccttggaaagggtctggcctaccatcacatgccccaagaaacttctggttggtaaagaagataggctgcttattgccatgtgtagtcacttccaagtgcccactgcctttccatcctgcaattgtggcctgtgtataattaaatgattttagcctcaaaaaaaaaaaaaagtcgacgcggccgcgaat

SEQ ID NO: 370596 - DNA, 2345 bp, Homo sapiens
  misc_feature (2327)..(2327): n is a, c, g, or t
aacacgataaaggggacatgccgggagttgcagtaccctcaggaaggtagcgtcttgatctgcgtggcgtggttctgtgccttgggaagagatgaatgggaagcggccagcggagcccggcccagcccgggtgggaaaaaagggaaagaaggaggtgatggcggagttttcggacgctgttacggaagaaaccttgaaaaagcaggtggctgaggcctggagccgcaggacgccgttcagtcacgaagtcattgtcatggacatggacccttttcttcactgtgtgatcccaaacttcatccaaagccaagacttcttagaagggcttcagaaggaactgatgaacttggacttccatgagaagtataatgatttatataagttccagcagtctgatgatttgaagaagagaagagagcctcacatctccactttaaggaaaattctgtttgaagatttccggtcctggctttctgatatttctaaaattgacctggaatcaaccattgacatgtcctgtgctaaatatgaattcactgatgccctgctgtgccatgatgatgagctggaagggcgccggattgccttcatcctgtacctggttcctccctgggacaggagcatgggtggtaccctggacctgtacagcattgatgaacactttcagccgaagcagattgtcaagtctcttatcccttcgtggaacaaactggttttctttgaagtatctcctgtgtcctttcaccaggtgtctgaagtgctgtctgaagaaaagtcacgtttgtctataagtggctggtttcatggtccatcattgactcggcctcccaactactttgaaccccccatacctcggagccctcacatcccacaagatcatgagattttgtatgattggatcaaccctacttatctggacatggattaccaagttcaaattcaagaagagtttgaagaaagttctgaaattctcctgaaggagtttcttaagcctgagaaattcacgaaagtctgtgaggccttggagcatggacatgtggaatggagcagccgaggtccccctaacaaaaggttttatgagaaagctgaggagagtaagcttcctgagatattgaaggagtgcatgaagttatttcgctctgaggcactattcttgctgctctccaacttcacaggcctgaagcttcatttcttggccccttcggaagaagatgagatgaatgataaaaaagaggcagaaaccactgatatcactgaagaagggactagccatagtcctcctgagccagagaataatcagatggccatcagcaacaacagccaacagagcaatgagcagacagacccagagccagaggaaaatgaaacaaagaaagaatcaagtgttcccatgtgccaaggggaactgaggcattggaagaccggtcactacactttaattcatgaccatagcaaggctgaatttgccctagacttaattctgtactgtggctgtgaaggctgggagccagaatatggcggttttacttcttacattgccaaaggtgaagatgaagagctgctaacagtgaatccagaaagcaattctttggcattggtctacagagacagagagactctgaaatttgtcaagcatattaaccaccgaagcctggaacaaaagaaaaccttcccaaacagaacaggtttctgggacttttcattcatctattatgaatgacagcactgggcaaagctgaacaaaaatgtgacccttcgtaattactgggaagtctgaaagagctaagcatggagtcaaggagaactacatggtagcttgcctgacagtgttcttaaaactggttgtcttttactaggactcataatgattgtcctcaaccgagaccttgagcttgcagctacgtacttatctcttgattaaaaaaaaaaagttggcttttttttttttaacatttagtcctttttccatattggcttcttcagtgaatttttaagttcaatttgtttttattgaggtaaaatatttataacataaaactgaccagcttacccatttttaaatatgcaattcagtggattaagtacattctcattgttgtccagccatcaccatcatccatctccagaagttttccatcttcccaaattctgtgcccattgaacaataactccccacctccccttcccctagcaacagccatactttttgtctctatcatcaacttcactactcatatttctcatgtaagtggaatcatacagtatttgtccttttgtgactggtttcacttagcataaagtctttaagatgggtagattgcgtgttntaagatcctgcagatcat

SEQ ID NO: 370597 - DNA, 2468 bp, Homo sapiens
aaagggcccaatgggccttggtttaaaatagagcttgtttacccaaaatttaaccgggatttttaccaaaatttaacgcttccattttccattgccattcagggtggccattgtttgaaaggccgatcgtggggcctttttgctaattccccaccttgcgaaaaggggattttcttccaagggatttaatttgggaaacccagggtttttccaggtccgacggttttaaaccacggcccattgatttttaaacggccccctttaaggggaatttgcccaattagccccaattttgggcgcattcataaagctgccccagtctaaaagtggatgggcccaagcgggccaaaaggtttttttttttttttttttttttttttttttttttttttttttttttttttttttttttttttttttttttttttttttttttttttttttttttttttctaacgatcagcttttattctgtgagtcattttacatctgtggctttgatgaacaacttgacattgctgtttttcaggttttatgagaaagctgaggagagtaagcttcctgagatattgaaggagtgcatgaagttatttcgctctgaggcactattcttgctgctctccaacttcacaggcctgaagcttcatttcttggccccttcggaagaagatgagatgaatgataaaaaagaggcagaaaccactgatatcactgaagaagggactagccatagtcctcctgagccagagaataatcagatggccatcagcaacaacagccaacagagcaatgagcagacagacccagagccagaggaaaatgaaacaaagaaagaatcaagtgttcccatgtgccaaggggaactgaggcattggaagaccggtcactacactttaattcatgaccatagcaaggctgaatttgccctagacttaattctgtactgtggctgtgaaggctgggagccagaatatggcggttttacttcttacattgccaaaggtgaagatgaagagctgctaacagtgaatccagaaagcaattctttggcattggtctacagagacagagagactctgaaatttgtcaagcatattaaccaccgaagcctggaacaaaagaaaaccttcccaaacagaacaggtttctgggacttttcattcatctattatgaatgacagcactgggcaaagctgaacaaaaatgtgacccttcgtaattactgggaagtctgaaagagctaagcatggagtcaaggagaactacatggtagcttgcctgacagtgttcttaaaactggttgtcttttactaggactcataatgattgtcctcaaccgagaccttgagcttgcagctacgtacttatctcttgattaaaaaaaaaaagttggcttttttttttttaacatttagtcctttttccatattggcttcttcagtgaatttttaagttcaatttgtttttattgaggtaaaatatttataacataaaactgaccagcttacccatttttaaatatgcaattcagtggattaagtacattctcattgttgtccagccatcaccatcatccatctccagaagttttccatcttcccaaattctgtgcccattgaacaataactccccacctccccttcccctagcaacagccatactttttgtctctatcatcaacttcactactcatatttctcatgtaagtggaatcatacagtatttgtccttttgtgactggtttcacttagcataaagtctttaagatgcatccatgtttccagtgtttcggtttttttagaaaaactcatacgtgattgcagccgggcatggtggctcacgcctgtaatcccagcacttgggaggccaaggcaggcggatcacctgaggtcaggagttaaagaccagcctgacaaacatggagaaaccccatctctactaaaaatacaaaattagctgggcgtggtggcacatgcctgtaatcccagctactcaggaggctggggcaggagaattggttgaacccaggaggcggaggttgcagtgagccgagattgtgccactgcactccagcctgggcaacaagagtgaaactctgtctcaaaaaaaaaaaagaagaaaaaaacataagtgattgcagaattttgttcttctcataatttctggtttagaaaattatggagccttacatcctgatcatgctgggccttagaattctgacacagtgagtcatcacatttcctcccactgcctgtggccttgttccaccatgactctcacagtacagtgtaggcttagtgtagtattattcccttggaaagggtctggcctaccatcacatgccccaagaaacttctggttggtaaagaagataggctgcttattgccatgtgtagtcacttccaagtgcccactgcctttccatcctgcaattgtggcctgtgtataattaaatgattttagcctca

SEQ ID NO: 370598 - DNA, 841 bp, Homo sapiens
aacacgataaaggggacatgccgggagttgcagtaccctcaggaaggtagcgtcttgatctgcgtggcgtggttctgtgccttgggaagagatgaatgggaagcggccagcggagcccggcccagcccgggtgggaaaaaagggaaagaaggaggtgatggcggagttttcggacgctgttacggaagaaaccttgaaagtcattgtcatggacatggacccttttcttcactgtgtgatcccaaacttcatccaaagccaagacttcttagaagggcttcagaaggaactgatgaacttggacttccatgagaagtataatgatttatataagttccagcagtctgatgatttgaagaagagaagagagcctcacatctccactttaaggaaaattctgtttgaagatttccggtcctggctttctgatatttctaaaattgacctggaatcaaccattgacatgtcctgtgctaaatatgaattcactgatgccctgctgtgccatgatgatgagctggaagggcgccggattgccttcatcctgtacctggttcctccctgggacaggagcatgggtggtaccctggacctgtacagcattgatgaacactttcagccgaagcagattgtcaagtctcttatcccttcgtggaacaaactggttttctttgaagtatctcctgtgtcctttcaccaggtgtctgaagtgctgtctgaagaaaagtcacgtttgtctataagtggctggtttcatggtccatcattgactcggcctcccaactactttgaacccccactttgacctgttattaaagttcacattttgaaaaaaaaaaaa

SEQ ID NO: 370599 - DNA, 660 bp, Homo sapiens
cccagcggggtctggggaggggcaggcagggctgagccctgctgacctccccctgacctttcaaccctctctgattcccacaaaccctgctgacttgaccccattggcccagacccctgttccctgccactggatgagggctcctgcactgcctacaccctgcgctggtaccatcgggctgtgacaggcagcacagaggcctgtcacccttttgtctatggtggctgtggagggaatgccaaccgttttgggacccgtgaggcctgcgagcgccgctgcccaccccgggtggtccagagccaggggacaggtactgcccaggactgaggcccagataatgagctgagattcagcatcccctggaggagtcggggtctcagcagaaccccactgtccctccccttggtgctagaggcttgtgtgcacgtgagcgtgcgtgtgcacgtccgttatttcagtgacttggtcccgtgggtctagccttcccccctgtggacaaacccccattgtggctcctgccaccctggcagatgactcactgtgggggggtggctgtgggcagtgagcggatgtgactggcgtctgacccgccccttgacccaagcctgtgatgacatggtgctgattctggggggcattaaagctgctgttttaaaaggc

SEQ ID NO: 370600 - DNA, 240 bp, Homo sapiens
  misc_feature (19)..(19): n is a, c, g, or t
tgacacgcacgctcacgtnacacaagcctctagcaccaaggggagggacagtgggtctagccttcccccctgtggacaaacccccattgtggctcctgccaccctggcagatgactcactgtgggggggtggctgtgggcagtgagcggatgtgactggcgtctgacccgccccttgacccaagcctgtgatgacatggtgctgattctggggggcattaaagctgctgttttaaaaggc

SEQ ID NO: 370601 - DNA, 541 bp, Homo sapiens
cccagcggggtctggggaggggcaggcagggctgagccctgctgacctccccctgacctttcaaccctctctgattcccacaaaccctgctgacttgaccccattggcccagacccctgttccctgccactggatgagggctcctgcactgcctacaccctgcgctggtaccatcgggctgtgacaggcagcacagaggcctgtcacccttttgtctatggtggctgtggagggaatgccaaccgttttgggacccgtgaggcctgcgagcgccgctgcccaccccgggtggtccagagccaggggacagcctgacctcacgatgaccaggtgtgctctgctgttgctgatggtcctgatgttgggcagagtcctggttgtcccagtgacccctatcccaaccttccagctccgccctcagaattctccccagaccactccccgacctgcggcctcagagagcccctcagctgctcccacatggccgtgggctgcccagagccactgcagccccacccgccaccctggctcgcgcattgtc

SEQ ID NO: 370602 - DNA, 9520 bp, Homo sapiens
gcaacaccaggactcgggctggaggggcgctgggctcggacctgccaaggccaccgcaggggggagcaagggacagaggcgggggtcctagctgacggcttttactgcctaggatgacgctgcggcttctggtggccgcgctctgcgccgggatcctggcagaggcgccccgagtgcgagcccagcacagggagagagtgacctgcacgcgcctttacgccgctgacattgtgttcttactggatggctcctcatccattggccgcagcaatttccgcgaggtccgcagctttctcgaagggctggtgctgcctttctctggagcagccagtgcacagggtgtgcgctttgccacagtgcagtacagcgatgacccacggacagagttcggcctggatgcacttggctctgggggtgatgtgatccgcgccatccgtgagcttagctacaaggggggcaacactcgcacaggggctgcaattctccatgtggctgaccatgtcttcctgccccagctggcccgacctggtgtccccaaggtctgcatcctgatcacagacgggaagtcccaggacctggtggacacagctgcccaaaggctgaaggggcagggggtcaagctatttgctgtggggatcaagaatgctgaccctgaggagctgaagcgagttgcctcacagccaacctccgacttcttcttcttcgtcaatgacttcagcatcttgaggacactactgcccctcgtttcccggagagtgtgcacgactgctggtggcgtgcctgtgacccgacctccggatgactcgacctctgctccacgagacctggtgctgtctgagccaagcagccaatccttgagagtacagtggacagcggccagtggccctgtgactggctacaaggtccagtacactcctctgacggggctgggacagccactgccgagtgagcggcaggaggtgaacgtcccagctggtgagaccagtgtgcggctgcggggtctccggccactgaccgagtaccaagtgactgtgattgccctctacgccaacagcatcggggaggctgtgagcgggacagctcggaccactgccctagaagggccggaactgaccatccagaataccacagcccacagcctcctggtggcctggcggagtgtgccaggtgccactggctaccgtgtgacatggcgggtcctcagtggtgggcccacacagcagcaggagctgggccctgggcagggttcagtgttgctgcgtgacttggagcctggcacggactatgaggtgaccgtgagcaccctatttggccgcagtgtggggcccgccacttccctgatggctcgcactgacgcttctgttgagcagaccctgcgcccggtcatcctgggccccacatccatcctcctttcctggaacttggtgcctgaggcccgtggctaccggttggaatggcggcgtgagactggcttggagccaccgcagaaggtggtactgccctctgatgtgacccgctaccagttggatgggctgcagccgggcactgagtaccgcctcacactctacactctgctggagggccacgaggtggccacccctgcaaccgtggttcccactggaccagagctgcctgtgagccctgtaacagacctgcaagccaccgagctgcccgggcagcgggtgcgagtgtcctggagcccagtccctggtgccacccagtaccgcatcattgtgcgcagcacccagggggttgagcggaccctggtgcttcctgggagtcagacagcattcgacttggatgacgttcaggctgggcttagctacactgtgcgggtgtctgctcgagtgggtccccgtgagggcagtgccagtgtcctcactgtccgccgggagccggaaactccacttgctgttccagggctgcgggttgtggtgtcagatgcaacgcgagtgagggtggcctggggacccgtccctggagccagtggatttcggattagctggagcacaggcagtggtccggagtccagccagacactgcccccagactctactgccacagacatcacagggctgcagcctggaaccacctaccaggtggctgtgtcggtactgcgaggcagagaggagggccctgctgcagtcatcgtggctcgaacggacccactgggcccagtgaggacggtccatgtgactcaggccagcagctcatctgtcaccattacctggaccagggttcctggcgccacaggatacagggtttcctggcactcagcccacggcccagagaaatcccagttggtttctggggaggccacggtggctgagctggatggactggagccagatactgagtatacggtgcatgtgagggcccatgtggctggcgtggatgggccccctgcctctgtggttgtgaggactgcccctgagcctgtgggtcgtgtgtcgaggctgcagatcctcaatgcttccagcgacgttctacggatcacctgggtaggggtcactggagccacagcttacagactggcctggggccggagtgaaggcggccccatgaggcaccagatactcccaggaaacacagactctgcagagatccggggtctcgaaggtggagtcagctactcagtgcgagtgactgcacttgtcggggaccgcgagggcacacctgtctccattgttgtcactacgccgcctgaggctccgccagccctggggacgcttcacgtggtgcagcgcggggagcactcgctgaggctgcgctgggagccggtgcccagagcgcagggcttccttctgcactggcaacctgagggtggccaggaacagtcccgggtcctggggcccgagctcagcagctatcacctggacgggctggagccagcgacacagtaccgcgtgaggctgagtgtcctagggccggctggagaagggccctctgcagaggtgactgcgcgcactgagtcacctcgtgttccaagcattgaactacgtgtggtggacacctcgatcgactcggtgactttggcctggactccagtgtccagggcatccagctacatcctatcctggcggccactcagaggccctggccaggaagtgcctgggtccccgcagacacttccagggatctcaagctcccagcgggtgacagggctagagcctggcgtctcttacatcttctccctgacgcctgtcctggatggtgtgcggggtcctgaggcatctgtcacacagacgccagtgtgcccccgtggcctggcggatgtggtgttcctaccacatgccactcaagacaatgctcaccgtgcggaggctacgaggagggtcctggagcgtctggtgttggcacttgggcctcttgggccacaggcagttcaggttggcctgctgtcttacagtcatcggccctccccactgttcccactgaatggctcccatgaccttggcattatcttgcaaaggatccgtgacatgccctacatggacccaagtgggaacaacctgggcacagccgtggtcacagctcacagatacatgttggcaccagatgctcctgggcgccgccagcacgtaccaggggtgatggttctgctagtggatgaacccttgagaggtgacatattcagccccatccgtgaggcccaggcttctgggcttaatgtggtgatgttgggaatggctggagcggacccagagcagctgcgtcgcttggcgccgggtatggactctgtccagaccttcttcgccgtggatgatgggccaagcctggaccaggcagtcagtggtctggccacagccctgtgtcaggcatccttcactactcagccccggccagagccctgcccagtgtattgtccaaagggccagaagggggaacctggagagatgggcctgagaggacaagttgggcctcctggcgaccctggcctcccgggcaggaccggtgctcccggcccccaggggccccctggaagtgccactgccaagggcgagaggggcttccctggagcagatgggcgtccaggcagccctggccgcgccgggaatcctgggacccctggagcccctggcctaaagggctctccagggttgcctggccctcgtggggacccgggagagcgaggacctcgaggcccaaagggggagccgggggctcccggacaagtcatcggaggtgaaggacctgggcttcctgggcggaaaggggaccctggaccatcgggcccccctggacctcgtggaccactgggggacccaggaccccgtggccccccagggcttcctggaacagccatgaagggtgacaaaggcgatcgtggggagcggggtccccctggaccaggtgaaggtggcattgctcctggggagcctgggctgccgggtcttcccggaagccctggaccccaaggccccgttggcccccctggaaagaaaggagaaaaaggtgactctgaggatggagctccaggcctcccaggacaacctgggtctccgggtgagcagggcccacggggacctcctggagctattggccccaaaggtgaccggggctttccagggcccctgggtgaggctggagagaagggcgaacgtggacccccaggcccagcgggatcccgggggctgccaggggttgctggacgtcctggagccaagggtcctgaagggccaccaggacccactggccgccaaggagagaagggggagcctggtcgccctggggaccctgcagtggtgggacctgctgttgctggacccaaaggagaaaagggagatgtggggcccgctgggcccagaggagctaccggagtccaaggggaacggggcccacccggcttggttcttcctggagaccctggccccaagggagaccctggagaccggggtcccattggccttactggcagagcaggacccccaggtgactcagggcctcctggagagaagggagaccctgggcggcctggccccccaggacctgttggcccccgaggacgagatggtgaagttggagagaaaggtgacgagggtcctccgggtgacccgggtttgcctggaaaagcaggcgagcgtggccttcggggggcacctggagttcgggggcctgtgggtgaaaagggagaccagggagatcctggagaggatggacgaaatggcagccctggatcatctggacccaagggtgaccgtggggagccgggtcccccaggacccccgggacggctggtagacacaggacctggagccagagagaagggagagcctggggaccgcggacaagagggtcctcgagggcccaagggtgatcctggcctccctggagcccctggggaaaggggcattgaagggtttcggggacccccaggcccacagggggacccaggtgtccgaggcccagcaggagaaaagggtgaccggggtccccctgggctggatggccggagcggactggatgggaaaccaggagccgctgggccctctgggccgaatggtgctgcaggcaaagctggggacccagggagagacgggcttccaggcctccgtggagaacaaggcctccctggcccctctggtccccctggattaccgggaaagccaggcgaggatgggaaacctggcctgaatggaaaaaacggagaacctggggaccctggagaagacgggaggaagggagagaaaggagattcaggcgcctctgggagagaaggtcgtgatggccccaagggtgagcgtggagctcctggtatccttggaccccaggggcctccaggcctcccagggccagtgggccctcctggccagggttttcctggtgtcccaggaggcacgggccccaagggtgaccgtggggagactggatccaaaggggagcagggcctccctggagagcgtggcctgcgaggagagcctggaagtgtgccgaatgtggatcggttgctggaaactgctggcatcaaggcatctgccctgcgggagatcgtggagacctgggatgagagctctggtagcttcctgcctgtgcccgaacggcgtcgaggccccaagggggactcaggcgaacagggccccccaggcaaggagggccccatcggctttcctggagaacgcgggctgaagggcgaccgtggagaccctggccctcaggggccacctggtctggcccttggggagaggggcccccccgggccttccggccttgccggggagcctggaaagcctggtattcccgggctcccaggcagggctgggggtgtgggagaggcaggaaggccaggagagaggggagaacggggagagaaaggagaacgtggagaacagggcagagatggccctcctggactccctggaacccctgggccccccggaccccctggccccaaggtgtctgtggatgagccaggtcctggactctctggagaacagggaccccctggactcaagggtgctaagggggagccgggcagcaatggtgaccaaggtcccaaaggagacaggggtgtgccaggcatcaaaggagaccggggagagcctggaccgaggggtcaggacggcaacccgggtctaccaggagagcgtggtatggctgggcctgaagggaagccgggtctgcagggtccaagaggcccccctggcccagtgggtggtcatggagaccctggaccacctggtgccccgggtcttgctggccctgcaggaccccaaggaccttctggcctgaagggggagcctggagagacaggacctccaggacggggcctgactggacctactggagctgtgggacttcctggaccccccggcccttcaggccttgtgggtccacaggggtctccaggtttgcctggacaagtgggggagacagggaagccgggagccccaggtcgagatggtgccagtggaaaagatggagacagagggagccctggtgtgccagggtcaccaggtctgcctggccctgtcggacctaaaggagaacctggccccacgggggcccctggacaggctgtggtcgggctccctggagcaaagggagagaagggagcccctggaggccttgctggagacctggtgggtgagccgggagccaaaggtgaccgaggactgccagggccgcgaggcgagaagggtgaagctggccgtgcaggggagcccggagaccctggggaagatggtcagaaaggggctccaggacccaaaggtttcaaggtatgtgtacccagaagggtccctgctggggtcctggtcgtgagatccctgagcttgatccgatgcctcttttcctcaaagggtgacccaggagtcggggtcccgggctcccctgggcctcctggccctccaggtgtgaagggagatctgggcctccctggcctgcccggtgctcctggtgttgttgggttcccgggtcagacaggccctcgaggagagatgggtcagccaggccctagtggagagcggggtctggcaggccccccagggagagaaggaatcccaggacccctggggccacctggaccaccggggtcagtgggaccacctggggcctctggactcaaaggagacaagggagaccctggagtagggctgcctgggccccgaggcgagcgtggggagccaggcatccgggtacgtatgtcttactccacagccgaactcccttcatcccagctcttgcctctgatttccaacctctgagtcaatgaacctaatgtcaccatccagggtgaagatggccgccccggccaggagggaccccgaggactcacggggccccctggcagcaggggagagcgtggggagaagggtgatgttgggagtgcaggactaaagggtgacaagggagactcagctgtgatcctggggcctccaggcccacggggtgccaagggggacatgggtgaacgagggcctcggggcttggatggtgacaaaggacctcggggagacaatggggaccctggtgacaagggcagcaagggagagcctggtgacaagggctcagccgggttgccaggactgcgtggactcctgggaccccagggtcaacctggtgcagcagggatccctggtgacccgggcgattctctttggtccctcactgacctcctctgacctcacatggaccctctccctgctagggatccccaggaaaggatggagtgcctggtatccgaggagaaaaaggagatgttggcttcatgggtccccggggcctcaagggtgaacggggagtgaagggagcctgtggccttgatggagagaagggagacaagggagaagctggtcccccaggccgccccgggctggcaggacacaaaggagagatgggggagcctggtgtgccgggccagtcgggggcccctggcaaggagggcctgatcggtcccaagggtgaccgaggctttgacgggcagccaggccccaagggtgaccagggcgagaaaggggagcggggaaccccaggaattgggggcttcccaggccccagtggaaatgatggctctgctggtcccccagggccacctggcagtgttggtcccagaggccccgaaggacttcagggccagaagggtgagcgaggtccccccggagagagagtggtgggggctcctggggtccctggagctcctggcgagagaggggagcaggggcggccagggcctgccggtcctcgaggcgagaagggagaagctgcactgacggaggatgacatccggggctttgtgcgccaagagatgagtcagcactgtgcctgccagggccagttcatcgcatctggatcacgacccctccctagttatgctgcagacactgccggctcccagctccatgctgtgcctgtgctccgcgtctctcatgcagaggaggaagagcgggtaccccctgaggatgatgagtactctgaatactccgagtattctgtggaggagtaccaggaccctgaagctccttgggatagtgatgacccctgttccctgccactggatgagggctcctgcactgcctacaccctgcgctggtaccatcgggctgtgacaggcagcacagaggcctgtcacccttttgtctatggtggctgtggagggaatgccaaccgttttgggacccgtgaggcctgcgagcgccgctgcccaccccgggtggtccagagccaggggacaggtactgcccaggactgaggcccagataatgagctgagattcagcatcccctggaggagtcggggtctcagcagaaccccactgtccctccccttggtgctagaggcttgtgtgcacgtgagcgtgcgtgtgcacgtccgttatttcagtgacttggtcccgtgggtctagccttcccccctgtggacaaacccccattgtggctcctgccaccctggcagatgactcactgtgggggggtggctgtgggcagtgagcggatgtgactggcgtctgacccgccccttgacccaagcctgtgatgacatggtgctgattctggggggcattaaagctgctgttttaaaaggc

SEQ ID NO: 370603 - DNA, 9189 bp, Homo sapiens
gcaacaccaggactcgggctggaggggcgctgggctcggacctgccaaggccaccgcaggggggagcaagggacagaggcgggggtcctagctgacggcttttactgcctaggatgacgctgcggcttctggtggccgcgctctgcgccgggatcctggcagaggcgccccgagtgcgagcccagcacagggagagagtgacctgcacgcgcctttacgccgctgacattgtgttcttactggatggctcctcatccattggccgcagcaatttccgcgaggtccgcagctttctcgaagggctggtgctgcctttctctggagcagccagtgcacagggtgtgcgctttgccacagtgcagtacagcgatgacccacggacagagttcggcctggatgcacttggctctgggggtgatgtgatccgcgccatccgtgagcttagctacaaggggggcaacactcgcacaggggctgcaattctccatgtggctgaccatgtcttcctgccccagctggcccgacctggtgtccccaaggtctgcatcctgatcacagacgggaagtcccaggacctggtggacacagctgcccaaaggctgaaggggcagggggtcaagctatttgctgtggggatcaagaatgctgaccctgaggagctgaagcgagttgcctcacagccaacctccgacttcttcttcttcgtcaatgacttcagcatcttgaggacactactgcccctcgtttcccggagagtgtgcacgactgctggtggcgtgcctgtgacccgacctccggatgactcgacctctgctccacgagacctggtgctgtctgagccaagcagccaatccttgagagtacagtggacagcggccagtggccctgtgactggctacaaggtccagtacactcctctgacggggctgggacagccactgccgagtgagcggcaggaggtgaacgtcccagctggtgagaccagtgtgcggctgcggggtctccggccactgaccgagtaccaagtgactgtgattgccctctacgccaacagcatcggggaggctgtgagcgggacagctcggaccactgccctagaagggccggaactgaccatccagaataccacagcccacagcctcctggtggcctggcggagtgtgccaggtgccactggctaccgtgtgacatggcgggtcctcagtggtgggcccacacagcagcaggagctgggccctgggcagggttcagtgttgctgcgtgacttggagcctggcacggactatgaggtgaccgtgagcaccctatttggccgcagtgtggggcccgccacttccctgatggctcgcactgacgcttctgttgagcagaccctgcgcccggtcatcctgggccccacatccatcctcctttcctggaacttggtgcctgaggcccgtggctaccggttggaatggcggcgtgagactggcttggagccaccgcagaaggtggtactgccctctgatgtgacccgctaccagttggatgggctgcagccgggcactgagtaccgcctcacactctacactctgctggagggccacgaggtggccacccctgcaaccgtggttcccactggaccagagctgcctgtgagccctgtaacagacctgcaagccaccgagctgcccgggcagcgggtgcgagtgtcctggagcccagtccctggtgccacccagtaccgcatcattgtgcgcagcacccagggggttgagcggaccctggtgcttcctgggagtcagacagcattcgacttggatgacgttcaggctgggcttagctacactgtgcgggtgtctgctcgagtgggtccccgtgagggcagtgccagtgtcctcactgtccgccgggagccggaaactccacttgctgttccagggctgcgggttgtggtgtcagatgcaacgcgagtgagggtggcctggggacccgtccctggagccagtggatttcggattagctggagcacaggcagtggtccggagtccagccagacactgcccccagactctactgccacagacatcacagggctgcagcctggaaccacctaccaggtggctgtgtcggtactgcgaggcagagaggagggccctgctgcagtcatcgtggctcgaacggacccactgggcccagtgaggacggtccatgtgactcaggccagcagctcatctgtcaccattacctggaccagggttcctggcgccacaggatacagggtttcctggcactcagcccacggcccagagaaatcccagttggtttctggggaggccacggtggctgagctggatggactggagccagatactgagtatacggtgcatgtgagggcccatgtggctggcgtggatgggccccctgcctctgtggttgtgaggactgcccctgagcctgtgggtcgtgtgtcgaggctgcagatcctcaatgcttccagcgacgttctacggatcacctgggtaggggtcactggagccacagcttacagactggcctggggccggagtgaaggcggccccatgaggcaccagatactcccaggaaacacagactctgcagagatccggggtctcgaaggtggagtcagctactcagtgcgagtgactgcacttgtcggggaccgcgagggcacacctgtctccattgttgtcactacgccgcctgaggctccgccagccctggggacgcttcacgtggtgcagcgcggggagcactcgctgaggctgcgctgggagccggtgcccagagcgcagggcttccttctgcactggcaacctgagggtggccaggaacagtcccgggtcctggggcccgagctcagcagctatcacctggacgggctggagccagcgacacagtaccgcgtgaggctgagtgtcctagggccggctggagaagggccctctgcagaggtgactgcgcgcactgagtcacctcgtgttccaagcattgaactacgtgtggtggacacctcgatcgactcggtgactttggcctggactccagtgtccagggcatccagctacatcctatcctggcggccactcagaggccctggccaggaagtgcctgggtccccgcagacacttccagggatctcaagctcccagcgggtgacagggctagagcctggcgtctcttacatcttctccctgacgcctgtcctggatggtgtgcggggtcctgaggcatctgtcacacagacgccagtgtgcccccgtggcctggcggatgtggtgttcctaccacatgccactcaagacaatgctcaccgtgcggaggctacgaggagggtcctggagcgtctggtgttggcacttgggcctcttgggccacaggcagttcaggttggcctgctgtcttacagtcatcggccctccccactgttcccactgaatggctcccatgaccttggcattatcttgcaaaggatccgtgacatgccctacatggacccaagtgggaacaacctgggcacagccgtggtcacagctcacagatacatgttggcaccagatgctcctgggcgccgccagcacgtaccaggggtgatggttctgctagtggatgaacccttgagaggtgacatattcagccccatccgtgaggcccaggcttctgggcttaatgtggtgatgttgggaatggctggagcggacccagagcagctgcgtcgcttggcgccgggtatggactctgtccagaccttcttcgccgtggatgatgggccaagcctggaccaggcagtcagtggtctggccacagccctgtgtcaggcatccttcactactcagccccggccagagccctgcccagtgtattgtccaaagggccagaagggggaacctggagagatgggcctgagaggacaagttgggcctcctggcgaccctggcctcccgggcaggaccggtgctcccggcccccaggggccccctggaagtgccactgccaagggcgagaggggcttccctggagcagatgggcgtccaggcagccctggccgcgccgggaatcctgggacccctggagcccctggcctaaagggctctccagggttgcctggccctcgtggggacccgggagagcgaggacctcgaggcccaaagggggagccgggggctcccggacaagtcatcggaggtgaaggacctgggcttcctgggcggaaaggggaccctggaccatcgggcccccctggacctcgtggaccactgggggacccaggaccccgtggccccccagggcttcctggaacagccatgaagggtgacaaaggcgatcgtggggagcggggtccccctggaccaggtgaaggtggcattgctcctggggagcctgggctgccgggtcttcccggaagccctggaccccaaggccccgttggcccccctggaaagaaaggagaaaaaggtgactctgaggatggagctccaggcctcccaggacaacctgggtctccgggtgagcagggcccacggggacctcctggagctattggccccaaaggtgaccggggctttccagggcccctgggtgaggctggagagaagggcgaacgtggacccccaggcccagcgggatcccgggggctgccaggggttgctggacgtcctggagccaagggtcctgaagggccaccaggacccactggccgccaaggagagaagggggagcctggtcgccctggggaccctgcagtggtgggacctgctgttgctggacccaaaggagaaaagggagatgtggggcccgctgggcccagaggagctaccggagtccaaggggaacggggcccacccggcttggttcttcctggagaccctggccccaagggagaccctggagaccggggtcccattggccttactggcagagcaggacccccaggtgactcagggcctcctggagagaagggagaccctgggcggcctggccccccaggacctgttggcccccgaggacgagatggtgaagttggagagaaaggtgacgagggtcctccgggtgacccgggtttgcctggaaaagcaggcgagcgtggccttcggggggcacctggagttcgggggcctgtgggtgaaaagggagaccagggagatcctggagaggatggacgaaatggcagccctggatcatctggacccaagggtgaccgtggggagccgggtcccccaggacccccgggacggctggtagacacaggacctggagccagagagaagggagagcctggggaccgcggacaagagggtcctcgagggcccaagggtgatcctggcctccctggagcccctggggaaaggggcattgaagggtttcggggacccccaggcccacagggggacccaggtgtccgaggcccagcaggagaaaagggtgaccggggtccccctgggctggatggccggagcggactggatgggaaaccaggagccgctgggccctctgggccgaatggtgctgcaggcaaagctggggacccagggagagacgggcttccaggcctccgtggagaacaaggcctccctggcccctctggtccccctggattaccgggaaagccaggcgaggatgggaaacctggcctgaatggaaaaaacggagaacctggggaccctggagaagacgggaggaagggagagaaaggagattcaggcgcctctgggagagaaggtcgtgatggccccaagggtgagcgtggagctcctggtatccttggaccccaggggcctccaggcctcccagggccagtgggccctcctggccagggttttcctggtgtcccaggaggcacgggccccaagggtgaccgtggggagactggatccaaaggggagcagggcctccctggagagcgtggcctgcgaggagagcctggaagtgtgccgaatgtggatcggttgctggaaactgctggcatcaaggcatctgccctgcgggagatcgtggagacctgggatgagagctctggtagcttcctgcctgtgcccgaacggcgtcgaggccccaagggggactcaggcgaacagggccccccaggcaaggagggccccatcggctttcctggagaacgcgggctgaagggcgaccgtggagaccctggccctcaggggccacctggtctggcccttggggagaggggcccccccgggccttccggccttgccggggagcctggaaagcctggtattcccgggctcccaggcagggctgggggtgtgggagaggcaggaaggccaggagagaggggagaacggggagagaaaggagaacgtggagaacagggcagagatggccctcctggactccctggaacccctgggccccccggaccccctggccccaaggtgtctgtggatgagccaggtcctggactctctggagaacagggaccccctggactcaagggtgctaagggggagccgggcagcaatggtgaccaaggtcccaaaggagacaggggtgtgccaggcatcaaaggagaccggggagagcctggaccgaggggtcaggacggcaacccgggtctaccaggagagcgtggtatggctgggcctgaagggaagccgggtctgcagggtccaagaggcccccctggcccagtgggtggtcatggagaccctggaccacctggtgccccgggtcttgctggccctgcaggaccccaaggaccttctggcctgaagggggagcctggagagacaggacctccaggacggggcctgactggacctactggagctgtgggacttcctggaccccccggcccttcaggccttgtgggtccacaggggtctccaggtttgcctggacaagtgggggagacagggaagccgggagccccaggtcgagatggtgccagtggaaaagatggagacagagggagccctggtgtgccagggtcaccaggtctgcctggccctgtcggacctaaaggagaacctggccccacgggggcccctggacaggctgtggtcgggctccctggagcaaagggagagaagggagcccctggaggccttgctggagacctggtgggtgagccgggagccaaaggtgaccgaggactgccagggccgcgaggcgagaagggtgaagctggccgtgcaggggagcccggagaccctggggaagatggtcagaaaggggctccaggacccaaaggtttcaaggtatgtgtacccagaagggtccctgctggggtcctggtcgtgagatccctgagcttgatccgatgcctcttttcctcaaagggtgacccaggagtcggggtcccgggctcccctgggcctcctggccctccaggtgtgaagggagatctgggcctccctggcctgcccggtgctcctggtgttgttgggttcccgggtcagacaggccctcgaggagagatgggtcagccaggccctagtggagagcggggtctggcaggccccccagggagagaaggaatcccaggacccctggggccacctggaccaccggggtcagtgggaccacctggggcctctggactcaaaggagacaagggagaccctggagtagggctgcctgggccccgaggcgagcgtggggagccaggcatccgggtacgtatgtcttactccacagccgaactcccttcatcccagctcttgcctctgatttccaacctctgagtcaatgaacctaatgtcaccatccagggtgaagatggccgccccggccaggagggaccccgaggactcacggggccccctggcagcaggggagagcgtggggagaagggtgatgttgggagtgcaggactaaagggtgacaagggagactcagctgtgatcctggggcctccaggcccacggggtgccaagggggacatgggtgaacgagggcctcggggcttggatggtgacaaaggacctcggggagacaatggggaccctggtgacaagggcagcaagggagagcctggtgacaagggctcagccgggttgccaggactgcgtggactcctgggaccccagggtcaacctggtgcagcagggatccctggtgacccgggcgattctctttggtccctcactgacctcctctgacctcacatggaccctctccctgctagggatccccaggaaaggatggagtgcctggtatccgaggagaaaaaggagatgttggcttcatgggtccccggggcctcaagggtgaacggggagtgaagggagcctgtggccttgatggagagaagggagacaaggggctcctggggtccctggagctcctggcgagagaggggagcaggggcggccagggcctgccggtcctcgaggcgagaagggagaagctgcactgacggaggatgacatccggggctttgtgcgccaagagatgagtcagcactgtgcctgccagggccagttcatcgcatctggatcacgacccctccctagttatgctgcagacactgccggctcccagctccatgctgtgcctgtgctccgcgtctctcatgcagaggaggaagagcgggtaccccctgaggatgatgagtactctgaatactccgagtattctgtggaggagtaccaggaccctgaagctccttgggatagtgatgacccctgttccctgccactggatgagggctcctgcactgcctacaccctgcgctggtaccatcgggctgtgacaggcagcacagaggcctgtcacccttttgtctatggtggctgtggagggaatgccaaccgttttgggacccgtgaggcctgcgagcgccgctgcccaccccgggtggtccagagccaggggacaggtactgcccaggactgaggcccagataatgagctgagattcagcatcccctggaggagtcggggtctcagcagaaccccactgtccctccccttggtgctagaggcttgtgtgcacgtgagcgtgcgtgtgcacgtccgttatttcagtgacttggtcccgtgggtctagccttcccccctgtggacaaacccccattgtggctcctgccaccctggcagatgactcactgtgggggggtggctgtgggcagtgagcggatgtgactggcgtctgacccgccccttgacccaagcctgtgatgacatggtgctgattctggggggcattaaagctgctgttttaaaaggc

SEQ ID NO: 370604 - DNA, 7793 bp, Homo sapiens
gcaacaccaggactcgggctggaggggcgctgggctcggacctgccaaggccaccgcaggggggagcaagggacagaggcgggggtcctagctgacggcttttactgcctaggatgacgctgcggcttctggtggccgcgctctgcgccgggatcctggcagaggcgccccgagtgcgagcccagcacagggagagagtgacctgcacgcgcctttacgccgctgacattgtgttcttactggatggctcctcatccattggccgcagcaatttccgcgaggtccgcagctttctcgaagggctggtgctgcctttctctggagcagccagtgcacagggtgtgcgctttgccacagtgcagtacagcgatgacccacggacagagttcggcctggatgcacttggctctgggggtgatgtgatccgcgccatccgtgagcttagctacaaggggggcaacactcgcacaggggctgcaattctccatgtggctgaccatgtcttcctgccccagctggcccgacctggtgtccccaaggtctgcatcctgatcacagacgggaagtcccaggacctggtggacacagctgcccaaaggctgaaggggcagggggtcaagctatttgctgtggggatcaagaatgctgaccctgaggagctgaagcgagttgcctcacagccaacctccgacttcttcttcttcgtcaatgacttcagcatcttgaggacactactgcccctcgtttcccggagagtgtgcacgactgctggtggcgtgcctgtgacccgacctccggatgactcgacctctgctccacgagacctggtgctgtctgagccaagcagccaatccttgagagtacagtggacagcggccagtggccctgtgactggctacaaggtccagtacactcctctgacggggctgggacagccactgccgagtgagcggcaggaggtgaacgtcccagctggtgagaccagtgtgcggctgcggggtctccggccactgaccgagtaccaagtgactgtgattgccctctacgccaacagcatcggggaggctgtgagcgggacagctcggaccactgccctagaagggccggaactgaccatccagaataccacagcccacagcctcctggtggcctggcggagtgtgccaggtgccactggctaccgtgtgacatggcgggtcctcagtggtgggcccacacagcagcaggagctgggccctgggcagggttcagtgttgctgcgtgacttggagcctggcacggactatgaggtgaccgtgagcaccctatttggccgcagtgtggggcccgccacttccctgatggctcgcactgacgcttctgttgagcagaccctgcgcccggtcatcctgggccccacatccatcctcctttcctggaacttggtgcctgaggcccgtggctaccggttggaatggcggcgtgagactggcttggagccaccgcagaaggtggtactgccctctgatgtgacccgctaccagttggatgggctgcagccgggcactgagtaccgcctcacactctacactctgctggagggccacgaggtggccacccctgcaaccgtggttcccactggaccagagctgcctgtgagccctgtaacagacctgcaagccaccgagctgcccgggcagcgggtgcgagtgtcctggagcccagtccctggtgccacccagtaccgcatcattgtgcgcagcacccagggggttgagcggaccctggtgcttcctgggagtcagacagcattcgacttggatgacgttcaggctgggcttagctacactgtgcgggtgtctgctcgagtgggtccccgtgagggcagtgccagtgtcctcactgtccgccgggagccggaaactccacttgctgttccagggctgcgggttgtggtgtcagatgcaacgcgagtgagggtggcctggggacccgtccctggagccagtggatttcggattagctggagcacaggcagtggtccggagtccagccagacactgcccccagactctactgccacagacatcacagggctgcagcctggaaccacctaccaggtggctgtgtcggtactgcgaggcagagaggagggccctgctgcagtcatcgtggctcgaacggacccactgggcccagtgaggacggtccatgtgactcaggccagcagctcatctgtcaccattacctggaccagggttcctggcgccacaggatacagggtttcctggcactcagcccacggcccagagaaatcccagttggtttctggggaggccacggtggctgagctggatggactggagccagatactgagtatacggtgcatgtgagggcccatgtggctggcgtggatgggccccctgcctctgtggttgtgaggactgcccctgagcctgtgggtcgtgtgtcgaggctgcagatcctcaatgcttccagcgacgttctacggatcacctgggtaggggtcactggagccacagcttacagactggcctggggccggagtgaaggcggccccatgaggcaccagatactcccaggaaacacagactctgcagagatccggggtctcgaaggtggagtcagctactcagtgcgagtgactgcacttgtcggggaccgcgagggcacacctgtctccattgttgtcactacgccgcctgaggctccgccagccctggggacgcttcacgtggtgcagcgcggggagcactcgctgaggctgcgctgggagccggtgcccagagcgcagggcttccttctgcactggcaacctgagggtggccaggaacagtcccgggtcctggggcccgagctcagcagctatcacctggacgggctggagccagcgacacagtaccgcgtgaggctgagtgtcctagggccggctggagaagggccctctgcagaggtgactgcgcgcactgagtcacctcgtgttccaagcattgaactacgtgtggtggacacctcgatcgactcggtgactttggcctggactccagtgtccagggcatccagctacatcctatcctggcggccactcagaggccctggccaggaagtgcctgggtccccgcagacacttccagggatctcaagctcccagcgggtgacagggctagagcctggcgtctcttacatcttctccctgacgcctgtcctggatggtgtgcggggtcctgaggcatctgtcacacagacgccagtgtgcccccgtggcctggcggatgtggtgttcctaccacatgccactcaagacaatgctcaccgtgcggaggctacgaggagggtcctggagcgtctggtgttggcacttgggcctcttgggccacaggcagttcaggttggcctgctgtcttacagtcatcggccctccccactgttcccactgaatggctcccatgaccttggcattatcttgcaaaggatccgtgacatgccctacatggacccaagtgggaacaacctgggcacagccgtggtcacagctcacagatacatgttggcaccagatgctcctgggcgccgccagcacgtaccaggggtgatggttctgctagtggatgaacccttgagaggtgacatattcagccccatccgtgaggcccaggcttctgggcttaatgtggtgatgttgggaatggctggagcggacccagagcagctgcgtcgcttggcgccgggtatggactctgtccagaccttcttcgccgtggatgatgggccaagcctggaccaggcagtcagtggtctggccacagccctgtgtcaggcatccttcactactcagccccggccagagccctgcccagtgtattgtccaaagggccagaagggggaacctggagagatgggcctgagaggacaagttgggcctcctggcgaccctggcctcccgggcaggaccggtgctcccggcccccaggggccccctggaagtgccactgccaagggcgagaggggcttccctggagcagatgggcgtccaggcagccctggccgcgccgggaatcctgggacccctggagcccctggcctaaagggctctccagggttgcctggccctcgtggggacccgggagagcgaggacctcgaggcccaaagggggagccgggggctcccggacaagtcatcggaggtgaaggacctgggcttcctgggcggaaaggggaccctggaccatcgggcccccctggacctcgtggaccactgggggacccaggaccccgtggccccccagggcttcctggaacagccatgaagggtgacaaaggcgatcgtggggagcggggtccccctggaccaggtgaaggtggcattgctcctggggagcctgggctgccgggtcttcccggaagccctggaccccaaggccccgttggcccccctggaaagaaaggagaaaaaggtgactctgaggatggagctccaggcctcccaggacaacctgggtctccgggtgagcagggcccacggggacctcctggagctattggccccaaaggtgaccggggctttccagggcccctgggtgaggctggagagaagggcgaacgtggacccccaggcccagcgggatcccgggggctgccaggggttgctggacgtcctggagccaagggtcctgaagggccaccaggacccactggccgccaaggagagaagggggagcctggtcgccctggggaccctgcagtggtgggacctgctgttgctggacccaaaggagaaaagggagatgtggggcccgctgggcccagaggagctaccggagtccaaggggaacggggcccacccggcttggttcttcctggagaccctggccccaagggagaccctggagaccggggtcccattggccttactggcagagcaggacccccaggtgactcagggcctcctggagagaagggagaccctgggcggcctggccccccaggacctgttggcccccgaggacgagatggtgaagttggagagaaaggtgacgagggtcctccgggtgacccgggtttgcctggaaaagcaggcgagcgtggccttcggggggcacctggagttcgggggcctgtgggtgaaaagggagaccagggagatcctggagaggatggacgaaatggcagccctggatcatctggacccaagggtgaccgtggggagccgggtcccccaggacccccgggacggctggtagacacaggacctggagccagagagaagggagagcctggggaccgcggacaagagggtcctcgagggcccaagggtgatcctggcctccctggagcccctggggaaaggggcattgaagggtttcggggacccccaggcccacagggggacccaggtgtccgaggcccagcaggagaaaagggtgaccggggtccccctgggctggatggccggagcggactggatgggaaaccaggagccgctgggccctctgggccgaatggtgctgcaggcaaagctggggacccagggagagacgggcttccaggcctccgtggagaacaaggcctccctggcccctctggtccccctggattaccgggaaagccaggcgaggatgggaaacctggcctgaatggaaaaaacggagaacctggggaccctggagaagacgggaggaagggagagaaaggagattcaggcgcctctgggagagaaggtcgtgatggccccaagggtgagcgtggagctcctggtatccttggaccccaggggcctccaggcctcccagggccagtgggccctcctggccagggttttcctggtgtcccaggaggcacgggccccaagggtgaccgtggggagactggatccaaaggggagcagggcctccctggagagcgtggcctgcgaggagagcctggaagtgtgccgaatgtggatcggttgctggaaactgctggcatcaaggcatctgccctgcgggagatcgtggagacctgggatgagagctctggtagcttcctgcctgtgcccgaacggcgtcgaggccccaagggggactcaggcgaacagggccccccaggcaaggagggccccatcggctttcctggagaacgcgggctgaagggcgaccgtggagaccctggccctcaggggccacctggtctggcccttggggagaggggcccccccgggccttccggccttgccggggagcctggaaagcctggtattcccgggctcccaggcagggctgggggtgtgggagaggcaggaaggccaggagagaggggagaacggggagagaaaggagaacgtggagaacagggcagagatggccctcctggactccctggaacccctgggccccccggaccccctggccccaaggtgtctgtggatgagccaggtcctggactctctggagaacagggaccccctggactcaagggtgctaagggggagccgggcagcaatggtgaccaaggtcccaaaggagacaggggtgtgccaggcatcaaaggagaccggggagagcctggaccgaggggtcaggacggcaacccgggtctaccaggagagcgtggtatggctgggcctgaagggaagccgggtctgcagggtccaagaggcccccctggcccagtgggtggtcatggagaccctggaccacctggtgccccgggtcttgctggccctgcaggaccccaaggaccttctggcctgaagggggagcctggagagacaggacctccaggacggggcctgactggacctactggagctgtgggacttcctggaccccccggcccttcaggccttgtgggtccacaggggtctccaggtttgcctggacaagtgggggagacagggaagccgggagccccaggtcgagatggtgccagtggaaaagatggagacagagggagccctggtgtgccagggtcaccaggtctgcctggccctgtcggacctaaaggagaacctggccccacgggggcccctggacaggctgtggtcgggctccctggagcaaagggagagaagggagcccctggaggccttgctggagacctggtgggtgagccgggagccaaaggtgaccgaggactgccagggccgcgaggcgagaagggtgaagctggccgtgcaggggagcccggagaccctggggaagatgtgagtccggggcctaggcaagggcgagcctggcctgaggagtgtgatggcgggcataaggggccactcttgggccggggcacatgtctgagcccctgagtcgggctgcatgtcccaacatccaggagcctgctctctggatcacagggagccacacactgtcggcttccacactctgagctctgggggccctgtcttggcttctgtgtgcccatccttggtctgtttctcaccacatctgggcacacgtgtgctctggtctgatctcccagatcccaggacacacctgagttcttgtgaacctctccttggtcctgtgtttacaatcctcctttcccctgcccctggctgccagcgttcagcctgtggccatgcctgctctacccgggagtggacgtgttggggttcccctctgagcgcccgtgtgtccgcactcacgtctgtggagccagatgtctgcactcgcgtgtgggctccctgtgcctgtgccatgcctgaactcccacctgtctatggtagtatctgagcgtccctctgtctgtgctgtcctgagataggccatggtcatgtctgagctcctgtgagccaattcttggtcgcatgtctgagttc

SEQ ID NO: 370605 - DNA, 2262 bp, Homo sapiens
cctgggaatattttcagcccgtgtctgaactctgtgctcatgttcctaccctctcaaatgctgtttgctgggttttcttagggtcagaaaggggctccaggacccaaaggtttcaaggtatgtgtacccagaagggtccctgctggggtcctggtcgtgagatccctgagcttgatccgatgcctcttttcctcaaagggtgacccaggagtcggggtcccgggctcccctgggcctcctggccctccaggtgtgaagggagatctgggcctccctggcctgcccggtgctcctggtgttgttgggttcccgggtcagacaggccctcgaggagagatgggtcagccaggccctagtggagagcggggtctggcaggccccccagggagagaaggaatcccaggacccctggggccacctggaccaccggggtcagtgggaccacctggggcctctggactcaaaggagacaagggagaccctggagtagggctgcctgggccccgaggcgagcgtggggagccaggcatccggggtgaagatggccgccccggccaggagggaccccgaggactcacggggccccctggcagcaggggagagcgtggggagaagggtgatgttgggagtgcaggactaaagggtgacaagggagactcagctgtgatcctggggcctccaggcccacggggtgccaagggggacatgggtgaacgagggcctcggggcttggatggtgacaaaggacctcggggagacaatggggaccctggtgacaagggcagcaagggagagcctggtgacaagggctcagccgggttgccaggactgcgtggactcctgggaccccagggtcaacctggtgcagcagggatccctggtgacccgggatccccaggaaaggatggagtgcctggtatccgaggagaaaaaggagatgttggcttcatgggtccccggggcctcaagggtgaacggggagtgaagggagcctgtggccttgatggagagaagggagacaagggagaagctggtcccccaggccgccccgggctggcaggacacaaaggagagatgggggagcctggtgtgccgggccagtcgggggcccctggcaaggagggcctgatcggtcccaagggtgaccgaggctttgacgggcagccaggccccaagggtgaccagggcgagaaaggggagcggggaaccccaggaattgggggcttcccaggccccagtggaaatgatggctctgctggtcccccagggccacctggcagtgttggtcccagaggccccgaaggacttcagggccagaagggtgagcgaggtccccccggagagagagtggtgggggctcctggggtccctggagctcctggcgagagaggggagcaggggcggccagggcctgccggtcctcgaggcgagaagggagaagctgcactgacggaggatgacatccggggctttgtgcgccaagagatgagtcagcactgtgcctgccagggccagttcatcgcatctggatcacgacccctccctagttatgctgcagacactgccggctcccagctccatgctgtgcctgtgctccgcgtctctcatgcagaggaggaagagcgggtaccccctgaggatgatgagtactctgaatactccgagtattctgtggaggagtaccaggaccctgaagctccttgggatagtgatgacccctgttccctgccactggatgagggctcctgcactgcctacaccctgcgctggtaccatcgggctgtgacaggcagcacagaggcctgtcacccttttgtctatggtggctgtggagggaatgccaaccgttttgggacccgtgaggcctgcgagcgccgctgcccaccccgggtggtccagagccaggggacaggtactgcccaggactgaggcccagataatgagctgagattcagcatcccctggaggagtcggggtctcagcagaaccccactgtccctccccttggtgctagaggcttgtgtgcacgtgagcgtgcgtgtgcacgtccgttatttcagtgacttggtcccgtgggtctagccttcccccctgtggacaaacccccattgtggctcctgccaccctggcagatgactcactgtgggggggtggctgtgggcagtgagcggatgtgactggcgtctgacccgccccttgacccaagcctgtgatgacatggtgctgattctggggggcattaaagctgctgttttaaaaggc

SEQ ID NO: 370606 - DNA, 425 bp, Homo sapiens
tcctgcctgatcccctgatcccgcattcccagcggatgactcgacctctgctccacgagacctggtgctgtctgagccaagcagccaatccttgagagtacagtggacagcggccagtggccctgtgactggctacaaggtccagtacactcctctgacggggctgggacagccactgccgagtgagcggcaggaggtaggatgtcaggagtgataggtggtggctggggacttggctgggcaagataaagtgacctcttgccctgggcaggtgaacgtcccagctggtgagaccagtgtgcggctgcggggtctccggccactgaccgagtaccaagtgactgtgattgccctctacgccaacagcatcggggaggctgtgagcgggacagctcggaccagtgagcaattctgccagcctctga

SEQ ID NO: 370607 - DNA, 138 bp, Homo sapiens
ggggcacctggagttcgggggcctgtgggtgaaaagggagaccagggagatcctggagaggatggacgaaatgtgagtcccagcctatgactcctcaccccaaccttaaccctccaaccagccaattcccaatacctg

SEQ ID NO: 370608 - DNA, 275 bp, Homo sapiens
tggcctgggacctggccgctgagcatctgagtggccacacatgcagcggatgggccagtgttggggacagtcccactgaagggctcccccatctgtgtttctcacagggtcaacctggtgcagcagggatccctggtgacccggtaagatgcccctgctcccacaggggccccctgtccccagagggcccccgtcaccatggtggtcccaccagtgtggtagcttttgaccttatagtgacccagtgctctcatggtgtcctcatgtcacccagg

SEQ ID NO: 370609 - DNA, 592 bp, Homo sapiens
ggagagatgggtcagccaggccctagtggagagcgggtgaggggctgggaacagcatgtaggggcatggtgaatccatggtgggtgaggagggggccctgccttgggggttcccagtcttgagggggcagagggtaggagggttcccaagtcactctctgcctctcttgccccatttttctggtagggtctggcaggccccccagggagagaaggaatcccaggacccctggggccacctggaccaccggggtcagtggtgagtagaggtgccctaaagccccacgtatttgatttcctgtcctcgtgaggacttaggatggggcgggccacactgtggggtgttgggggaggcgctttgagagccacaggaccctcacctcactctgacctacagggaccacctggggcctctggactcaaaggagacaaggtaggtgggacaagtgctgctgactctctcttgtgccctggtcacccccttcagcctccactgacctcccatgaccctgcgtcccccactgattcccctcactgatccccggtgtcctgttggtctccagggagaccctggagtagggctgcctgggccc

SEQ ID NO: 370610 - DNA, 9281 bp, Homo sapiens
gcaacaccaggactcgggctggaggggcgctgggctcggacctgccaaggccaccgcaggggggagcaagggacagaggcgggggtcctagctgacggcttttactgcctaggatgacgctgcggcttctggtggccgcgctctgcgccgggatcctggcagaggcgccccgagtgcgagcccagcacagggagagagtgacctgcacgcgcctttacgccgctgacattgtgttcttactggatggctcctcatccattggccgcagcaatttccgcgaggtccgcagctttctcgaagggctggtgctgcctttctctggagcagccagtgcacagggtgtgcgctttgccacagtgcagtacagcgatgacccacggacagagttcggcctggatgcacttggctctgggggtgatgtgatccgcgccatccgtgagcttagctacaaggggggcaacactcgcacaggggctgcaattctccatgtggctgaccatgtcttcctgccccagctggcccgacctggtgtccccaaggtctgcatcctgatcacagacgggaagtcccaggacctggtggacacagctgcccaaaggctgaaggggcagggggtcaagctatttgctgtggggatcaagaatgctgaccctgaggagctgaagcgagttgcctcacagccaacctccgacttcttcttcttcgtcaatgacttcagcatcttgaggacactactgcccctcgtttcccggagagtgtgcacgactgctggtggcgtgcctgtgacccgacctccggatgactcgacctctgctccacgagacctggtgctgtctgagccaagcagccaatccttgagagtacagtggacagcggccagtggccctgtgactggctacaaggtccagtacactcctctgacggggctgggacagccactgccgagtgagcggcaggaggtgaacgtcccagctggtgagaccagtgtgcggctgcggggtctccggccactgaccgagtaccaagtgactgtgattgccctctacgccaacagcatcggggaggctgtgagcgggacagctcggaccactgccctagaagggccggaactgaccatccagaataccacagcccacagcctcctggtggcctggcggagtgtgccaggtgccactggctaccgtgtgacatggcgggtcctcagtggtgggcccacacagcagcaggagctgggccctgggcagggttcagtgttgctgcgtgacttggagcctggcacggactatgaggtgaccgtgagcaccctatttggccgcagtgtggggcccgccacttccctgatggctcgcactgacgcttctgttgagcagaccctgcgcccggtcatcctgggccccacatccatcctcctttcctggaacttggtgcctgaggcccgtggctaccggttggaatggcggcgtgagactggcttggagccaccgcagaaggtggtactgccctctgatgtgacccgctaccagttggatgggctgcagccgggcactgagtaccgcctcacactctacactctgctggagggccacgaggtggccacccctgcaaccgtggttcccactggaccagagctgcctgtgagccctgtaacagacctgcaagccaccgagctgcccgggcagcgggtgcgagtgtcctggagcccagtccctggtgccacccagtaccgcatcattgtgcgcagcacccagggggttgagcggaccctggtgcttcctgggagtcagacagcattcgacttggatgacgttcaggctgggcttagctacactgtgcgggtgtctgctcgagtgggtccccgtgagggcagtgccagtgtcctcactgtccgccgggagccggaaactccacttgctgttccagggctgcgggttgtggtgtcagatgcaacgcgagtgagggtggcctggggacccgtccctggagccagtggatttcggattagctggagcacaggcagtggtccggagtccagccagacactgcccccagactctactgccacagacatcacagggctgcagcctggaaccacctaccaggtggctgtgtcggtactgcgaggcagagaggagggccctgctgcagtcatcgtggctcgaacggacccactgggcccagtgaggacggtccatgtgactcaggccagcagctcatctgtcaccattacctggaccagggttcctggcgccacaggatacagggtttcctggcactcagcccacggcccagagaaatcccagttggtttctggggaggccacggtggctgagctggatggactggagccagatactgagtatacggtgcatgtgagggcccatgtggctggcgtggatgggccccctgcctctgtggttgtgaggactgcccctgagcctgtgggtcgtgtgtcgaggctgcagatcctcaatgcttccagcgacgttctacggatcacctgggtaggggtcactggagccacagcttacagactggcctggggccggagtgaaggcggccccatgaggcaccagatactcccaggaaacacagactctgcagagatccggggtctcgaaggtggagtcagctactcagtgcgagtgactgcacttgtcggggaccgcgagggcacacctgtctccattgttgtcactacgccgcctgaggctccgccagccctggggacgcttcacgtggtgcagcgcggggagcactcgctgaggctgcgctgggagccggtgcccagagcgcagggcttccttctgcactggcaacctgagggtggccaggaacagtcccgggtcctggggcccgagctcagcagctatcacctggacgggctggagccagcgacacagtaccgcgtgaggctgagtgtcctagggccggctggagaagggccctctgcagaggtgactgcgcgcactgagtcacctcgtgttccaagcattgaactacgtgtggtggacacctcgatcgactcggtgactttggcctggactccagtgtccagggcatccagctacatcctatcctggcggccactcagaggccctggccaggaagtgcctgggtccccgcagacacttccagggatctcaagctcccagcgggtgacagggctagagcctggcgtctcttacatcttctccctgacgcctgtcctggatggtgtgcggggtcctgaggcatctgtcacacagacgccagtgtgcccccgtggcctggcggatgtggtgttcctaccacatgccactcaagacaatgctcaccgtgcggaggctacgaggagggtcctggagcgtctggtgttggcacttgggcctcttgggccacaggcagttcaggttggcctgctgtcttacagtcatcggccctccccactgttcccactgaatggctcccatgaccttggcattatcttgcaaaggatccgtgacatgccctacatggacccaagtgggaacaacctgggcacagccgtggtcacagctcacagatacatgttggcaccagatgctcctgggcgccgccagcacgtaccaggggtgatggttctgctagtggatgaacccttgagaggtgacatattcagccccatccgtgaggcccaggcttctgggcttaatgtggtgatgttgggaatggctggagcggacccagagcagctgcgtcgcttggcgccgggtatggactctgtccagaccttcttcgccgtggatgatgggccaagcctggaccaggcagtcagtggtctggccacagccctgtgtcaggcatccttcactactcagccccggccagagccctgcccagtgtattgtccaaagggccagaagggggaacctggagagatgggcctgagaggacaagttgggcctcctggcgaccctggcctcccgggcaggaccggtgctcccggcccccaggggccccctggaagtgccactgccaagggcgagaggggcttccctggagcagatgggcgtccaggcagccctggccgcgccgggaatcctgggacccctggagcccctggcctaaagggctctccagggttgcctggccctcgtggggacccgggagagcgaggacctcgaggcccaaagggggagccgggggctcccggacaagtcatcggaggtgaaggacctgggcttcctgggcggaaaggggaccctggaccatcgggcccccctggacctcgtggaccactgggggacccaggaccccgtggccccccagggcttcctggaacagccatgaagggtgacaaaggcgatcgtggggagcggggtccccctggaccaggtgaaggtggcattgctcctggggagcctgggctgccgggtcttcccggaagccctggaccccaaggccccgttggcccccctggaaagaaaggagaaaaaggtgactctgaggatggagctccaggcctcccaggacaacctgggtctccgggtgagcagggcccacggggacctcctggagctattggccccaaaggtgaccggggctttccagggcccctgggtgaggctggagagaagggcgaacgtggacccccaggcccagcgggatcccgggggctgccaggggttgctggacgtcctggagccaagggtcctgaagggccaccaggacccactggccgccaaggagagaagggggagcctggtcgccctggggaccctgcagtggtgggacctgctgttgctggacccaaaggagaaaagggagatgtggggcccgctgggcccagaggagctaccggagtccaaggggaacggggcccacccggcttggttcttcctggagaccctggccccaagggagaccctggagaccggggtcccattggccttactggcagagcaggacccccaggtgactcagggcctcctggagagaagggagaccctgggcggcctggccccccaggacctgttggcccccgaggacgagatggtgaagttggagagaaaggtgacgagggtcctccgggtgacccgggtttgcctggaaaagcaggcgagcgtggccttcggggggcacctggagttcgggggcctgtgggtgaaaagggagaccagggagatcctggagaggatggacgaaatggcagccctggatcatctggacccaagggtgaccgtggggagccgggtcccccaggacccccgggacggctggtagacacaggacctggagccagagagaagggagagcctggggaccgcggacaagagggtcctcgagggcccaagggtgatcctggcctccctggagcccctggggaaaggggcattgaagggtttcggggacccccaggcccacagggggacccaggtgtccgaggcccagcaggagaaaagggtgaccggggtccccctgggctggatggccggagcggactggatgggaaaccaggagccgctgggccctctgggccgaatggtgctgcaggcaaagctggggacccagggagagacgggcttccaggcctccgtggagaacaaggcctccctggcccctctggtccccctggattaccgggaaagccaggcgaggatgggaaacctggcctgaatggaaaaaacggagaacctggggaccctggagaagacgggaggaagggagagaaaggagattcaggcgcctctgggagagaaggtcgtgatggccccaagggtgagcgtggagctcctggtatccttggaccccaggggcctccaggcctcccagggccagtgggccctcctggccagggttttcctggtgtcccaggaggcacgggccccaagggtgaccgtggggagactggatccaaaggggagcagggcctccctggagagcgtggcctgcgaggagagcctggaagtgtgccgaatgtggatcggttgctggaaactgctggcatcaaggcatctgccctgcgggagatcgtggagacctgggatgagagctctggtagcttcctgcctgtgcccgaacggcgtcgaggccccaagggggactcaggcgaacagggccccccaggcaaggagggccccatcggctttcctggagaacgcgggctgaagggcgaccgtggagaccctggccctcaggggccacctggtctggcccttggggagaggggcccccccgggccttccggccttgccggggagcctggaaagcctggtattcccgggctcccaggcagggctgggggtgtgggagaggcaggaaggccaggagagaggggagaacggggagagaaaggagaacgtggagaacagggcagagatggccctcctggactccctggaacccctgggccccccggaccccctggccccaaggtgtctgtggatgagccaggtcctggactctctggagaacagggaccccctggactcaagggtgctaagggggagccgggcagcaatggtgaccaaggtcccaaaggagacaggggtgtgccaggcatcaaaggagaccggggagagcctggaccgaggggtcaggacggcaacccgggtctaccaggagagcgtggtatggctgggcctgaagggaagccgggtctgcagggtccaagaggcccccctggcccagtgggtggtcatggagaccctggaccacctggtgccccgggtcttgctggccctgcaggaccccaaggaccttctggcctgaagggggagcctggagagacaggacctccaggacggggcctgactggacctactggagctgtgggacttcctggaccccccggcccttcaggccttgtgggtccacaggggtctccaggtttgcctggacaagtgggggagacagggaagccgggagccccaggtcgagatggtgccagtggaaaagatggagacagagggagccctggtgtgccagggtcaccaggtctgcctggccctgtcggacctaaaggagaacctggccccacgggggcccctggacaggctgtggtcgggctccctggagcaaagggagagaagggagcccctggaggccttgctggagacctggtgggtgagccgggagccaaaggtgaccgaggactgccagggccgcgaggcgagaagggtgaagctggccgtgcaggggagcccggagaccctggggaagatggtcagaaaggggctccaggacccaaaggtttcaagggtgacccaggagtcggggtcccgggctcccctgggcctcctggccctccaggtgtgaagggagatctgggcctccctggcctgcccggtgctcctggtgttgttgggttcccgggtcagacaggccctcgaggagagatgggtcagccaggccctagtggagagcggggtctggcaggccccccagggagagaaggaatcccaggacccctggggccacctggaccaccggggtcagtgggaccacctggggcctctggactcaaaggagacaagggagaccctggagtagggctgcctgggccccgaggcgagcgtggggagccaggcatccggggtgaagatggccgccccggccaggagggaccccgaggactcacggggccccctggcagcaggggagagcgtggggagaagggtgatgttgggagtgcaggactaaagggtgacaagggagactcagctgtgatcctggggcctccaggcccacggggtgccaagggggacatgggtgaacgagggcctcggggcttggatggtgacaaaggacctcggggagacaatggggaccctggtgacaagggcagcaagggagagcctggtgacaagggctcagccgggttgccaggactgcgtggactcctgggaccccagggtcaacctggtgcagcagggatccctggtgacccgggatccccaggaaaggatggagtgcctggtatccgaggagaaaaaggagatgttggcttcatgggtccccggggcctcaagggtgaacggggagtgaagggagcctgtggccttgatggagagaagggagacaagggagaagctggtcccccaggccgccccgggctggcaggacacaaaggagagatgggggagcctggtgtgccgggccagtcgggggcccctggcaaggagggcctgatcggtcccaagggtgaccgaggctttgacgggcagccaggccccaagggtgaccagggcgagaaaggggagcggggaaccccaggaattgggggcttcccaggccccagtggaaatgatggctctgctggtcccccagggccacctggcagtgttggtcccagaggccccgaaggacttcagggccagaagggtgagcgaggtccccccggagagagagtggtgggggctcctggggtccctggagctcctggcgagagaggggagcaggggcggccagggcctgccggtcctcgaggcgagaagggagaagctgcactgacggaggatgacatccggggctttgtgcgccaagagatgagtcagcactgtgcctgccagggccagttcatcgcatctggatcacgacccctccctagttatgctgcagacactgccggctcccagctccatgctgtgcctgtgctccgcgtctctcatgcagaggaggaagagcgggtaccccctgaggatgatgagtactctgaatactccgagtattctgtggaggagtaccaggaccctgaagctccttgggatagtgatgacccctgttccctgccactggatgagggctcctgcactgcctacaccctgcgctggtaccatcgggctgtgacaggcagcacagaggcctgtcacccttttgtctatggtggctgtggagggaatgccaaccgttttgggacccgtgaggcctgcgagcgccgctgcccaccccgggtggtccagagccaggggacaggtactgcccaggactgaggcccagataatgagctgagattcagcatcccctggaggagtcggggtctcagcagaaccccactgtccctccccttggtgctagaggcttgtgtgcacgtgagcgtgcgtgtgcacgtccgttatttcagtgacttggtcccgtgggtctagccttcccccctgtggacaaacccccattgtggctcctgccaccctggcagatgactcactgtgggggggtggctgtgggcagtgagcggatgtgactggcgtctgacccgccccttgacccaagcctgtgatgacatggtgctgattctggggggcattaaagctgctgttttaaaaggc

SEQ ID NO: 370611 - DNA, 8223 bp, Homo sapiens
gcaacaccaggactcgggctggaggggcgctgggctcggacctgccaaggccaccgcaggggggagcaagggacagaggcgggggtcctagctgacggcttttactgcctaggatgacgctgcggcttctggtggccgcgctctgcgccgggatcctggcagaggcgccccgagtgcgagcccagcacagggagagagtgacctgcacgcgcctttacgccgctgacattgtgttcttactggatggctcctcatccattggccgcagcaatttccgcgaggtccgcagctttctcgaagggctggtgctgcctttctctggagcagccagtgcacagggtgtgcgctttgccacagtgcagtacagcgatgacccacggacagagttcggcctggatgcacttggctctgggggtgatgtgatccgcgccatccgtgagcttagctacaaggggggcaacactcgcacaggggctgcaattctccatgtggctgaccatgtcttcctgccccagctggcccgacctggtgtccccaaggtctgcatcctgatcacagacgggaagtcccaggacctggtggacacagctgcccaaaggctgaaggggcagggggtcaagctatttgctgtggggatcaagaatgctgaccctgaggagctgaagcgagttgcctcacagccaacctccgacttcttcttcttcgtcaatgacttcagcatcttgaggacactactgcccctcgtttcccggagagtgtgcacgactgctggtggcgtgcctgtgacccgacctccggatgactcgacctctgctccacgagacctggtgctgtctgagccaagcagccaatccttgagagtacagtggacagcggccagtggccctgtgactggctacaaggtccagtacactcctctgacggggctgggacagccactgccgagtgagcggcaggaggtgaacgtcccagctggtgagaccagtgtgcggctgcggggtctccggccactgaccgagtaccaagtgactgtgattgccctctacgccaacagcatcggggaggctgtgagcgggacagctcggaccactgccctagaagggccggaactgaccatccagaataccacagcccacagcctcctggtggcctggcggagtgtgccaggtgccactggctaccgtgtgacatggcgggtcctcagtggtgggcccacacagcagcaggagctgggccctgggcagggttcagtgttgctgcgtgacttggagcctggcacggactatgaggtgaccgtgagcaccctatttggccgcagtgtggggcccgccacttccctgatggctcgcactgacgcttctgttgagcagaccctgcgcccggtcatcctgggccccacatccatcctcctttcctggaacttggtgcctgaggcccgtggctaccggttggaatggcggcgtgagactggcttggagccaccgcagaaggtggtactgccctctgatgtgacccgctaccagttggatgggctgcagccgggcactgagtaccgcctcacactctacactctgctggagggccacgaggtggccacccctgcaaccgtggttcccactggaccagagctgcctgtgagccctgtaacagacctgcaagccaccgagctgcccgggcagcgggtgcgagtgtcctggagcccagtccctggtgccacccagtaccgcatcattgtgcgcagcacccagggggttgagcggaccctggtgcttcctgggagtcagacagcattcgacttggatgacgttcaggctgggcttagctacactgtgcgggtgtctgctcgagtgggtccccgtgagggcagtgccagtgtcctcactgtccgccgggagccggaaactccacttgctgttccagggctgcgggttgtggtgtcagatgcaacgcgagtgagggtggcctggggacccgtccctggagccagtggatttcggattagctggagcacaggcagtggtccggagtccagccagacactgcccccagactctactgccacagacatcacagggctgcagcctggaaccacctaccaggtggctgtgtcggtactgcgaggcagagaggagggccctgctgcagtcatcgtggctcgaacggacccactgggcccagtgaggacggtccatgtgactcaggccagcagctcatctgtcaccattacctggaccagggttcctggcgccacaggatacagggtttcctggcactcagcccacggcccagagaaatcccagttggtttctggggaggccacggtggctgagctggatggactggagccagatactgagtatacggtgcatgtgagggcccatgtggctggcgtggatgggccccctgcctctgtggttgtgaggactgcccctgagcctgtgggtcgtgtgtcgaggctgcagatcctcaatgcttccagcgacgttctacggatcacctgggtaggggtcactggagccacagcttacagactggcctggggccggagtgaaggcggccccatgaggcaccagatactcccaggaaacacagactctgcagagatccggggtctcgaaggtggagtcagctactcagtgcgagtgactgcacttgtcggggaccgcgagggcacacctgtctccattgttgtcactacgccgcctgaggctccgccagccctggggacgcttcacgtggtgcagcgcggggagcactcgctgaggctgcgctgggagccggtgcccagagcgcagggcttccttctgcactggcaacctgagggtggccaggaacagtcccgggtcctggggcccgagctcagcagctatcacctggacgggctggagccagcgacacagtaccgcgtgaggctgagtgtcctagggccggctggagaagggccctctgcagaggtgactgcgcgcactgagtcacctcgtgttccaagcattgaactacgtgtggtggacacctcgatcgactcggtgactttggcctggactccagtgtccagggcatccagctacatcctatcctggcggccactcagaggccctggccaggaagtgcctgggtccccgcagacacttccagggatctcaagctcccagcgggtgacagggctagagcctggcgtctcttacatcttctccctgacgcctgtcctggatggtgtgcggggtcctgaggcatctgtcacacagacgccagtgtgcccccgtggcctggcggatgtggtgttcctaccacatgccactcaagacaatgctcaccgtgcggaggctacgaggagggtcctggagcgtctggtgttggcacttgggcctcttgggccacaggcagttcaggttggcctgctgtcttacagtcatcggccctccccactgttcccactgaatggctcccatgaccttggcattatcttgcaaaggatccgtgacatgccctacatggacccaagtgggaacaacctgggcacagccgtggtcacagctcacagatacatgttggcaccagatgctcctgggcgccgccagcacgtaccaggggtgatggttctgctagtggatgaacccttgagaggtgacatattcagccccatccgtgaggcccaggcttctgggcttaatgtggtgatgttgggaatggctggagcggacccagagcagctgcgtcgcttggcgccgggtatggactctgtccagaccttcttcgccgtggatgatgggccaagcctggaccaggcagtcagtggtctggccacagccctgtgtcaggcatccttcactactcagccccggccagagccctgcccagtgtattgtccaaagggccagaagggggaacctggagagatgggcctgagaggacaagttgggcctcctggcgaccctggcctcccgggcaggaccggtgctcccggcccccaggggccccctggaagtgccactgccaagggcgagaggggcttccctggagcagatgggcgtccaggcagccctggccgcgccgggaatcctgggacccctggagcccctggcctaaagggctctccagggttgcctggccctcgtggggacccgggagagcgaggacctcgaggcccaaagggggagccgggggctcccggacaagtcatcggaggtgaaggacctgggcttcctgggcggaaaggggaccctggaccatcgggcccccctggacctcgtggaccactgggggacccaggaccccgtggccccccagggcttcctggaacagccatgaagggtgacaaaggcgatcgtggggagcggggtccccctggaccaggtgaaggtggcattgctcctggggagcctgggctgccgggtcttcccggaagccctggaccccaaggccccgttggcccccctggaaagaaaggagaaaaaggtgactctgaggatggagctccaggcctcccaggacaacctgggtctccgggtgagcagggcccacggggacctcctggagctattggccccaaaggtgaccggggctttccagggcccctgggtgaggctggagagaagggcgaacgtggacccccaggcccagcgggatcccgggggctgccaggggttgctggacgtcctggagccaagggtcctgaagggccaccaggacccactggccgccaaggagagaagggggagcctggtcgccctggggaccctgcagtggtgggacctgctgttgctggacccaaaggagaaaagggagatgtggggcccgctgggcccagaggagctaccggagtccaaggggaacggggcccacccggcttggttcttcctggagaccctggccccaagggagaccctggagaccggggtcccattggccttactggcagagcaggacccccaggtgactcagggcctcctggagagaagggagaccctgggcggcctggccccccaggacctgttggcccccgaggacgagatggtgaagttggagagaaaggtgacgagggtcctccgggtgacccgggtttgcctggaaaagcaggcgagcgtggccttcggggggcacctggagttcgggggcctgtgggtgaaaagggagaccagggagatcctggagaggatggacgaaatggcagccctggatcatctggacccaagggtgaccgtggggagccgggtcccccaggacccccgggacggctggtagacacaggacctggagccagagagaagggagagcctggggaccgcggacaagagggtcctcgagggcccaagggtgatcctggcctccctggagcccctggggaaaggggcattgaagggtttcggggacccccaggcccacagggggacccaggtgtccgaggcccagcaggagaaaagggtgaccggggtccccctgggctggatggccggagcggactggatgggaaaccaggagccgctgggccctctgggccgaatggtgctgcaggcaaagctggggacccagggagagacgggcttccaggcctccgtggagaacaaggcctccctggcccctctggtccccctggattaccgggaaagccaggcgaggatgggaaacctggcctgaatggaaaaaacggagaacctggggaccctggagaagacgggaggaagggagagaaaggagattcaggcgcctctgggagagaaggtcgtgatggccccaagggtgagcgtggagctcctggtatccttggaccccaggggcctccaggcctcccagggccagtgggccctcctggccagggttttcctggtgtcccaggaggcacgggccccaagggtgaccgtggggagactggatccaaaggggagcagggcctccctggagagcgtggcctgcgaggagagcctggaagtgtgccgaatgtggatcggttgctggaaactgctggcatcaaggcatctgccctgcgggagatcgtggagacctgggatgagagctctggtagcttcctgcctgtgcccgaacggcgtcgaggccccaagggggactcaggcgaacagggccccccaggcaaggagggccccatcggctttcctggagaacgcgggctgaagggcgaccgtggagaccctggccctcaggggccacctggtctggcccttggggagaggggcccccccgggccttccggccttgccggggagcctggaaagcctggtattcccgggctcccaggcagggctgggggtgtgggagaggcaggaaggccaggagagaggggagaacggggagagaaaggagaacgtggagaacagggcagagatggccctcctggactccctggaacccctgggccccccggaccccctggccccaaggtgtctgtggatgagccaggtcctggactctctggagaacagggaccccctggactcaagggtgctaagggggagccgggcagcaatggtgaccaaggtcccaaaggagacaggggtgtgccaggcatcaaaggagaccggggagagcctggaccgaggggtcaggacggcaacccgggtctaccaggagagcgtggtatggctgggcctgaagggaagccgggtctgcagggtccaagaggcccccctggcccagtgggtggtcatggagaccctggaccacctggtgccccgggtcttgctggccctgcaggaccccaaggaccttctggcctgaagggggagcctggagagacaggacctccaggacggggcctgactggacctactggagctgtgggacttcctggaccccccggcccttcaggccttgtgggtccacaggggtctccaggtttgcctggacaagtgggggagacagggaagccgggagccccaggtcgagatggtgccagtggaaaagatggagacagagggagccctggtgtgccagggtcaccaggtctgcctggccctgtcggacctaaaggagaacctggccccacgggggcccctggacaggctgtggtcgggctccctggagcaaagggagagaagggagcccctggaggccttgctggagacctggtgggtgagccgggagccaaaggtgaccgaggactgccagggccgcgaggcgagaagggtgaagctggccgtgcaggggagcccggagaccctggggaagatggtcagaaaggggctccaggacccaaaggtttcaaggtatgtgtacccagaagggtccctgctggggtcctggtcgtgagatccctgagcttgatccgatgcctcttttcctcaaagggtgacccaggagtcggggtcccgggctcccctgggcctcctggccctccaggtgtgaagggagatctgggcctccctggcctgcccggtgctcctggtgttgttgggttcccgggtcagacaggccctcgaggagagatgggtcagccaggccctagtggagagcggggtctggcaggccccccagggagagaaggaatcccaggacccctggggccacctggaccaccggggtcagtgggaccacctggggcctctggactcaaaggagacaagggagaccctggagtagggctgcctgggccccgaggcgagcgtggggagccaggcatccggggtgaagatggccgccccggccaggagggaccccgaggactcacggggccccctggcagcaggggagagcgtggggagaagggtgatgttgggagtgcaggactaaagggtgacaagggagactcagctgtgatcctggggcctccaggcccacggggtgccaagggggacatgggtgaacgagggcctcggggcttggatggtgacaaaggacctcggggagacaatggggaccctggtgacaagggcagcaagggagagcctggtgacaagggctcagccgggttgccaggactgcgtggactcctgggaccccagggtcaacctggtgcagcagggatccctggtgacccgggatccccaggaaaggatggagtgcctggtatccgaggagaaaaaggagatgttggcttcatgggtccccggggcctcaagggtgaacggggagtgaagggagcctgtggccttgatggagagaagggagacaaggacacagggaagaagctggatccccaggcggccccggggctgcaaggaccacacaggagacgatggggaacgcactgatgtgcgggcaagcgggggaccc

SEQ ID NO: 370612 - DNA, 1991 bp, Homo sapiens
ctctctcttgtgccctggtcacccccttcagcctccactgacctcccatgaccctgcgtcccccactgattcccctcactgatccccggtgtcctgttggtctccagggagaccctggagtagggctgcctgggccccgaggcgagcgtggggagccaggcatccgggtacgtatgtcttactccacagccgaactcccttcatcccagctcttgcctctgatttccaacctctgagtcaatgaacctaatgtcaccatccagggtgaagatggccgccccggccaggagggaccccgaggactcacggggccccctggcagcaggggagagcgtggggagaagggtgatgttgggagtgcaggactaaagggtgacaagggagactcagctgtgatcctggggcctccaggcccacggggtgccaagggggacatgggtgaacgagggcctcggggcttggatggtgacaaaggacctcggggagacaatggggaccctggtgacaagggcagcaagggagagcctggtgacaagggctcagccgggttgccaggactgcgtggactcctgggaccccagggtcaacctggtgcagcagggatccctggtgacccgggatccccaggaaaggatggagtgcctggtatccgaggagaaaaaggagatgttggcttcatgggtccccggggcctcaagggtgaacggggagtgaagggagcctgtggccttgatggagagaagggagacaagggagaagctggtcccccaggccgccccgggctggcaggacacaaaggagagatgggggagcctggtgtgccgggccagtcgggggcccctggcaaggagggcctgatcggtcccaagggtgaccgaggctttgacgggcagccaggccccaagggtgaccagggcgagaaaggggagcggggaaccccaggaattgggggcttcccaggccccagtggaaatgatggctctgctggtcccccagggccacctggcagtgttggtcccagaggccccgaaggacttcagggccagaagggtgagcgaggtccccccggagagagagtggtgggggctcctggggtccctggagctcctggcgagagaggggagcaggggcggccagggcctgccggtcctcgaggcgagaagggagaagctgcactgacggaggatgacatccggggctttgtgcgccaagagatgagtcagcactgtgcctgccagggccagttcatcgcatctggatcacgacccctccctagttatgctgcagacactgccggctcccagctccatgctgtgcctgtgctccgcgtctctcatgcagaggaggaagagcgggtaccccctgaggatgatgagtactctgaatactccgagtattctgtggaggagtaccaggaccctgaagctccttgggatagtgatgacccctgttccctgccactggatgagggctcctgcactgcctacaccctgcgctggtaccatcgggctgtgacaggcagcacagaggcctgtcacccttttgtctatggtggctgtggagggaatgccaaccgttttgggacccgtgaggcctgcgagcgccgctgcccaccccgggtggtccagagccaggggacaggtactgcccaggactgaggcccagataatgagctgagattcagcatcccctggaggagtcggggtctcagcagaaccccactgtccctccccttggtgctagaggcttgtgtgcacgtgagcgtgcgtgtgcacgtccgttatttcagtgacttggtcccgtgggtctagccttcccccctgtggacaaacccccattgtggctcctgccaccctggcagatgactcactgtgggggggtggctgtgggcagtgagcggatgtgactggcgtctgacccgccccttgacccaagcctgtgatgacatggtgctgattctggggggcattaaagctgctgttttaaaaggc

SEQ ID NO: 370613 - DNA, 300 bp, Homo sapiens
taagcctaaagtaatgaatgtctgaagttccagaaatcacaatggtataaataaagaagaagtgtgactacatttccaagtaggaagtcttgatatgacagaaaagtattaaaatatagggtatatatgggatatatgagacattttctgaaagattcataggactttgtaaattagttgtctgacttcatttttaactggatagctagaaagaatgatatcaaggatatgatagatcattttctctggtctttatgtgtgtctttatgctgatgatgatagactttaaggagtctatct

SEQ ID NO: 370614 - DNA, 444 bp, Homo sapiens
gcacacatggtggccccattggttgagggtgtgaggttgctggtggctgcagattctaggtggctggctttcaggccctggagagtgcatgctttggttttcccagtcctgggtgtggtcccccactgcactgactgcctggttccatggggtgtagggagctaagtaggcttgggtgttgagatcatgactctaacactgggtctatctggagtcatgacactgcagccctttgtttgggcatggtggggtgaaaaggggatccagggatgtgaagatgcaggggctattgggttccagggcaggatgcgctttagcagtagctctgtttgcaaagtggtgacaggctgcagcagcttgggtcctggggatttggggagatccagcatgaatttcctctctggagcaatgcagctatatggactccaagcagctcgctatatt

SEQ ID NO: 370615 - DNA, 3646 bp, Homo sapiens
gtcttctcagccgggacgccagcggttctgattacagacctcggctgcccgacaactacacgcaggacacgtggcggaagctgcacgaggcggtgcgggccgtgcagagcagcacctccatcaggctgtggaaaatctctgttctcacaaagtctccccaatgctctacaagcaactgcgtcaggcctgtgaagaccacgtccaggcacagatccttccgtttagagaagactcactagatagtgttttatttttaaagaagattaacacgtgctggcaggaccactgcagacaaatgatcatgatcagaagcatcttcctgttcttggaccgcacctatgtgctgcagaactccacgctgccctccatctgggatatgggattagaactgtttagaacccatattattagtgataaaatggttcagagtaaaaccattgatggaatcctactgctgatcgagcgcgagaggagcggcgaggccgtggaccggagcctgttgcggagcctcctgggcatgctgtctgacctgcaggtgtataaagattcatttgaactgaaatttttggaagagactaattgcttatatgctgccgaaggccaaaggttaatgcaggaaagagaggttccagaatatcttaaccatgtaagtaaacgcttagaggaagagggagacagagtaatcacttacttggaccacagcacacagaaaccactgattgcttgtgtggagaaacagctattaggagaacatttaacagcaattctgcagaaagggctcgaccacttactggatgagaacagagtgccggacctcgcacagatgtaccagctgttcagccgggtgaggggcgggcagcaggcgctgctgcagcactggagcgagtacatcaagacttttggaacagcgatcgtaatcaatcctgagaaagacaaagacatggtccaagacctgttggacttcaaggacaaggtggaccacgtgatcgaggtctgcttccagaagaatgagcggttcgtcaacctgatgaaggagtcctttgagacgttcatcaacaagagacccaacaagcctgcagaactgatcgcaaagcatgtggattcaaagttaagagcaggcaacaaagaagccacagacgaggagctggagcggacgttggacaagatcatgatcctgttcaggtttatccacggtaaagatgtctttgaagcattttataaaaaagatttggcaaaaagactccttgttgggaaaagtgcctcagtcgatgctgaaaagtctatgttgtcaaagctcaagcatgagtgcggtgcagccttcaccagcaagctggaaggcatgttcaaggacatggagctttcgaaggacatcatggttcatttcaagcagcatatgcagaatcagagtgactcaggccctatagacctcacagtgaacatactcacaatgggctactggccaacatacacgcccatggaagtgcacttaaccccagaaatgattaaacttcaggaagtatttaaggcattttatcttggaaagcacagtggtcgaaaacttcagtggcaaactactttgggacatgctgttttaaaagcggagtttaaagaagggaagaaggaattccaggtgtccctcttccagacactggtgctcctcatgttcaacgagggagatggcttcagctttgaggagataaaaatggccacggggatagaggatagtgaattgcgcagaacgctgcagtccctggcctgtggcaaagcacgtgtgctgattaaaagtcccaaaggaaaggaagtggaagatggagacaagttcatttttaatggagagttcaagcacaagttgtttagaataaagatcaatcaaattcagatgaaggaaactgttgaggaacaggttagcaccactgagagagtgtttcaggatagacaatatcagattgatgctgctatcgtcagaataatgaagatgagaaagactcttggtcataatcttctagtttctgaattatataatcagctgaaatttccagtaaagcctggagatttgaaaaagagaattgaatctctgatagacagagactatatggagagagacaaagacaatccgaatcagtaccactacgtggcctgacgcatctgcagacggttccccttcatgaaacactagaatgtaccctcagagcaggaagcacacctgtgccatttctgggactctgattgatccagctgtggacattggaaggcgaaggaagggaggtggctcctgggtcatctttcacaaggctcaagacttcaacctgcagatgtatctttttccctccagtttttcctctagttcttttaggcatttaaattgtttctgttactctgtgcaaaataactttgagattggacaagaagatgttactaaagagaagttcctttaaaaggtcttgttcttgtgtcaaaaagctgcaagtttggtttgttctcgtgtgtgatcatgagtgcacaatgaagaagaccctagatgctgcattttttagctctgaagattccttaggtatccctgaagacagctcgctcagatgatcagcatttagagtgaaaacaagggcccttcatgggtgaacattagaaagagccagggttcaaagctggcgaatggatgacgcaccctagccactggcccctctctgtttcatgtatttccaaaagttgtaaactttgatggctgatttttcgtaagtcaggtttctaagtgagctccctgaggtgccaaggccatggtgtccgccctgctgcgtctgttcgtcagctgagttccttgtgaatctctgttttagggtttggggctagtgtgtttgtgtttccattctaagattgagtctggcagtccctgtttttttgcattggggtaactgctctttgattttttttaattgcagtatttgtgtgattgcaataataaagtttggtttggtttttacagtcatgcgcagggacgatccttgttctctgctgtaaactgtaaaaagtttatggagacttaaagtcttgatgttgtgaagcagaggttattttgtggaaagattaaaaggattttgttggtacctggttttgtgttgtgtatatatacatgaggttgaacagtgaaaggaaagttcagtagtgatgttagaagggtaactatgacaaagatacttttgagataacatttaaaagtactttatattttacataatagcatgtttcattttgattaaaagctaccaaaggaattttgatcatggcataagtgtttaaagcaatattttctggaatataccaagtttatataatttgattttgtgctaaattattaagagtctctttttgaaacatgcgggtttgaaatatgacaccttgtgggtttccatattaaaatcctcactctttaattgtcatttctatctttgaaaattttcatttatgagttccatgatatgtggtctaagaaagaccaaacagatttctatttttttttcttataagttcgttgtgtctagagattgttaatattgtaatttaatgtagacttactttgaataaaattagtttaattggccttaaaattacattaataaaactttgtgatatgcaaaaaaaaaattcttca

SEQ ID NO: 370616 - DNA, 697 bp, Homo sapiens
  misc_feature (1)..(1): n is a, c, g, or t
  misc_feature (44)..(44): n is a, c, g, or t
nttctagccggccgatcccccggccttcagaattcggcacgagnacaaatgatcatgatcagaagcatcttcctgttcttggaccgcacctatgtgctgcagaactccacgctgccctccatctgccaaaatcattaacgtgaacgtaggagtccaggtgggtcttagccttgaaacaccaggtgtctagccagcagcaaggagtggagcaggaagctcggacaggcggctgactttggtcatgagggtgaagacagagggtcttggtttctctctgacgactggaggttgagcctggagcggctctttccagcgctgcagttgaaactcggagaaagactgcctgctgcccgtggggtcgcagccctgaggctgtgcgtcccctgtggaatggcttgctcagcctcccggcctcctgagcacatagcactcatcgtccgtcatctttcggggactgtatacaccaggggttctggggcctttcctcagcagcgttcgcggccacggaccccacatgtcctctgctgacccctgtgtgtcctctgtggccaccccatggcgctgaatcctgccgcctcctgcaagccgactttggacaaaagctgtgtccggtctcaccgtctgatttgtcttgttctctgttaatgtagtgtttcattcttctcacattcatacataaaagtgatgtcgtgccttc

SEQ ID NO: 370617 - DNA, 406 bp, Homo sapiens
ggatccgctccaacatcagaatggtaacacaaacacactagccccaaaccctaaaacagagattcacaaggaactcagctgacgaacagacgcagcagggcgtacaccatggccttggcacctcagggagctcacttagggtttggggctagtgtgtttgtgtttccattctaagattgagtctggcagtccctgtttttttgcattggggtaactgctctttgattttttttaattgcagtatttgtgtgattgcaataataaagtttggtttggtttttacagtcatgcgcagggacgatccttgttctctgctgtaaactgtaaaaagtttatggagacttaaagtcttgatgttgtgaagcagaggttattttgtggaaagattaaaaggattttgttggta

SEQ ID NO: 370618 - DNA, 1536 bp, Homo sapiens
ctgacccttcgtctgccccttgtgaaaaccaggccgcggaggaccctccgcgcctggctgggccagggcctcggggcgcgcgcgcccgaggagggggagggggagggacatggcgcgcgctcccgagctctcataaggtgcctccgccgcgcgctcccgagcctgcaggagttagggcacgtcccggcgcgcacccctgagccctcgaggtggtctcacgcccggggtgggggtgccgagccctcaggaggcgcgcgccccggggccctcaggagggtgtcccggctcccgatcccctcaggaggggtgcccgcggcacgcatccccgagccaggagggggtgcccggagccctgggggcagggtctcggtgcgccccccggagccgggggtgagggtcccgatccctcaggacgggagtcccggcgcgcgccctcgagccaggagaggggtgtccgaatctcttagggggagtccgatccctcaggagggattcccggcgcgcgttcctaagccctcaggagtagccgggcgcggcggcggttgggctcgggcacgcgggcggggcggggcggggcgcgcgaggaggacggggcggaggccgcgcggaccggggcgggcggagcggagctcggcgggcggcggcgctcggggcggggcgcggcggttccggcccagccatggcggacgaggccccgcggaagggcagcttctcggcgctcgtgggccgcaccaacggcctcaccaagcccgcggccctggccgccgcgcccgccaagccggggggcgcgggcggctccaagaagctggtcatcaagaacttccgagacagacctcggctgcccgacaactacacgcaggacacgtggcggaagctgcacgaggcggtgcgggccgtgcagagcagcacctccatcaggtacaacctcgaggagctctaccaggctgtggaaaatctctgttctcacaaagtctccccaatgctctacaagcaactgcgtcaggcctgtgaagaccacgtccaggcacagatccttccgtttagagaaccatctgcattggctttctgtgataggcaacaaagtcccatcgacttggcgacttatggagacacccacttatcagcgcacagttgtgtctgtcaggaggccaggcaggattcagtggattctatgctcagtctcacgggcagagtcaaggtgtcagccaggttggggcctcacctgaggtctttgctagcacgggcaggcagttggcggaagccagttcctgtggtagtgggactgagggccctgccttctgtcccgtgttgcttggtgtcactctcagctccacatgcacaggtccttgcctctcctctcacagcacgactcttttctgcttctagaccagcaggagaatctgcctgtctgacctgctgagatagggccttatatgatgtaacccgtaacccagtcaaggaatgatgaccttcgtattcacagcctcgttcacagttgcgtgtgaggcatcctccacgtggggacagggcaggagc

SEQ ID NO: 370619 - DNA, 838 bp, Homo sapiens
agaggcggcctgattcgcgtcgacaaacgcgccatcgctccctcacattccccgtctcacatcgccacttcctactttgtgagcagaattgaatctctgatagacagagactatatggagagagacaaagacaatccgaatcagtaccactacgtggcctgacgcatctgcagacggttccccttcatgaaacactagaatgtaccctcagagcaggaagcacacctgtgccatttctgggactctgattgatccagctgtggacattggaaggcgaaggaagggaggtggctcctgggtcatctttcacaaggctcaagacttcaacctgcagatgtatctttttccctccagtttttcctctagttcttttaggcatttaaattgtttctgttactctgtgcaaaataactttgagattggacccataccgcatgttccttcatagatgtgtcctccaactaggccctgctcttgtgtgactaccgttgcctttttgtgctcgctgttctgtgtgatcatctactgcacgtcgtcattacgaccctatatgctgcttttgccatactgtgaggacaccttaagaagtccctaattaccgcttcctacaaaggaccgaccatgatattgcatacacaggccctacctggtcggaacttttcaccgattcgccttttgttattctccatcgggtcgaatttcgcttgcccactgtctcgccgtgcgcccacagatgagcaaaacgcgcgatcgcgcgacgatgattgttatgaaacacggatatacgtaagcaccggaagactctgtcgtgcgtatgctcgattgtttcccttgaata

SEQ ID NO: 370620 - DNA, 407 bp, Homo sapiens
ccagggaagtccgggggaaatagtggagagagcggcagccacagcgaagccccacaaccagggtgtgcaggtcacacacagcttccctgagccctttctgcctgtgtaggaagcagaaggcggaatgtcggctctgcccttctccgtaagatggtgcattaaaacgttccttataaactggaaatgaaggcttgggaagatggctaaaatcagcaatccttggaataacgcagaagcatccctgcttccctgggcccgcccgtgggcctgcttgtgctgttcagtaggtggtttttagaaagggcttccttcagcgtcattagcaacaggagtcgtcgtccgtttgcatgaggaaatgttcttaaccttccgtttctgattgcctctagactgcatctgtcatagac

SEQ ID NO: 370621 - DNA, 520 bp, Homo sapiens
agggatgttgagctcttgggagtttgggcttctggaagtcttgggttctcccatcacatggggactttggtcctccctcccaagccacctgacgatggcttgtgcagcctcagaaacaggaagcccgagtagaaatgctttcaccctgcgttgccaccttggatgctctgagaaagtctttctctttgagaatgtctcctctgcattcatgacaccagatcctagaaataggcactccagcgtccggggcagtcacgtcctgaaacctgagcatgtatttgctgaagtcattttattttgaaattcagagattgcatttaaagataagaaagatatttaaacctgctttaaacattcagtcctggcttcattaaaattttggcaagtatttactctcacttgacttgagaagtacttaccttagaaaatcagatatttgtttttttgtcatatagtcattttgggaaggttccagaatgttcctgtacaatgtgccgtcgtgcctccgggatcctctgga

SEQ ID NO: 370622 - DNA, 3779 bp, Homo sapiens
cccgcccgacttggggggaaggccccgagatccgtgcgggccccgggagcgggggcgccggggcgccggccgggtcgggggtggctacgcggggcgcttcgcggcgcgccctgagccgcccgctctccctccgccctgcagacagacctcggctgcccgacaactacacgcaggacacgtggcggaagctgcacgaggcggtgcgggccgtgcagagcagcacctccatcaggtacaacctcgaggagctctaccaggctgtggaaaatctctgttctcacaaagtctccccaatgctctacaagcaactgcgtcaggcctgtgaagaccacgtccaggcacagatccttccgtttagagaagactcactagatagtgttttatttttaaagaagattaacacgtgctggcaggaccactgcagacaaatgatcatgatcagaagcatcttcctgttcttggaccgcacctatgtgctgcagaactccacgctgccctccatctgggatatgggattagaactgtttagaacccatattattagtgataaaatggttcagagtaaaaccattgatggaatcctactgctgatcgagcgcgagaggagcggcgaggccgtggaccggagcctgttgcggagcctcctgggcatgctgtctgacctgcaggtgtataaagattcatttgaactgaaatttttggaagagactaattgcttatatgctgccgaaggccaaaggttaatgcaggaaagagaggttccagaatatcttaaccatgtaagtaaacgcttagaggaagagggagacagagtaatcacttacttggaccacagcacacagaaaccactgattgcttgtgtggagaaacagctattaggagaacatttaacagcaattctgcagaaagggctcgaccacttactggatgagaacagagtgccggacctcgcacagatgtaccagctgttcagccgggtgaggggcgggcagcaggcgctgctgcagcactggagcgagtacatcaagacttttggaacagcgatcgtaatcaatcctgagaaagacaaagacatggtccaagacctgttggacttcaaggacaaggtggaccacgtgatcgaggtctgcttccagaagaatgagcggttcgtcaacctgatgaaggagtcctttgagacgttcatcaacaagagacccaacaagcctgcagaactgatcgcaaagcatgtggattcaaagttaagagcaggcaacaaagaagccacagacgaggagctggagcggacgttggacaagatcatgatcctgttcaggtttatccacggtaaagatgtctttgaagcattttataaaaaagatttggcaaaaagactccttgttgggaaaagtgcctcagtcgatgctgaaaagtctatgttgtcaaagctcaagcatgagtgcggtgcagccttcaccagcaagctggaaggcatgttcaaggacatggagctttcgaaggacatcatggttcatttcaagcagcatatgcagaatcagagtgactcaggccctatagacctcacagtgaacatactcacaatgggctactggccaacatacacgcccatggaagtgcacttaaccccagaaatgattaaacttcaggaagtatttaaggcattttatcttggaaagcacagtggtcgaaaacttcagtggcaaactactttgggacatgctgttttaaaagcggagtttaaagaagggaagaaggaattccaggtgtccctcttccagacactggtgctcctcatgttcaacgagggagatggcttcagctttgaggagataaaaatggccacggggatagaggatagtgaattgcgcagaacgctgcagtccctggcctgtggcaaagcacgtgtgctgattaaaagtcccaaaggaaaggaagtggaagatggagacaagttcatttttaatggagagttcaagcacaagttgtttagaataaagatcaatcaaattcagatgaaggaaactgttgaggaacaggttagcaccactgagagagtgtttcaggatagacaatatcagattgatgctgctatcgtcagaataatgaagatgagaaagactcttggtcataatcttctagtttctgaattatataatcagctgaaatttccagtaaagcctggagatttgaaaaagagaattgaatctctgatagacagagactatatggagagagacaaagacaatccgaatcagtaccactacgtggcctgacgcatctgcagacggttccccttcatgaaacactagaatgtaccctcagagcaggaagcacacctgtgccatttctgggactctgattgatccagctgtggacattggaaggcgaaggaagggaggtggctcctgggtcatctttcacaaggctcaagacttcaacctgcagatgtatctttttccctccagtttttcctctagttcttttaggcatttaaattgtttctgttactctgtgcaaaataactttgagattggacaagaagatgttactaaagagaagttcctttaaaaggtcttgttcttgtgtcaaaaagctgcaagtttggtttgttctcgtgtgtgatcatgagtgcacaatgaagaagaccctagatgctgcattttttagctctgaagattccttaggtatccctgaagacagctcgctcagatgatcagcatttagagtgaaaacaagggcccttcatgggtgaacattagaaagagccagggttcaaagctggcgaatggatgacgcaccctagccactggcccctctctgtttcatgtatttccaaaagttgtaaactttgatggctgatttttcgtaagtcaggtttctaagtgagctccctgaggtgccaaggccatggtgtccgccctgctgcgtctgttcgtcagctgagttccttgtgaatctctgttttagggtttggggctagtgtgtttgtgtttccattctaagattgagtctggcagtccctgtttttttgcattggggtaactgctctttgattttttttaattgcagtatttgtgtgattgcaataataaagtttggtttggtttttacagtcatgcgcagggacgatccttgttctctgctgtaaactgtaaaaagtttatggagacttaaagtcttgatgttgtgaagcagaggttattttgtggaaagattaaaaggattttgttggtacctggttttgtgttgtgtatatatacatgaggttgaacagtgaaaggaaagttcagtagtgatgttagaagggtaactatgacaaagatacttttgagataacatttaaaagtactttatattttacataatagcatgtttcattttgattaaaagctaccaaaggaattttgatcatggcataagtgtttaaagcaatattttctggaatataccaagtttatataatttgattttgtgctaaattattaagagtctctttttgaaacatgcgggtttgaaatatgacaccttgtgggtttccatattaaaatcctcactctttaattgtcatttctatctttgaaaattttcatttatgagttccatgatatgtggtctaagaaagaccaaacagatttctatttttttttcttataagttcgttgtgtctagagattgttaatattgtaatttaatgtagacttactttgaataaaattagtttaattggccttaaaattacattaataaaactttgtgatatgcaaaaaaaaaattcttca

SEQ ID NO: 370623 - DNA, 3756 bp, Homo sapiens
acattaactgttgttacctctacccccatgccaactatgactggactgcagtgttccaacgagaagtgccctaaacttagccataataagtaatttatttgtagattcctgaagtactggggtagggtgtggggtgcctttttcttatgattacagctatgttaacaatagggtttttttatgaaccaatctgttgttcatactgaagaattgatgtagcccttttgtttgcaggctgtggaaaatctctgttctcacaaagtctccccaatgctctacaagcaactgcgtcaggcctgtgaagaccacgtccaggcacagatccttccgtttagagaagactcactagatagtgttttatttttaaagaagattaacacgtgctggcaggaccactgcagacaaatgatcatgatcagaagcatcttcctgttcttggaccgcacctatgtgctgcagaactccacgctgccctccatctgggatatgggattagaactgtttagaacccatattattagtgataaaatggttcagagtaaaaccattgatggaatcctactgctgatcgagcgcgagaggagcggcgaggccgtggaccggagcctgttgcggagcctcctgggcatgctgtctgacctgcaggtgtataaagattcatttgaactgaaatttttggaagagactaattgcttatatgctgccgaaggccaaaggttaatgcaggaaagagaggttccagaatatcttaaccatgtaagtaaacgcttagaggaagagggagacagagtaatcacttacttggaccacagcacacagaaaccactgattgcttgtgtggagaaacagctattaggagaacatttaacagcaattctgcagaaagggctcgaccacttactggatgagaacagagtgccggacctcgcacagatgtaccagctgttcagccgggtgaggggcgggcagcaggcgctgctgcagcactggagcgagtacatcaagacttttggaacagcgatcgtaatcaatcctgagaaagacaaagacatggtccaagacctgttggacttcaaggacaaggtggaccacgtgatcgaggtctgcttccagaagaatgagcggttcgtcaacctgatgaaggagtcctttgagacgttcatcaacaagagacccaacaagcctgcagaactgatcgcaaagcatgtggattcaaagttaagagcaggcaacaaagaagccacagacgaggagctggagcggacgttggacaagatcatgatcctgttcaggtttatccacggtaaagatgtctttgaagcattttataaaaaagatttggcaaaaagactccttgttgggaaaagtgcctcagtcgatgctgaaaagtctatgttgtcaaagctcaagcatgagtgcggtgcagccttcaccagcaagctggaaggcatgttcaaggacatggagctttcgaaggacatcatggttcatttcaagcagcatatgcagaatcagagtgactcaggccctatagacctcacagtgaacatactcacaatgggctactggccaacatacacgcccatggaagtgcacttaaccccagaaatgattaaacttcaggaagtatttaaggcattttatcttggaaagcacagtggtcgaaaacttcagtggcaaactactttgggacatgctgttttaaaagcggagtttaaagaagggaagaaggaattccaggtgtccctcttccagacactggtgctcctcatgttcaacgagggagatggcttcagctttgaggagataaaaatggccacggggatagaggatagtgaattgcgcagaacgctgcagtccctggcctgtggcaaagcacgtgtgctgattaaaagtcccaaaggaaaggaagtggaagatggagacaagttcatttttaatggagagttcaagcacaagttgtttagaataaagatcaatcaaattcagatgaaggaaactgttgaggaacaggttagcaccactgagagagtgtttcaggatagacaatatcagattgatgctgctatcgtcagaataatgaagatgagaaagactcttggtcataatcttctagtttctgaattatataatcagctgaaatttccagtaaagcctggagatttgaaaaagagaattgaatctctgatagacagagactatatggagagagacaaagacaatccgaatcagtaccactacgtggcctgacgcatctgcagacggttccccttcatgaaacactagaatgtaccctcagagcaggaagcacacctgtgccatttctgggactctgattgatccagctgtggacattggaaggcgaaggaagggaggtggctcctgggtcatctttcacaaggctcaagacttcaacctgcagatgtatctttttccctccagtttttcctctagttcttttaggcatttaaattgtttctgttactctgtgcaaaataactttgagattggacaagaagatgttactaaagagaagttcctttaaaaggtcttgttcttgtgtcaaaaagctgcaagtttggtttgttctcgtgtgtgatcatgagtgcacaatgaagaagaccctagatgctgcattttttagctctgaagattccttaggtatccctgaagacagctcgctcagatgatcagcatttagagtgaaaacaagggcccttcatgggtgaacattagaaagagccagggttcaaagctggcgaatggatgacgcaccctagccactggcccctctctgtttcatgtatttccaaaagttgtaaactttgatggctgatttttcgtaagtcaggtttctaagtgagctccctgaggtgccaaggccatggtgtccgccctgctgcgtctgttcgtcagctgagttccttgtgaatctctgttttagggtttggggctagtgtgtttgtgtttccattctaagattgagtctggcagtccctgtttttttgcattggggtaactgctctttgattttttttaattgcagtatttgtgtgattgcaataataaagtttggtttggtttttacagtcatgcgcagggacgatccttgttctctgctgtaaactgtaaaaagtttatggagacttaaagtcttgatgttgtgaagcagaggttattttgtggaaagattaaaaggattttgttggtacctggttttgtgttgtgtatatatacatgaggttgaacagtgaaaggaaagttcagtagtgatgttagaagggtaactatgacaaagatacttttgagataacatttaaaagtactttatattttacataatagcatgtttcattttgattaaaagctaccaaaggaattttgatcatggcataagtgtttaaagcaatattttctggaatataccaagtttatataatttgattttgtgctaaattattaagagtctctttttgaaacatgcgggtttgaaatatgacaccttgtgggtttccatattaaaatcctcactctttaattgtcatttctatctttgaaaattttcatttatgagttccatgatatgtggtctaagaaagaccaaacagatttctatttttttttcttataagttcgttgtgtctagagattgttaatattgtaatttaatgtagacttactttgaataaaattagtttaattggccttaaaattacattaataaaactttgtgatatgcaaaaaaaaaattcttca

SEQ ID NO: 370624 - DNA, 4410 bp, Homo sapiens
ctgacccttcgtctgccccttgtgaaaaccaggccgcggaggaccctccgcgcctggctgggccagggcctcggggcgcgcgcgcccgaggagggggagggggagggacatggcgcgcgctcccgagctctcataaggtgcctccgccgcgcgctcccgagcctgcaggagttagggcacgtcccggcgcgcacccctgagccctcgaggtggtctcacgcccggggtgggggtgccgagccctcaggaggcgcgcgccccggggccctcaggagggtgtcccggctcccgatcccctcaggaggggtgcccgcggcacgcatccccgagccaggagggggtgcccggagccctgggggcagggtctcggtgcgccccccggagccgggggtgagggtcccgatccctcaggacgggagtcccggcgcgcgccctcgagccaggagaggggtgtccgaatctcttagggggagtccgatccctcaggagggattcccggcgcgcgttcctaagccctcaggagtagccgggcgcggcggcggttgggctcgggcacgcgggcggggcggggcggggcgcgcgaggaggacggggcggaggccgcgcggaccggggcgggcggagcggagctcggcgggcggcggcgctcggggcggggcgcggcggttccggcccagccatggcggacgaggccccgcggaagggcagcttctcggcgctcgtgggccgcaccaacggcctcaccaagcccgcggccctggccgccgcgcccgccaagccggggggcgcgggcggctccaagaagctggtcatcaagaacttccgagacagacctcggctgcccgacaactacacgcaggacacgtggcggaagctgcacgaggcggtgcgggccgtgcagagcagcacctccatcaggtacaacctcgaggagctctaccaggctgtggaaaatctctgttctcacaaagtctccccaatgctctacaagcaactgcgtcaggcctgtgaagaccacgtccaggcacagatccttccgtttagagaagactcactagatagtgttttatttttaaagaagattaacacgtgctggcaggaccactgcagacaaatgatcatgatcagaagcatcttcctgttcttggaccgcacctatgtgctgcagaactccacgctgccctccatctgggatatgggattagaactgtttagaacccatattattagtgataaaatggttcagagtaaaaccattgatggaatcctactgctgatcgagcgcgagaggagcggcgaggccgtggaccggagcctgttgcggagcctcctgggcatgctgtctgacctgcaggtgtataaagattcatttgaactgaaatttttggaagagactaattgcttatatgctgccgaaggccaaaggttaatgcaggaaagagaggttccagaatatcttaaccatgtaagtaaacgcttagaggaagagggagacagagtaatcacttacttggaccacagcacacagaaaccactgattgcttgtgtggagaaacagctattaggagaacatttaacagcaattctgcagaaagggctcgaccacttactggatgagaacagagtgccggacctcgcacagatgtaccagctgttcagccgggtgaggggcgggcagcaggcgctgctgcagcactggagcgagtacatcaagacttttggaacagcgatcgtaatcaatcctgagaaagacaaagacatggtccaagacctgttggacttcaaggacaaggtggaccacgtgatcgaggtctgcttccagaagaatgagcggttcgtcaacctgatgaaggagtcctttgagacgttcatcaacaagagacccaacaagcctgcagaactgatcgcaaagcatgtggattcaaagttaagagcaggcaacaaagaagccacagacgaggagctggagcggacgttggacaagatcatgatcctgttcaggtttatccacggtaaagatgtctttgaagcattttataaaaaagatttggcaaaaagactccttgttgggaaaagtgcctcagtcgatgctgaaaagtctatgttgtcaaagctcaagcatgagtgcggtgcagccttcaccagcaagctggaaggcatgttcaaggacatggagctttcgaaggacatcatggttcatttcaagcagcatatgcagaatcagagtgactcaggccctatagacctcacagtgaacatactcacaatgggctactggccaacatacacgcccatggaagtgcacttaaccccagaaatgattaaacttcaggaagtatttaaggcattttatcttggaaagcacagtggtcgaaaacttcagtggcaaactactttgggacatgctgttttaaaagcggagtttaaagaagggaagaaggaattccaggtgtccctcttccagacactggtgctcctcatgttcaacgagggagatggcttcagctttgaggagataaaaatggccacggggatagaggatagtgaattgcgcagaacgctgcagtccctggcctgtggcaaagcacgtgtgctgattaaaagtcccaaaggaaaggaagtggaagatggagacaagttcatttttaatggagagttcaagcacaagttgtttagaataaagatcaatcaaattcagatgaaggaaactgttgaggaacaggttagcaccactgagagagtgtttcaggatagacaatatcagattgatgctgctatcgtcagaataatgaagatgagaaagactcttggtcataatcttctagtttctgaattatataatcagctgaaatttccagtaaagcctggagatttgaaaaagagaattgaatctctgatagacagagactatatggagagagacaaagacaatccgaatcagtaccactacgtggcctgacgcatctgcagacggttccccttcatgaaacactagaatgtaccctcagagcaggaagcacacctgtgccatttctgggactctgattgatccagctgtggacattggaaggcgaaggaagggaggtggctcctgggtcatctttcacaaggctcaagacttcaacctgcagatgtatctttttccctccagtttttcctctagttcttttaggcatttaaattgtttctgttactctgtgcaaaataactttgagattggacaagaagatgttactaaagagaagttcctttaaaaggtcttgttcttgtgtcagaccctagatgctgcattttttagctctgaagattccttaggtatccctgaagacagctcgctcagatgatcagcatttagagtgaaaacaagggcccttcatgggtgaacattagaaagagccagggttcaaagctggcgaatggatgacgcaccctagccactggcccctctctgtttcatgtatttccaaaagttgtaaactttgatggctgatttttcgtaagtcaggtttctaagtgagctccctgaggtgccaaggccatggtgtccgccctgctgcgtctgttcgtcagctgagttccttgtgaatctctgttttagggtttggggctagtgtgtttgtgtttccattctaagattgagtctggcagtccctgtttttttgcattggggtaactgctctttgattttttttaattgcagtatttgtgtgattgcaataataaagtttggtttggtttttacagtcatgcgcagggacgatccttgttctctgctgtaaactgtaaaaagtttatggagacttaaagtcttgatgttgtgaagcagaggttattttgtggaaagattaaaaggattttgttggtacctggttttgtgttgtgtatatatacatgaggttgaacagtgaaaggaaagttcagtagtgatgttagaagggtaactatgacaaagatacttttgagataacatttaaaagtactttatattttacataatagcatgtttcattttgattaaaagctaccaaaggaattttgatcatggcataagtgtttaaagcaatattttctggaatataccaagtttatataatttgattttgtgctaaattattaagagtctctttttgaaacatgcgggtttgaaatatgacaccttgtgggtttccatattaaaatcctcactctttaattgtcatttctatctttgaaaattttcatttatgagttccatgatatgtggtctaagaaagaccaaacagatttctatttttttttcttataagttcgttgtgtctagagattgttaatattgtaatttaatgtagacttactttgaataaaattagtttaattggccttaaaattacattaataaaactttgtgatatgcaaaaaaaaaattcttca

SEQ ID NO: 370625 - DNA, 4393 bp, Homo sapiens
ctgacccttcgtctgccccttgtgaaaaccaggccgcggaggaccctccgcgcctggctgggccagggcctcggggcgcgcgcgcccgaggagggggagggggagggacatggcgcgcgctcccgagctctcataaggtgcctccgccgcgcgctcccgagcctgcaggagttagggcacgtcccggcgcgcacccctgagccctcgaggtggtctcacgcccggggtgggggtgccgagccctcaggaggcgcgcgccccggggccctcaggagggtgtcccggctcccgatcccctcaggaggggtgcccgcggcacgcatccccgagccaggagggggtgcccggagccctgggggcagggtctcggtgcgccccccggagccgggggtgagggtcccgatccctcaggacgggagtcccggcgcgcgccctcgagccaggagaggggtgtccgaatctcttagggggagtccgatccctcaggagggattcccggcgcgcgttcctaagccctcaggagtagccgggcgcggcggcggttgggctcgggcacgcgggcggggcggggcggggcgcgcgaggaggacggggcggaggccgcgcggaccggggcgggcggagcggagctcggcgggcggcggcgctcggggcggggcgcggcggttccggcccagccatggcggacgaggccccgcggaagggcagcttctcggcgctcgtgggccgcaccaacggcctcaccaagcccgcggccctggccgccgcgcccgccaagccggggggcgcgggcggctccaagaagctggtcatcaagaacttccgagacagacctcggctgcccgacaactacacgcaggacacgtggcggaagctgcacgaggcggtgcgggccgtgcagagcagcacctccatcaggtacaacctcgaggagctctaccaggctgtggaaaatctctgttctcacaaagtctccccaatgctctacaagcaactgcgtcaggcctgtgaagaccacgtccaggcacagatccttccgtttagagaagactcactagatagtgttttatttttaaagaagattaacacgtgctggcaggaccactgcagacaaatgatcatgatcagaagcatcttcctgttcttggaccgcacctatgtgctgcagaactccacgctgccctccatctgggatatgggattagaactgtttagaacccatattattagtgataaaatggttcagagtaaaaccattgatggaatcctactgctgatcgagcgcgagaggagcggcgaggccgtggaccggagcctgttgcggagcctcctgggcatgctgtctgacctgcaggtgtataaagattcatttgaactgaaatttttggaagagactaattgcttatatgctgccgaaggccaaaggttaatgcaggaaagagaggttccagaatatcttaaccatgtaagtaaacgcttagaggaagagggagacagagtaatcacttacttggaccacagcacacagaaaccactgattgcttgtgtggagaaacagctattaggagaacatttaacagcaattctgcagaaagggctcgaccacttactggatgagaacagagtgccggacctcgcacagatgtaccagctgttcagccgggtgaggggcgggcagcaggcgctgctgcagcactggagcgagtacatcaagacttttggaacagcgatcgtaatcaatcctgagaaagacaaagacatggtccaagacctgttggacttcaaggacaaggtggaccacgtgatcgaggtctgcttccagaagaatgagcggttcgtcaacctgatgaaggagtcctttgagacgttcatcaacaagagacccaacaagcctgcagaactgatcgcaaagcatgtggattcaaagttaagagcaggcaacaaagaagccacagacgaggagctggagcggacgttggacaagatcatgatcctgttcaggtttatccacggtaaagatgtctttgaagcattttataaaaaagatttggcaaaaagactccttgttgggaaaagtgcctcagtcgatgctgaaaagtctatgttgtcaaagctcaagcatgagtgcggtgcagccttcaccagcaagctggaaggcatgttcaaggacatggagctttcgaaggacatcatggttcatttcaagcagcatatgcagaatcagagtgactcaggccctatagacctcacagtgaacatactcacaatgggctactggccaacatacacgcccatggaagtgcacttaaccccagaaatgattaaacttcaggaagtatttaaggcattttatcttggaaagcacagtggtcgaaaacttcagtggcaaactactttgggacatgctgttttaaaagcggagtttaaagaagggaagaaggaattccaggtgtccctcttccagacactggtgctcctcatgttcaacgagggagatggcttcagctttgaggagataaaaatggccacggggatagaggatagtgaattgcgcagaacgctgcagtccctggcctgtggcaaagcacgtgtgctgattaaaagtcccaaaggaaaggaagtggaagatggagacaagttcatttttaatggagagttcaagcacaagttgtttagaataaagatcaatcaaattcagatgaaggaaactgttgaggaacaggttagcaccactgagagagtgtttcaggatagacaatatcagattgatgctgctatcgtcagaataatgaagatgagaaagactcttggtcataatcttctagtttctgaattatataatcagctgaaatttccagtaaagcctggagatttgaaaaagagaattgaatctctgatagacagagactatatggagagagacaaagacaatccgaatcagtaccactacgtggcctgacgcatctgcagacggttccccttcatgaaacactagaatgtaccctcagagcaggaagcacacctgtgccatttctgggactctgattgatccagctgtggacattggaaggcgaaggaagggaggtggctcctgggtcatctttcacaaggctcaagacttcaacctgcagatgtatctttttccctccagtttttcctctagttcttttaggcatttaaattgtttctgttactctgtgcaaaataactttgagattggacaagaagatgttactaaagagaagttcctttaaaaggtcttgttcttgtgtcaaaaagctgcaagtttggtttgttctcgtgtgtgatcatgagtgcacaatgaagaagaccctagatgctgcattttttagctctgaagattccttaggtatccctgaagacagctcgctcaggcgaatggatgacgcaccctagccactggcccctctctgtttcatgtatttccaaaagttgtaaactttgatggctgatttttcgtaagtcaggtttctaagtgagctccctgaggtgccaaggccatggtgtccgccctgctgcgtctgttcgtcagctgagttccttgtgaatctctgttttagggtttggggctagtgtgtttgtgtttccattctaagattgagtctggcagtccctgtttttttgcattggggtaactgctctttgattttttttaattgcagtatttgtgtgattgcaataataaagtttggtttggtttttacagtcatgcgcagggacgatccttgttctctgctgtaaactgtaaaaagtttatggagacttaaagtcttgatgttgtgaagcagaggttattttgtggaaagattaaaaggattttgttggtacctggttttgtgttgtgtatatatacatgaggttgaacagtgaaaggaaagttcagtagtgatgttagaagggtaactatgacaaagatacttttgagataacatttaaaagtactttatattttacataatagcatgtttcattttgattaaaagctaccaaaggaattttgatcatggcataagtgtttaaagcaatattttctggaatataccaagtttatataatttgattttgtgctaaattattaagagtctctttttgaaacatgcgggtttgaaatatgacaccttgtgggtttccatattaaaatcctcactctttaattgtcatttctatctttgaaaattttcatttatgagttccatgatatgtggtctaagaaagaccaaacagatttctatttttttttcttataagttcgttgtgtctagagattgttaatattgtaatttaatgtagacttactttgaataaaattagtttaattggccttaaaattacattaataaaactttgtgatatgcaaaaaaaaaattcttca

SEQ ID NO: 370626 - DNA, 4312 bp, Homo sapiens
ctgacccttcgtctgccccttgtgaaaaccaggccgcggaggaccctccgcgcctggctgggccagggcctcggggcgcgcgcgcccgaggagggggagggggagggacatggcgcgcgctcccgagctctcataaggtgcctccgccgcgcgctcccgagcctgcaggagttagggcacgtcccggcgcgcacccctgagccctcgaggtggtctcacgcccggggtgggggtgccgagccctcaggaggcgcgcgccccggggccctcaggagggtgtcccggctcccgatcccctcaggaggggtgcccgcggcacgcatccccgagccaggagggggtgcccggagccctgggggcagggtctcggtgcgccccccggagccgggggtgagggtcccgatccctcaggacgggagtcccggcgcgcgccctcgagccaggagaggggtgtccgaatctcttagggggagtccgatccctcaggagggattcccggcgcgcgttcctaagccctcaggagtagccgggcgcggcggcggttgggctcgggcacgcgggcggggcggggcggggcgcgcgaggaggacggggcggaggccgcgcggaccggggcgggcggagcggagctcggcgggcggcggcgctcggggcggggcgcggcggttccggcccagccatggcggacgaggccccgcggaagggcagcttctcggcgctcgtgggccgcaccaacggcctcaccaagcccgcggccctggccgccgcgcccgccaagccggggggcgcgggcggctccaagaagctggtcatcaagaacttccgagacagacctcggctgcccgacaactacacgcaggacacgtggcggaagctgcacgaggcggtgcgggccgtgcagagcagcacctccatcaggtacaacctcgaggagctctaccaggctgtggaaaatctctgttctcacaaagtctccccaatgctctacaagcaactgcgtcaggcctgtgaagaccacgtccaggcacagatccttccgtttagagaagactcactagatagtgttttatttttaaagaagattaacacgtgctggcaggaccactgcagacaaatgatcatgatcagaagcatcttcctgttcttggaccgcacctatgtgctgcagaactccacgctgccctccatctgggatatgggattagaactgtttagaacccatattattagtgataaaatggttcagagtaaaaccattgatggaatcctactgctgatcgagcgcgagaggagcggcgaggccgtggaccggagcctgttgcggagcctcctgggcatgctgtctgacctgcaggtgtataaagattcatttgaactgaaatttttggaagagactaattgcttatatgctgccgaaggccaaaggttaatgcaggaaagagaggttccagaatatcttaaccatgtaagtaaacgcttagaggaagagggagacagagtaatcacttacttggaccacagcacacagaaaccactgattgcttgtgtggagaaacagctattaggagaacatttaacagcaattctgcagaaagggctcgaccacttactggatgagaacagagtgccggacctcgcacagatgtaccagctgttcagccgggtgaggggcgggcagcaggcgctgctgcagcactggagcgagtacatcaagacttttggaacagcgatcgtaatcaatcctgagaaagacaaagacatggtccaagacctgttggacttcaaggacaaggtggaccacgtgatcgaggtctgcttccagaagaatgagcggttcgtcaacctgatgaaggagtcctttgagacgttcatcaacaagagacccaacaagcctgcagaactgatcgcaaagcatgtggattcaaagttaagagcaggcaacaaagaagccacagacgaggagctggagcggacgttggacaagatcatgatcctgttcaggtttatccacggtaaagatgtctttgaagcattttataaaaaagatttggcaaaaagactccttgttgggaaaagtgcctcagtcgatgctgaaaagtctatgttgtcaaagctcaagcatgagtgcggtgcagccttcaccagcaagctggaaggcatgttcaaggacatggagctttcgaaggacatcatggttcatttcaagcagcatatgcagaatcagagtgactcaggccctatagacctcacagtgaacatactcacaatgggctactggccaacatacacgcccatggaagtgcacttaaccccagaaatgattaaacttcaggaagtatttaaggcattttatcttggaaagcacagtggtcgaaaacttcagtggcaaactactttgggacatgctgttttaaaagcggagtttaaagaagggaagaaggaattccaggtgtccctcttccagacactggtgctcctcatgttcaacgagggagatggcttcagctttgaggagataaaaatggccacggggatagaggatagtgaattgcgcagaacgctgcagtccctggcctgtggcaaagcacgtgtgctgattaaaagtcccaaaggaaaggaagtggaagatggagacaagttcatttttaatggagagttcaagcacaagttgtttagaataaagatcaatcaaattcagatgaaggaaactcctggagatttgaaaaagagaattgaatctctgatagacagagactatatggagagagacaaagacaatccgaatcagtaccactacgtggcctgacgcatctgcagacggttccccttcatgaaacactagaatgtaccctcagagcaggaagcacacctgtgccatttctgggactctgattgatccagctgtggacattggaaggcgaaggaagggaggtggctcctgggtcatctttcacaaggctcaagacttcaacctgcagatgtatctttttccctccagtttttcctctagttcttttaggcatttaaattgtttctgttactctgtgcaaaataactttgagattggacaagaagatgttactaaagagaagttcctttaaaaggtcttgttcttgtgtcaaaaagctgcaagtttggtttgttctcgtgtgtgatcatgagtgcacaatgaagaagaccctagatgctgcattttttagctctgaagattccttaggtatccctgaagacagctcgctcagatgatcagcatttagagtgaaaacaagggcccttcatgggtgaacattagaaagagccagggttcaaagctggcgaatggatgacgcaccctagccactggcccctctctgtttcatgtatttccaaaagttgtaaactttgatggctgatttttcgtaagtcaggtttctaagtgagctccctgaggtgccaaggccatggtgtccgccctgctgcgtctgttcgtcagctgagttccttgtgaatctctgttttagggtttggggctagtgtgtttgtgtttccattctaagattgagtctggcagtccctgtttttttgcattggggtaactgctctttgattttttttaattgcagtatttgtgtgattgcaataataaagtttggtttggtttttacagtcatgcgcagggacgatccttgttctctgctgtaaactgtaaaaagtttatggagacttaaagtcttgatgttgtgaagcagaggttattttgtggaaagattaaaaggattttgttggtacctggttttgtgttgtgtatatatacatgaggttgaacagtgaaaggaaagttcagtagtgatgttagaagggtaactatgacaaagatacttttgagataacatttaaaagtactttatattttacataatagcatgtttcattttgattaaaagctaccaaaggaattttgatcatggcataagtgtttaaagcaatattttctggaatataccaagtttatataatttgattttgtgctaaattattaagagtctctttttgaaacatgcgggtttgaaatatgacaccttgtgggtttccatattaaaatcctcactctttaattgtcatttctatctttgaaaattttcatttatgagttccatgatatgtggtctaagaaagaccaaacagatttctatttttttttcttataagttcgttgtgtctagagattgttaatattgtaatttaatgtagacttactttgaataaaattagtttaattggccttaaaattacattaataaaactttgtgatatgcaaaaaaaaaattcttca

SEQ ID NO: 370627 - DNA, 3114 bp, Homo sapiens
  misc_feature (18)..(18): n is a, c, g, or t
  misc_feature (30)..(30): n is a, c, g, or t
gggtcagcttgtaatgangtgcccagagtnacctctcgcgagttttttacatagtcatgaggggcgggcgttagtttgatttgactggccgtcgttccagaatatcttaaccatgtaagtaaacgcttagaggaagagggagacagagtaatcacttacttggaccacagcacacagaaaccactgattgcttgtgtggagaaacagctattaggagaacatttaacagcaattctgcagaaagggctcgaccacttactggatgagaacagagtgccggacctcgcacagatgtaccagctgttcagccgggtgaggggcgggcagcaggcgctgctgcagcactggagcgagtacatcaagacttttggaacagcgatcgtaatcaatcctgagaaagacaaagacatggtccaagacctgttggacttcaaggacaaggtggaccacgtgatcgaggtctgcttccagaagaatgagcggttcgtcaacctgatgaaggagtcctttgagacgttcatcaacaagagacccaacaagcctgcagaactgatcgcaaagcatgtggattcaaagttaagagcaggcaacaaagaagccacagacgaggagctggagcggacgttggacaagatcatgatcctgttcaggtttatccacggtaaagatgtctttgaagcattttataaaaaagatttggcaaaaagactccttgttgggaaaagtgcctcagtcgatgctgaaaagtctatgttgtcaaagctcaagcatgagtgcggtgcagccttcaccagcaagctggaaggcatgttcaaggacatggagctttcgaaggacatcatggttcatttcaagcagcatatgcagaatcagagtgactcaggccctatagacctcacagtgaacatactcacaatgggctactggccaacatacacgcccatggaagtgcacttaaccccagaaatgattaaacttcaggaagtatttaaggcattttatcttggaaagcacagtggtcgaaaacttcagtggcaaactactttgggacatgctgttttaaaagcggagtttaaagaagggaagaaggaattccaggtgtccctcttccagacactggtgctcctcatgttcaacgagggagatggcttcagctttgaggagataaaaatggccacggggatagaggatagtgaattgcgcagaacgctgcagtccctggcctgtggcaaagcacgtgtgctgattaaaagtcccaaaggaaaggaagtggaagatggagacaagttcatttttaatggagagttcaagcacaagttgtttagaataaagatcaatcaaattcagatgaaggaaactgttgaggaacaggttagcaccactgagagagtgtttcaggatagacaatatcagattgatgctgctatcgtcagaataatgaagatgagaaagactcttggtcataatcttctagtttctgaattatataatcagctgaaatttccagtaaagcctggagatttgaaaaagagaattgaatctctgatagacagagactatatggagagagacaaagacaatccgaatcagtaccactacgtggcctgacgcatctgcagacggttccccttcatgaaacactagaatgtaccctcagagcaggaagcacacctgtgccatttctgggactctgattgatccagctgtggacattggaaggcgaaggaagggaggtggctcctgggtcatctttcacaaggctcaagacttcaacctgcagatgtatctttttccctccagtttttcctctagttcttttaggcatttaaattgtttctgttactctgtgcaaaataactttgagattggacaagaagatgttactaaagagaagttcctttaaaaggtcttgttcttgtgtcaaaaagctgcaagtttggtttgttctcgtgtgtgatcatgagtgcacaatgaagaagaccctagatgctgcattttttagctctgaagattccttaggtatccctgaagacagctcgctcagatgatcagcatttagagtgaaaacaagggcccttcatgggtgaacattagaaagagccagggttcaaagctggcgaatggatgacgcaccctagccactggcccctctctgtttcatgtatttccaaaagttgtaaactttgatggctgatttttcgtaagtcaggtttctaagtgagctccctgaggtgccaaggccatggtgtccgccctgctgcgtctgttcgtcagctgagttccttgtgaatctctgttttagggtttggggctagtgtgtttgtgtttccattctaagattgagtctggcagtccctgtttttttgcattggggtaactgctctttgattttttttaattgcagtatttgtgtgattgcaataataaagtttggtttggtttttacagtcatgcgcagggacgatccttgttctctgctgtaaactgtaaaaagtttatggagacttaaagtcttgatgttgtgaagcagaggttattttgtggaaagattaaaaggattttgttggtacctggttttgtgttgtgtatatatacatgaggttgaacagtgaaaggaaagttcagtagtgatgttagaagggtaactatgacaaagatacttttgagataacatttaaaagtactttatattttacataatagcatgtttcattttgattaaaagctaccaaaggaattttgatcatggcataagtgtttaaagcaatattttctggaatataccaagtttatataatttgattttgtgctaaattattaagagtctctttttgaaacatgcgggtttgaaatatgacaccttgtgggtttccatattaaaatcctcactctttaattgtcatttctatctttgaaaattttcatttatgagttccatgatatgtggtctaagaaagaccaaacagatttctatttttttttcttataagttcgttgtgtctagagattgttaatattgtaatttaatgtagacttactttgaataaaattagtttaattggccttaaaattacattaataaaactttgtgatatgcaaaaaaaaaattcttca

SEQ ID NO: 370628 - DNA, 2103 bp, Homo sapiens
  misc_feature (51)..(51): n is a, c, g, or t
  misc_feature (61)..(62): n is a, c, g, or t
  misc_feature (65)..(65): n is a, c, g, or t
cagcggtccgtcatacagaggcgtggtaactactttgggacatgctgtgtnaaagcggagnntanagaagggaagaaggaattccaggtgtccctcttccagacactggtgctcctcatgttcaacgagggagatggcttcagctttgaggagataaaaatggccacggggatagaggatagtgaattgcgcagaacgctgcagtccctggcctgtggcaaagcacgtgtgctgattaaaagtcccaaaggaaaggaagtggaagatggagacaagttcatttttaatggagagttcaagcacaagttgtttagaataaagatcaatcaaattcagatgaaggaaactgttgaggaacaggttagcaccactgagagagtgtttcaggatagacaatatcagattgatgctgctatcgtcagaataatgaagatgagaaagactcttggtcataatcttctagtttctgaattatataatcagctgaaatttccagtaaagcctggagatttgaaaaagagaattgaatctctgatagacagagactatatggagagagacaaagacaatccgaatcagtaccactacgtggcctgacgcatctgcagacggttccccttcatgaaacactagaatgtaccctcagagcaggaagcacacctgtgccatttctgggactctgattgatccagctgtggacattggaaggcgaaggaagggaggtggctcctgggtcatctttcacaaggctcaagacttcaacctgcagatgtatctttttccctccagtttttcctctagttcttttaggcatttaaattgtttctgttactctgtgcaaaataactttgagattggacaagaagatgttactaaagagaagttcctttaaaaggtcttgttcttgtgtcaaaaagctgcaagtttggtttgttctcgtgtgtgatcatgagtgcacaatgaagaagaccctagatgctgcattttttagctctgaagattccttaggtatccctgaagacagctcgctcagatgatcagcatttagagtgaaaacaagggcccttcatgggtgaacattagaaagagccagggttcaaagctggcgaatggatgacgcaccctagccactggcccctctctgtttcatgtatttccaaaagttgtaaactttgatggctgatttttcgtaagtcaggtttctaagtgagctccctgaggtgccaaggccatggtgtccgccctgctgcgtctgttcgtcagctgagttccttgtgaatctctgttttagggtttggggctagtgtgtttgtgtttccattctaagattgagtctggcagtccctgtttttttgcattggggtaactgctctttgattttttttaattgcagtatttgtgtgattgcaataataaagtttggtttggtttttacagtcatgcgcagggacgatccttgttctctgctgtaaactgtaaaaagtttatggagacttaaagtcttgatgttgtgaagcagaggttattttgtggaaagattaaaaggattttgttggtacctggttttgtgttgtgtatatatacatgaggttgaacagtgaaaggaaagttcagtagtgatgttagaagggtaactatgacaaagatacttttgagataacatttaaaagtactttatattttacataatagcatgtttcattttgattaaaagctaccaaaggaattttgatcatggcataagtgtttaaagcaatattttctggaatataccaagtttatataatttgattttgtgctaaattattaagagtctctttttgaaacatgcgggtttgaaatatgacaccttgtgggtttccatattaaaatcctcactctttaattgtcatttctatctttgaaaattttcatttatgagttccatgatatgtggtctaagaaagaccaaacagatttctatttttttttcttataagttcgttgtgtctagagattgttaatattgtaatttaatgtagacttactttgaataaaattagtttaattggccttaaaattacattaataaaactttgtgatatgcaaaaaaaaaattcttca

SEQ ID NO: 370629 - DNA, 2017 bp, Homo sapiens
tccccgtctgtcttctgaatcctttcctttgggacttttatcagcacacgtgctttgccacaggccaggactgcagcgttctgcgcaattcactatcctctatccccgtggccatttttatctcctcaaagctgaagccatctccctcgttgaacatgaggagcaccagtgtctggaagatggagacaagttcatttttaatggagagttcaagcacaagttgtttagaataaagatcaatcaaattcagatgaaggaaactgttgaggaacaggttagcaccactgagagagtgtttcaggatagacaatatcagattgatgctgctatcgtcagaataatgaagatgagaaagactcttggtcataatcttctagtttctgaattatataatcagctgaaatttccagtaaagcctggagatttgaaaaagagaattgaatctctgatagacagagactatatggagagagacaaagacaatccgaatcagtaccactacgtggcctgacgcatctgcagacggttccccttcatgaaacactagaatgtaccctcagagcaggaagcacacctgtgccatttctgggactctgattgatccagctgtggacattggaaggcgaaggaagggaggtggctcctgggtcatctttcacaaggctcaagacttcaacctgcagatgtatctttttccctccagtttttcctctagttcttttaggcatttaaattgtttctgttactctgtgcaaaataactttgagattggacaagaagatgttactaaagagaagttcctttaaaaggtcttgttcttgtgtcaaaaagctgcaagtttggtttgttctcgtgtgtgatcatgagtgcacaatgaagaagaccctagatgctgcattttttagctctgaagattccttaggtatccctgaagacagctcgctcagatgatcagcatttagagtgaaaacaagggcccttcatgggtgaacattagaaagagccagggttcaaagctggcgaatggatgacgcaccctagccactggcccctctctgtttcatgtatttccaaaagttgtaaactttgatggctgatttttcgtaagtcaggtttctaagtgagctccctgaggtgccaaggccatggtgtccgccctgctgcgtctgttcgtcagctgagttccttgtgaatctctgttttagggtttggggctagtgtgtttgtgtttccattctaagattgagtctggcagtccctgtttttttgcattggggtaactgctctttgattttttttaattgcagtatttgtgtgattgcaataataaagtttggtttggtttttacagtcatgcgcagggacgatccttgttctctgctgtaaactgtaaaaagtttatggagacttaaagtcttgatgttgtgaagcagaggttattttgtggaaagattaaaaggattttgttggtacctggttttgtgttgtgtatatatacatgaggttgaacagtgaaaggaaagttcagtagtgatgttagaagggtaactatgacaaagatacttttgagataacatttaaaagtactttatattttacataatagcatgtttcattttgattaaaagctaccaaaggaattttgatcatggcataagtgtttaaagcaatattttctggaatataccaagtttatataatttgattttgtgctaaattattaagagtctctttttgaaacatgcgggtttgaaatatgacaccttgtgggtttccatattaaaatcctcactctttaattgtcatttctatctttgaaaattttcatttatgagttccatgatatgtggtctaagaaagaccaaacagatttctatttttttttcttataagttcgttgtgtctagagattgttaatattgtaatttaatgtagacttactttgaataaaattagtttaattggccttaaaattacattaataaaactttgtgatatgcaaaaaaaaaattcttca

SEQ ID NO: 370630 - DNA, 2353 bp, Homo sapiens
gcagttttcattttgatttctgattctttacagcatctttctaccactcagtagtttatacaaattatataatctttctaatgctcagtttctcatatttaaaatagacatactactacctcaagttgtgagaattaaatgaatcgtttagaaagctctttgccacacacctgtaagcacttcatacatgttgatgctgctctttttatgcttagccatttgtatttttctttttctaattgcttttcaagtcatatgcattcattataatgttttttctcttactgattagtaggttttctttatatattaaggatattaatgctttgtccctttttttttttcgtttttttttttttttttttttttgcatttcactctgtcgtccaggctggagtgcagtggtacaatctcgctcactgcaacctccgtctcgggaggctgaggcaagagaatcgcttgatcctgggaggcggaggttgcagtgagccgagatcacaccattgcactctagcccaggcaactgagtgagactccatcgcaaaaaataaaaagaaaatacagttttacacttaactttttttttcttttttatacagttgaggaacaggttagcaccactgagagagtgtttcaggatagacaatatcagattgatgctgctatcgtcagaataatgaagatgagaaagactcttggtcataatcttctagtttctgaattatataatcagctgaaatttccagtaaagcctggagatttgaaaaagagaattgaatctctgatagacagagactatatggagagagacaaagacaatccgaatcagtaccactacgtggcctgacgcatctgcagacggttccccttcatgaaacactagaatgtaccctcagagcaggaagcacacctgtgccatttctgggactctgattgatccagctgtggacattggaaggcgaaggaagggaggtggctcctgggtcatctttcacaaggctcaagacttcaacctgcagatgtatctttttccctccagtttttcctctagttcttttaggcatttaaattgtttctgttactctgtgcaaaataactttgagattggacaagaagatgttactaaagagaagttcctttaaaaggtcttgttcttgtgtcaaaaagctgcaagtttggtttgttctcgtgtgtgatcatgagtgcacaatgaagaagaccctagatgctgcattttttagctctgaagattccttaggtatccctgaagacagctcgctcagatgatcagcatttagagtgaaaacaagggcccttcatgggtgaacattagaaagagccagggttcaaagctggcgaatggatgacgcaccctagccactggcccctctctgtttcatgtatttccaaaagttgtaaactttgatggctgatttttcgtaagtcaggtttctaagtgagctccctgaggtgccaaggccatggtgtccgccctgctgcgtctgttcgtcagctgagttccttgtgaatctctgttttagggtttggggctagtgtgtttgtgtttccattctaagattgagtctggcagtccctgtttttttgcattggggtaactgctctttgattttttttaattgcagtatttgtgtgattgcaataataaagtttggtttggtttttacagtcatgcgcagggacgatccttgttctctgctgtaaactgtaaaaagtttatggagacttaaagtcttgatgttgtgaagcagaggttattttgtggaaagattaaaaggattttgttggtacctggttttgtgttgtgtatatatacatgaggttgaacagtgaaaggaaagttcagtagtgatgttagaagggtaactatgacaaagatacttttgagataacatttaaaagtactttatattttacataatagcatgtttcattttgattaaaagctaccaaaggaattttgatcatggcataagtgtttaaagcaatattttctggaatataccaagtttatataatttgattttgtgctaaattattaagagtctctttttgaaacatgcgggtttgaaatatgacaccttgtgggtttccatattaaaatcctcactctttaattgtcatttctatctttgaaaattttcatttatgagttccatgatatgtggtctaagaaagaccaaacagatttctatttttttttcttataagttcgttgtgtctagagattgttaatattgtaatttaatgtagacttactttgaataaaattagtttaattggccttaaaattacattaataaaactttgtgatatgcaaaaaaaaaattcttca

SEQ ID NO: 370631 - DNA, 3244 bp, Homo sapiens
ctgacccttcgtctgccccttgtgaaaaccaggccgcggaggaccctccgcgcctggctgggccagggcctcggggcgcgcgcgcccgaggagggggagggggagggacatggcgcgcgctcccgagctctcataaggtgcctccgccgcgcgctcccgagcctgcaggagttagggcacgtcccggcgcgcacccctgagccctcgaggtggtctcacgcccggggtgggggtgccgagccctcaggaggcgcgcgccccggggccctcaggagggtgtcccggctcccgatcccctcaggaggggtgcccgcggcacgcatccccgagccaggagggggtgcccggagccctgggggcagggtctcggtgcgccccccggagccgggggtgagggtcccgatccctcaggacgggagtcccggcgcgcgccctcgagccaggagaggggtgtccgaatctcttagggggagtccgatccctcaggagggattcccggcgcgcgttcctaagccctcaggagtagccgggcgcggcggcggttgggctcgggcacgcgggcggggcggggcggggcgcgcgaggaggacggggcggaggccgcgcggaccggggcgggcggagcggagctcggcgggcggcggcgctcggggcggggcgcggcggttccggcccagccatggcggacgaggccccgcggaagggcagcttctcggcgctcgtgggccgcaccaacggcctcaccaagcccgcggccctggccgccgcgcccgccaagccggggggcgcgggcggctccaagaagctggtcatcaagaacttccgagacagacctcggctgcccgacaactacacgcaggacacgtggcggaagctgcacgaggcggtgcgggccgtgcagagcagcacctccatcaggtacaacctcgaggagctctaccaggctgtggaaaatctctgttctcacaaagtctccccaatgctctacaagcaactgcgtcaggcctgtgaagaccacgtccaggcacagatccttccgtttagagaagactcactagatagtgttttatttttaaagaagattaacacgtgctggcaggaccactgcagacaaatgatcatgatcagaagcatcttcctgttcttggaccgcacctatgtgctgcagaactccacgctgccctccatctgggatatgggattagaactgtttagaacccatattattagtgataaaatggttcagagtaaaaccattgatggaatcctactgctgatcgagcgcgagaggagcggcgaggccgtggaccggagcctgttgcggagcctcctgggcatgctgtctgacctgcaggtgtataaagattcatttgaactgaaatttttggaagagactaattgcttatatgctgccgaaggccaaaggttaatgcaggaaagagaggttccagaatatcttaaccatgtaagtaaacgcttagaggaagagggagacagagtaatcacttacttggaccacagcacacagaaaccactgattgcttgtgtggagaaacagctattaggagaacatttaacagcaattctgcagaaagggctcgaccacttactggatgagaacagagtgccggacctcgcacagatgtaccagctgttcagccgggtgaggggcgggcagcaggcgctgctgcagcactggagcgagtacatcaagacttttggaacagcgatcgtaatcaatcctgagaaagacaaagacatggtccaagacctgttggacttcaaggacaaggtggaccacgtgatcgaggtctgcttccagaagaatgagcggttcgtcaacctgatgaaggagtcctttgagacgttcatcaacaagagacccaacaagcctgcagaactgatcgcaaagcatgtggattcaaagttaagagcaggcaacaaagaagccacagacgaggagctggagcggacgttggacaagatcatgatcctgttcaggtttatccacggtaaagatgtctttgaagcattttataaaaaagatttggcaaaaagactccttgttgggaaaagtgcctcagtcgatgctgaaaagtctatgttgtcaaagctcaagcatgagtgcggtgcagccttcaccagcaagctggaaggcatgttcaaggacatggagctttcgaaggacatcatggttcatttcaagcagcatatgcagaatcagagtgactcaggccctatagacctcacagtgaacatactcacaatgggctactggccaacatacacgcccatggaagtgcacttaaccccagaaatgattaaacttcaggaagtatttaaggcattttatcttggaaagcacagtggtcgaaaacttcagtggcaaactactttgggacatgctgttttaaaagcggagtttaaagaaaggatagtgaattgcgcagaacgctgcagtccctggcctgtggcaaagcacgtgtgctgattaaaagtcccaaaggaaaggaagtggaagatggagacaagttcatttttaatggagagttcaagcacaagttgtttagaataaagatcaatcaaattcagatgaaggaaactgtatgtataaactttctctttttacttatagggggtttagcagggaatcatttgtttttgtagtaatgtttttggctgttagaggcctgaagcacatttctacaataatccaatttcactatgtaatgtttataagagtactcattttcctgtcgctttcattaacttcacattctcagtaggaaagaaaatcagaaaaaaagccacttaatgttattcctattcacaaaaaagttgtgtgctaagccagaactccccatggtcatagggtttcgaaaattatccacactttctatggtaatagaatctgatatggttcactcttggtgttgtacattctgtgggtctgggtaaatgtataatgttatgtatccaccattataggatcatacaggacagtttcattgccctaaaaattctcttatgttctgtcgctgtatccctgtctccctccgagcccctggcaacccctgaccctgttactgtcaccatagttttgccctttcctgaatgccgtacagttggagtcatagtgtatatagccttttcagattggcttctttatttattagaacgtatttgaggttcaccgtgtcttttcatgactgggtaactctgctttttgcactgaaggattctc

SEQ ID NO: 370632 - DNA, 2871 bp, Homo sapiens
  misc_feature (2812)..(2812): n is a, c, g, or t
  misc_feature (2840)..(2840): n is a, c, g, or t
  misc_feature (2859)..(2859): n is a, c, g, or t
  misc_feature (2869)..(2869): n is a, c, g, or t
ctgacccttcgtctgccccttgtgaaaaccaggccgcggaggaccctccgcgcctggctgggccagggcctcggggcgcgcgcgcccgaggagggggagggggagggacatggcgcgcgctcccgagctctcataaggtgcctccgccgcgcgctcccgagcctgcaggagttagggcacgtcccggcgcgcacccctgagccctcgaggtggtctcacgcccggggtgggggtgccgagccctcaggaggcgcgcgccccggggccctcaggagggtgtcccggctcccgatcccctcaggaggggtgcccgcggcacgcatccccgagccaggagggggtgcccggagccctgggggcagggtctcggtgcgccccccggagccgggggtgagggtcccgatccctcaggacgggagtcccggcgcgcgccctcgagccaggagaggggtgtccgaatctcttagggggagtccgatccctcaggagggattcccggcgcgcgttcctaagccctcaggagtagccgggcgcggcggcggttgggctcgggcacgcgggcggggcggggcggggcgcgcgaggaggacggggcggaggccgcgcggaccggggcgggcggagcggagctcggcgggcggcggcgctcggggcggggcgcggcggttccggcccagccatggcggacgaggccccgcggaagggcagcttctcggcgctcgtgggccgcaccaacggcctcaccaagcccgcggccctggccgccgcgcccgccaagccggggggcgcgggcggctccaagaagctggtcatcaagaacttccgagacagacctcggctgcccgacaactacacgcaggacacgtggcggaagctgcacgaggcggtgcgggccgtgcagagcagcacctccatcaggtacaacctcgaggagctctaccaggctgtggaaaatctctgttctcacaaagtctccccaatgctctacaagcaactgcgtcaggcctgtgaagaccacgtccaggcacagatccttccgtttagagaagactcactagatagtgttttatttttaaagaagattaacacgtgctggcaggaccactgcagacaaatgatcatgatcagaagcatcttcctgttcttggaccgcacctatgtgctgcagaactccacgctgccctccatctgggatatgggattagaactgtttagaacccatattattagtgataaaatggttcagagtaaaaccattgatggaatcctactgctgatcgagcgcgagaggagcggcgaggccgtggaccggagcctgttgcggagcctcctgggcatgctgtctgacctgcaggtgtataaagattcatttgaactgaaatttttggaagagactaattgcttatatgctgccgaaggccaaaggttaatgcaggaaagagaggttccagaatatcttaaccatgtaagtaaacgcttagaggaagagggagacagagtaatcacttacttggaccacagcacacagtaagtaccgtttgttcgctgagcgttcgtatcttcaccatggctggaaggttctcctggctggttattgaaataaagggtgtctttgtcaattcattcagtactaagagtgtttttgcacctagcatattttactttgttatttgtcattatttggcattcacaaattacagtttttacccagtgccttgtcatgagttacgtctaaagagagtaaatcttgctgagatacttggcatctttgagttttgagacggtctatttatgttaatggagtatcactgaatattaggttattttgattgtgcattctctgttacacattttatatcgctttaattttatttatggtgctgtcacacaattttctcttttcatcttatgtttttttcctgcaaacctgaggttgatgagtagctagggaaacaaaaagggagagattatgtgagcgtgtgtgtcaggcacagtgtgtccatatgatgggaggcaaggacagaggcagaggggacagcaagggagagaaatgaaaatgatacagtgtgcagctgggcgcggtggctcacgcctgtaatcccagcactttgggaggctgaggtgggcagatcacaaagtcaggagatcgagaccatcctgaccaacatggtgaaaccccgtctctactaacaatacaaaaaaattagccgggcgtggtggcgggaacctatagtcccagctacttgggaggctgaggcaggagaatggcatgagcccgggaggcagagcttgcagtgagccgagatcacgccactgcactccagcctgggcgacagagcgagactccgtctcaaaaaaaaaaaaaaaaggtaataattaaattggccagcatttttaaagttttccttagcagatctgtacagactcactagatagtgttttatttttaaagaagattaacacgtgctggcaggaccactgcagacaaatggtaagcttgttcactttttcatcaaaacacgacctcatccatcttccctcacccacatgattgagagctgagacatagaagttctgttgaggattctgtctgtgttcagtgctgtggttgaacagcacgatgagaaaagcagggaaggtgaactcctcagctcctgtgagagggcaccactgaccctcttgggccttcaggtccacagtcacagtccgcagtgggtgacagggttcttaggatgcctgcatggggtctctaaatgtctcttttaaggcacagtttacttcctcaggaatctaggcctggattcccggggtnttttcctgcagcttgcacaaccagcgtnttaagggttttttaaggantctttgggcntt

SEQ ID NO: 370633 - DNA, 2458 bp, Homo sapiens
  misc_feature (782)..(782): n is a, c, g, or t
  misc_feature (867)..(867): n is a, c, g, or t
  misc_feature (2399)..(2399): n is a, c, g, or t
  misc_feature (2427)..(2427): n is a, c, g, or t
  misc_feature (2446)..(2446): n is a, c, g, or t
  misc_feature (2456)..(2456): n is a, c, g, or t
gatgagcacctaggaggactttcctcatgtttgccttttcacacacatgcaaatgtttcattgaaaatcttctgaaagccgcaatcttgccagaatccccagtaatgagcttcgttcttagtatactaagaatttagtttatgtgaacttagaaactattgcactccccccacaagtaaaaagctgtaagatcatttctgaaataattaaaataactcaaatttaagcaagatgataaaaacatacatgaaaacttaaaaatataaatgtaaatgataaaatttttcatttgtgtgaagcactgcaaaaaattttcccaaaaaaagctgtgcgaaaaaacacgtagtagtaataggaacccaaaaaacttaatcacctttccagataccagagcaaaatcataaaggaacctgccccatagactgtcacccaaatggtgcgtgctactgccagaatggaccttagccattggttccttcattctggctttgcagaggaagtttcatgtcagatactgagcccagctgcagctaccccagcagagcctcaggcctttcccgcactgtcttgggaaacatgggcgtactttgaggtctcctgcaaccgtgttgtttggtgtcccccaaatgaacaaccaccttgttgacttgcttttgctgacccagctgtgcggggcagggttgccatttagcacctcatcctcctaccaagtgaggctcagctccctgtgggccctggggatgggaggagggtgtgcacagaccccgaaacttggtggtgcncagggacgaaagagaagtgcagcctgggccctgttgtaggatggatgttaatatcagcgtcctttctccatgtcccccacacacntttccgtcctacctctccctccctgttaatctgtgttaatatttggcttgaatatgtattctgctttttaaaaaaattacatgtaaggaaaacaaaatctcaatttcttggatagtgtcgacattctttttgttactgatacatttaattgttttgtttgtaaggttccagaatatcttaaccatgtaagtaaacgcttagaggaagagggagacagagtaatcacttacttggaccacagcacacagtaagtaccgtttgttcgctgagcgttcgtatcttcaccatggctggaaggttctcctggctggttattgaaataaagggtgtctttgtcaattcattcagtactaagagtgtttttgcacctagcatattttactttgttatttgtcattatttggcattcacaaattacagtttttacccagtgccttgtcatgagttacgtctaaagagagtaaatcttgctgagatacttggcatctttgagttttgagacggtctatttatgttaatggagtatcactgaatattaggttattttgattgtgcattctctgttacacattttatatcgctttaattttatttatggtgctgtcacacaattttctcttttcatcttatgtttttttcctgcaaacctgaggttgatgagtagctagggaaacaaaaagggagagattatgtgagcgtgtgtgtcaggcacagtgtgtccatatgatgggaggcaaggacagaggcagaggggacagcaagggagagaaatgaaaatgatacagtgtgcagctgggcgcggtggctcacgcctgtaatcccagcactttgggaggctgaggtgggcagatcacaaagtcaggagatcgagaccatcctgaccaacatggtgaaaccccgtctctactaacaatacaaaaaaattagccgggcgtggtggcgggaacctatagtcccagctacttgggaggctgaggcaggagaatggcatgagcccgggaggcagagcttgcagtgagccgagatcacgccactgcactccagcctgggcgacagagcgagactccgtctcaaaaaaaaaaaaaaaaggtaataattaaattggccagcatttttaaagttttccttagcagatctgtacagactcactagatagtgttttatttttaaagaagattaacacgtgctggcaggaccactgcagacaaatggtaagcttgttcactttttcatcaaaacacgacctcatccatcttccctcacccacatgattgagagctgagacatagaagttctgttgaggattctgtctgtgttcagtgctgtggttgaacagcacgatgagaaaagcagggaaggtgaactcctcagctcctgtgagagggcaccactgaccctcttgggccttcaggtccacagtcacagtccgcagtgggtgacagggttcttaggatgcctgcatggggtctctaaatgtctcttttaaggcacagtttacttcctcaggaatctaggcctggattcccggggtnttttcctgcagcttgcacaaccagcgtnttaagggttttttaaggantctttgggcntt

SEQ ID NO: 370634 - DNA, 1763 bp, Homo sapiens
ctgacccttcgtctgccccttgtgaaaaccaggccgcggaggaccctccgcgcctggctgggccagggcctcggggcgcgcgcgcccgaggagggggagggggagggacatggcgcgcgctcccgagctctcataaggtgcctccgccgcgcgctcccgagcctgcaggagttagggcacgtcccggcgcgcacccctgagccctcgaggtggtctcacgcccggggtgggggtgccgagccctcaggaggcgcgcgccccggggccctcaggagggtgtcccggctcccgatcccctcaggaggggtgcccgcggcacgcatccccgagccaggagggggtgcccggagccctgggggcagggtctcggtgcgccccccggagccgggggtgagggtcccgatccctcaggacgggagtcccggcgcgcgccctcgagccaggagaggggtgtccgaatctcttagggggagtccgatccctcaggagggattcccggcgcgcgttcctaagccctcaggagtagccgggcgcggcggcggttgggctcgggcacgcgggcggggcggggcggggcgcgcgaggaggacggggcggaggccgcgcggaccggggcgggcggagcggagctcggcgggcggcggcgctcggggcggggcgcggcggttccggcccagccatggcggacgaggccccgcggaagggcagcttctcggcgctcgtgggccgcaccaacggcctcaccaagcccgcggccctggccgccgcgcccgccaagccggggggcgcgggcggctccaagaagctggtcatcaagaacttccgagacagacctcggctgcccgacaactacacgcaggacacgtggcggaagctgcacgaggcggtgcgggccgtgcagagcagcacctccatcaggtacaacctcgaggagctctaccaggctgtggaaaatctctgttctcacaaagtctccccaatgctctacaagcaactgcgtcaggcctgtgaagaccacgtccaggcacagatccttccgtttagagaagactcactagatagtgttttatttttaaagaagattaacacgtgctggcaggaccactgcagacaaatgatcatgatcagaagcatcttcctgttcttggaccgcacctatgtgctgcagaactccacgctgccctccatctgccaaaatcattaacgtgaacgtaggagtccaggtgggtcttagccttgaaacaccaggtgtctagccagcagcaaggagtggagcaggaagctcggacaggcggctgactttggtcatgagggtgaagacagagggtcttggtttctctctgacgactggaggttgagcctggagcggctctttccagcgctgcagttgaaactcggagaaagactgcctgctgcccgtggggtcgcagccctgaggctgtgcgtcccctgtggaatggcttgctcagcctcccggcctcctgagcacatagcactcatcgtccgtcatctttcggggactgtatacaccaggggttctggggcctttcctcagcagcgttcgcggccacggaccccacatgtcctctgctgacccctgtgtgtcctctgtggccaccccatggcgctgaatcctgccgcctcctgcaagccgactttggacaaaagctgtgtccggtctcaccgtctgatttgtcttgttctctgttaatgtagtgtttcattcttctcacattcatacataaaagtgatgtcgtgccttc

SEQ ID NO: 370635 - DNA, 1777 bp, Homo sapiens
ctgacccttcgtctgccccttgtgaaaaccaggccgcggaggaccctccgcgcctggctgggccagggcctcggggcgcgcgcgcccgaggagggggagggggagggacatggcgcgcgctcccgagctctcataaggtgcctccgccgcgcgctcccgagcctgcaggagttagggcacgtcccggcgcgcacccctgagccctcgaggtggtctcacgcccggggtgggggtgccgagccctcaggaggcgcgcgccccggggccctcaggagggtgtcccggctcccgatcccctcaggaggggtgcccgcggcacgcatccccgagccaggagggggtgcccggagccctgggggcagggtctcggtgcgccccccggagccgggggtgagggtcccgatccctcaggacgggagtcccggcgcgcgccctcgagccaggagaggggtgtccgaatctcttagggggagtccgatccctcaggagggattcccggcgcgcgttcctaagccctcaggagtagccgggcgcggcggcggttgggctcgggcacgcgggcggggcggggcggggcgcgcgaggaggacggggcggaggccgcgcggaccggggcgggcggagcggagctcggcgggcggcggcgctcggggcggggcgcggcggttccggcccagccatggcggacgaggccccgcggaagggcagcttctcggcgctcgtgggccgcaccaacggcctcaccaagcccgcggccctggccgccgcgcccgccaagccggggggcgcgggcggctccaagaagctggtcatcaagaacttccgagacagacctcggctgcccgacaactacacgcaggacacgtggcggaagctgcacgaggcggtgcgggccgtgcagagcagcacctccatcaggtacaacctcgaggagctctaccaggctgtggaaaatctctgttctcacaaagtctccccaatgctctacaagcaactgcgtcaggcctgtgaagaccacgtccaggcacagatccttccgtttagagaagactcactagatagtgttttatttttaaagaagattaacacgtgctggcaggaccactgcagacaaatgatcatgatcagaagcatcttcctgttcttggaccgcacctatgtgctgcagaactccacgctgccctccatctgccaaaatcattaacgtgaacgtaggagtccaggtgggtcttagccttgaaacaccaggtgtctagccagcagcaaggagtggagcaggaagctcggacaggcggctgactttggtcatgagggtgaagacagagggtcttggtttctctctgacgactggaggttgagcctggagcggctctttccagcgctgcagttgaaactcggagaaagactgcctgctgcccgtggggtcgcagccctgaggctgtgcgtcccctgtggaatggcttgctcagcctcccggcctcctgagcacatagcactcatcgtccgtcatctttcggggactgtatacaccaggggttctggggcctttcctcagcagcgttcgcggccacggaccccacatgtcctctgctgacccctgtgtgtcctctgtggccaccccatggcgctgaatcctgccgcctcctttgttctctgttaatgtagtgtttcattcttctcacattcatacataaaagtgatgtcgtgccttctcatgagctttaaacccaagttctttaaaatgtgcctgcttttcctaccccaccctctgggcccg

SEQ ID NO: 370636 - DNA, 1105 bp, Homo sapiens
acattaactgttgttacctctacccccatgccaactatgactggactgcagtgttccaacgagaagtgccctaaacttagccataataagtaatttatttgtagattcctgaagtactggggtagggtgtggggtgcctttttcttatgattacagctatgttaacaatagggtttttttatgaaccaatctgttgttcatactgaagaattgatgtagcccttttgtttgcaggctgtggaaaatctctgttctcacaaagtctccccaatgctctacaagcaactgcgtcaggcctgtgaagaccacgtccaggcacagatccttccgtttagagaatatcctttttttggttcataaagtttctattcattatctaagtcttttaaaactgaacattattatgataaagagctaatgagtatccttaatattaaaacaacagcttttaaagttctcttttatttgataggtttgtaagcgaaatttaccatttaaattattttgctgatttgaattaaagggaaaccgtgttcatttattgggtatggttgaagtatttaggaaatgttctgaaaaatgtcttcaagtttgagtatcctttattctaataaacaccatctgcattggctttctgtgataggcaacaaagtcccatcgacttggcgacttatggagacacccacttatcagcgcacagttgtgtctgtcaggaggccaggcaggattcagtggattctatgctcagtctcacgggcagagtcaaggtgtcagccaggttggggcctcacctgaggtctttgctagcacgggcaggcagttggcggaagccagttcctgtggtagtgggactgagggccctgccttctgtcccgtgttgcttggtgtcactctcagctccacatgcacaggtccttgcctctcctctcacagcacgactcttttctgcttctagaccagcaggagaatctgcctgtctgacctgctgagatagggccttatatgatgtaacccgtaacccagtcaaggaatgatgaccttcgtattcacagcctcgttcacagttgcgtgtgaggcatcctccacgtggggacagggcaggagc

SEQ ID NO: 370637 - DNA, 1314 bp, Homo sapiens
ctgacccttcgtctgccccttgtgaaaaccaggccgcggaggaccctccgcgcctggctgggccagggcctcggggcgcgcgcgcccgaggagggggagggggagggacatggcgcgcgctcccgagctctcataaggtgcctccgccgcgcgctcccgagcctgcaggagttagggcacgtcccggcgcgcacccctgagccctcgaggtggtctcacgcccggggtgggggtgccgagccctcaggaggcgcgcgccccggggccctcaggagggtgtcccggctcccgatcccctcaggaggggtgcccgcggcacgcatccccgagccaggagggggtgcccggagccctgggggcagggtctcggtgcgccccccggagccgggggtgagggtcccgatccctcaggacgggagtcccggcgcgcgccctcgagccaggagaggggtgtccgaatctcttagggggagtccgatccctcaggagggattcccggcgcgcgttcctaagccctcaggagtagccgggcgcggcggcggttgggctcgggcacgcgggcggggcggggcggggcgcgcgaggaggacggggcggaggccgcgcggaccggggcgggcggagcggagctcggcgggcggcggcgctcggggcggggcgcggcggttccggcccagccatggcggacgaggccccgcggaagggcagcttctcggcgctcgtgggccgcaccaacggcctcaccaagcccgcggccctggccgccgcgcccgccaagccggggggcgcgggcggctccaagaagctggtcatcaagaacttccgagacagacctcggctgcccgacaactacacgcaggacacgtggcggaagctgcacgaggcggtgcgggccgtgcagagcagcacctccatcaggtacaacctcgaggagctctaccaggctgtggaaaatctctgttctcacaaagtctccccaatgctctacaagcaactgcgtcaggcctgtgaagaccacgtccaggcacagatccttccgtttagagatcatcgtccgtcatctttcggggactgtatacaccaggggttctggggcctttcctcagcagcgttcgcggccacggaccccacatgtcctctgctgacccctgtgtgtcctctgtggccaccccatggcgctgaatcctgccgcctcctgcaagccgactttggacaaaagctgtgtccggtctcaccgtctgatttgtcttgttctctgttaatgtagtgtttcattcttctcacattcatacataaaagtgatgtcgtgccttc

SEQ ID NO: 370638 - DNA, 381 bp, Homo sapiens
ggagctggagcggacgttggacaagatcatgatcctgttcaggtttatccacggtgagactcgggcactcagaaaatgctgcataatcaagaggtgtaaacaggccctgctttcccagaggaggtttagcatgagaatgtcagtatcagtagagccagtttgcattagaatgaacacttttcatccttgctaacatggtgaaaccccgtctctactaaaaatacaaaacattagccaggcgtggtggcaggcgcctgtagtcccacctacttgggaggctgaggcagagaatggcgtgaacgcgggaggcggagcttgcagtgagccgagatcgcgccactgcactccagcctgggcaacagagcaagactctgtctcaaa

SEQ ID NO: 370639 - DNA, 340 bp, Homo sapiens
atccctgcttccctgggcccgcccgtgggcctgcttgtgctgttcagtaggtggtttttagaaagggcttccttcagcgtcattagcaacaggagtcgtcgtccgtttgcatgaggaaatgttcttaaccttccgtttctgattgcctctagactgcatctgtcatagacaaatgcccccatcttttgcagagaaccagtctcttctttaaactttacttctaacgcttattctttttaccttatataggaaaccactgattgcttgtgtggagaaacagctattaggagaacatttaacagcaattctgcagaaaggtagatttcctaactcttgtgca

SEQ ID NO: 370640 - DNA, 3920 bp, Homo sapiens
ctgacccttcgtctgccccttgtgaaaaccaggccgcggaggaccctccgcgcctggctgggccagggcctcggggcgcgcgcgcccgaggagggggagggggagggacatggcgcgcgctcccgagctctcataaggtgcctccgccgcgcgctcccgagcctgcaggagttagggcacgtcccggcgcgcacccctgagccctcgaggtggtctcacgcccggggtgggggtgccgagccctcaggaggcgcgcgccccggggccctcaggagggtgtcccggctcccgatcccctcaggaggggtgcccgcggcacgcatccccgagccaggagggggtgcccggagccctgggggcagggtctcggtgcgccccccggagccgggggtgagggtcccgatccctcaggacgggagtcccggcgcgcgccctcgagccaggagaggggtgtccgaatctcttagggggagtccgatccctcaggagggattcccggcgcgcgttcctaagccctcaggagtagccgggcgcggcggcggttgggctcgggcacgcgggcggggcggggcggggcgcgcgaggaggacggggcggaggccgcgcggaccggggcgggcggagcggagctcggcgggcggcggcgctcggggcggggcgcggcggttccggcccagccatggcggacgaggccccgcggaagggcagcttctcggcgctcgtgggccgcaccaacggcctcaccaagcccgcggccctggccgccgcgcccgccaagccggggggcgcgggcggctccaagaagctggtcatcaagaacttccgagacagacctcggctgcccgacaactacacgcaggacacgtggcggaagctgcacgaggcggtgcgggccgtgcagagcagcacctccatcaggtacaacctcgaggagctctaccaggctgtggaaaatctctgttctcacaaagtctccccaatgctctacaagcaactgcgtcaggcctgtgaagaccacgtccaggcacagatccttccgtttagagaagactcactagatagtgttttatttttaaagaagattaacacgtgctggcaggaccactgcagacaaatgatcatgatcagaagcatcttcctgttcttggaccgcacctatgtgctgcagaactccacgctgccctccatctgggatatgggattagaactgtttagaacccatattattagtgataaaatggttcagagtaaaaccattgatggaatcctactgctgatcgagcgcgagaggagcggcgaggccgtggaccggagcctgttgcggagcctcctgggcatgctgtctgacctgcaggtgtataaagattcatttgaactgaaatttttggaagagactaattgcttatatgctgccgaaggccaaaggttaatgcaggaaagagaggttccagaatatcttaaccatgtaagtaaacgcttagaggaagagggagacagagtaatcacttacttggaccacagcacacagaaaccactgattgcttgtgtggagaaacagctattaggagaacatttaacagcaattctgcagaaagggctcgaccacttactggatgagaacagagtgccggacctcgcacagatgtaccagctgttcagccgggtgaggggcgggcagcaggcgctgctgcagcactggagcgagtacatcaagacttttggaacagcgatcgtaatcaatcctgagaaagacaaagacatggtccaagacctgttggacttcaaggacaaggtggaccacgtgatcgaggtctgcttccagaagaatgagcggttcgtcaacctgatgaaggagtcctttgagacgttcatcaacaagagacccaacaagcctgcagaactgatcgcaaagcatgtggattcaaagttaagagcaggcaacaaagaagccacagacgaggagctggagcggacgttggacaagatcatgatcctgttcaggtttatccacggtaaagatgtctttgaagcattttataaaaaagatttggcaaaaagactccttgttgggaaaagtgcctcagtcgatgctgaaaagtctatgttgtcaaagctcaagcatgagtgcggtgcagccttcaccagcaagctggaaggcatgttcaaggacatggagctttcgaaggacatcatggttcatttcaagcagcatatgcagaatcagagtgactcaggccctatagacctcacagtgaacatactcacaatgggctactggccaacatacacgcccatggaagtgcacttaaccccagaaatgattaaacttcaggaagtatttaaggcattttatcttggaaagcacagtggtcgaaaacttcagtggcaaactactttgggacatgctgttttaaaagcggagtttaaagaagggaagaaggaattccaggtgtccctcttccagacactggtgctcctcatgttcaacgagggagatggcttcagctttgaggagataaaaatggccacggggatagaggatagtgaattgcgcagaacgctgcagtccctggcctgtggcaaagcacgtgtgctgattaaaagtcccaaaggaaaggaagtggaagatggagacaagttcatttttaatggagagttcaagcacaagttgtttagaataaagatcaatcaaattcagatgaaggaaactgttgaggaacaggttagcaccactgagagagtgtttcaggatagacaatatcagattgatgctgctatcgtcagaataatgaagatgagaaagactcttggtcataatcttctagtttctgaattatataatcagctgaaatttccagtaaagcctggagatttgaaaaagagaattgaatctctgatagacagagactatatggagagagacaaagacaatccgaatcagtaccactacgtggcctgacgcatctgcagacggttccccttcatgaaacactagaatgtaccctcagagcaggaagcacacctgtgccatttctgggactctgattgatccagctgtggacattggaaggcgaaggaagggaggtggctcctgggtcatctttcacaaggctcaagacttcaacctgcagatgtatctttttccctccagtttttcctctagttcttttaggcatttaaattgtttctgttactctgtgcaaaataactttgagattggacaagaagatgttactaaagagaagttcctttaaaaggtcttgttcttgtgtcaaaaagctgcaagtttggtttgttctcgtgtgtgatcatgagtgcacaatgaagaagaccctagatgctgcattttttagctctgaagattccttaggtatccctgaagacagctcgctcagatgatcagcatttagagtgaaaacaagggcccttcatgggtgaacattagaaagagccagggttcaaagctggcgaatggatgacgcaccctagccactggcccctctctgtttcatgtatttccaaaagttgtaaactttgatggctgatttttcgtaagtcaggtttctaagtgagctccctgaggtgccaaggccatggtgtccgccctgctgcgtctgttcgtcagctgagttccttgtgaatctctgttttagggtttggggctagtgtgtttgtgtttccattctaagattgagtctggcagtccctgtttttttgcattggggtaactgctctttgattttttttaattgcagtatttgtgtgattgcaataataaagtttggtttggtttttacagtcatgcgcagggacgatccttgttctctgctgtaaactgtaaaaagtttatggagacttaaagtcttgatgttgtgaagcagaggttattttgtggaaagattaaaaggattttgttggta

SEQ ID NO: 370641 - DNA, 3684 bp, Homo sapiens
ggtccgtctgggtcctggcgcccccggccccgccgcgggtgcgcagacagacctcggctgcccgacaactacacgcaggacacgtggcggaagctgcacgaggcggtgcgggccgtgcagagcagcacctccatcaggtacaacctcgaggagctctaccaggctgtggaaaatctctgttctcacaaagtctccccaatgctctacaagcaactgcgtcaggcctgtgaagaccacgtccaggcacagatccttccgtttagagaagactcactagatagtgttttatttttaaagaagattaacacgtgctggcaggaccactgcagacaaatgatcatgatcagaagcatcttcctgttcttggaccgcacctatgtgctgcagaactccacgctgccctccatctgggatatgggattagaactgtttagaacccatattattagtgataaaatggttcagagtaaaaccattgatggaatcctactgctgatcgagcgcgagaggagcggcgaggccgtggaccggagcctgttgcggagcctcctgggcatgctgtctgacctgcaggtgtataaagattcatttgaactgaaatttttggaagagactaattgcttatatgctgccgaaggccaaaggttaatgcaggaaagagaggttccagaatatcttaaccatgtaagtaaacgcttagaggaagagggagacagagtaatcacttacttggaccacagcacacagaaaccactgattgcttgtgtggagaaacagctattaggagaacatttaacagcaattctgcagaaagggctcgaccacttactggatgagaacagagtgccggacctcgcacagatgtaccagctgttcagccgggtgaggggcgggcagcaggcgctgctgcagcactggagcgagtacatcaagacttttggaacagcgatcgtaatcaatcctgagaaagacaaagacatggtccaagacctgttggacttcaaggacaaggtggaccacgtgatcgaggtctgcttccagaagaatgagcggttcgtcaacctgatgaaggagtcctttgagacgttcatcaacaagagacccaacaagcctgcagaactgatcgcaaagcatgtggattcaaagttaagagcaggcaacaaagaagccacagacgaggagctggagcggacgttggacaagatcatgatcctgttcaggtttatccacggtaaagatgtctttgaagcattttataaaaaagatttggcaaaaagactccttgttgggaaaagtgcctcagtcgatgctgaaaagtctatgttgtcaaagctcaagcatgagtgcggtgcagccttcaccagcaagctggaaggcatgttcaaggacatggagctttcgaaggacatcatggttcatttcaagcagcatatgcagaatcagagtgactcaggccctatagacctcacagtgaacatactcacaatgggctactggccaacatacacgcccatggaagtgcacttaaccccagaaatgattaaacttcaggaagtatttaaggcattttatcttggaaagcacagtggtcgaaaacttcagtggcaaactactttgggacatgctgttttaaaagcggagtttaaagaagggaagaaggaattccaggtgtccctcttccagacactggtgctcctcatgttcaacgagggagatggcttcagctttgaggagataaaaatggccacggggatagaggatagtgaattgcgcagaacgctgcagtccctggcctgtggcaaagcacgtgtgctgattaaaagtcccaaaggaaaggaagtggaagatggagacaagttcatttttaatggagagttcaagcacaagttgtttagaataaagatcaatcaaattcagatgaaggaaactgttgaggaacaggttagcaccactgagagagtgtttcaggatagacaatatcagattgatgctgctatcgtcagaataatgaagatgagaaagactcttggtcataatcttctagtttctgaattatataatcagctgaaatttccagtaaagcctggagatttgaaaaagagaattgaatctctgatagacagagactatatggagagagacaaagacaatccgaatcagtaccactacgtggcctgacgcatctgcagacggttccccttcatgaaacactagaatgtaccctcagagcaggaagcacacctgtgccatttctgggactctgattgatccagctgtggacattggaaggcgaaggaagggaggtggctcctgggtcatctttcacaaggctcaagacttcaacctgcagatgtatctttttccctccagtttttcctctagttcttttaggcatttaaattgtttctgttactctgtgcaaaataactttgagattggacaagaagatgttactaaagagaagttcctttaaaaggtcttgttcttgtgtcaaaaagctgcaagtttggtttgttctcgtgtgtgatcatgagtgcacaatgaagaagaccctagatgctgcattttttagctctgaagattccttaggtatccctgaagacagctcgctcagatgatcagcatttagagtgaaaacaagggcccttcatgggtgaacattagaaagagccagggttcaaagctggcgaatggatgacgcaccctagccactggcccctctctgtttcatgtatttccaaaagttgtaaactttgatggctgatttttcgtaagtcaggtttctaagtgagctccctgaggtgccaaggccatggtgtccgccctgctgcgtctgttcgtcagctgagttccttgtgaatctctgttttagggtttggggctagtgtgtttgtgtttccattctaagattgagtctggcagtccctgtttttttgcattggggtaactgctctttgattttttttaattgcagtatttgtgtgattgcaataataaagtttggtttggtttttacagtcatgcgcagggacgatccttgttctctgctgtaaactgtaaaaagtttatggagacttaaagtcttgatgttgtgaagcagaggttattttgtggaaagattaaaaggattttgttggtacctggttttgtgttgtgtatatatacatgaggttgaacagtgaaaggaaagttcagtagtgatgttagaagggtaactatgacaaagatacttttgagataacatttaaaagtactttatattttacataatagcatgtttcattttgattaaaagctaccaaaggaattttgatcatggcataagtgtttaaagcaatattttctggaatataccaagtttatataatttgattttgtgctaaattattaagagtctctttttgaaacatgcgggtttgaaatatgacaccttgtgggtttccatattaaaatcctcactctttaattgtcatttctatctttgaaaattttcatttatgagttccatgatatgtggtctaagaaagaccaaacagatttctatttttttttcttataagttcgttgtgtctagagattgttaatattgtaatttaatgtagacttactttgaataaaattagtttaattggccttaaaattacattaataaaactttgtgatatgcaaaaaaaaaattcttca

SEQ ID NO: 370642 - DNA, 4405 bp, Homo sapiens
ctgacccttcgtctgccccttgtgaaaaccaggccgcggaggaccctccgcgcctggctgggccagggcctcggggcgcgcgcgcccgaggagggggagggggagggacatggcgcgcgctcccgagctctcataaggtgcctccgccgcgcgctcccgagcctgcaggagttagggcacgtcccggcgcgcacccctgagccctcgaggtggtctcacgcccggggtgggggtgccgagccctcaggaggcgcgcgccccggggccctcaggagggtgtcccggctcccgatcccctcaggaggggtgcccgcggcacgcatccccgagccaggagggggtgcccggagccctgggggcagggtctcggtgcgccccccggagccgggggtgagggtcccgatccctcaggacgggagtcccggcgcgcgccctcgagccaggagaggggtgtccgaatctcttagggggagtccgatccctcaggagggattcccggcgcgcgttcctaagccctcaggagtagccgggcgcggcggcggttgggctcgggcacgcgggcggggcggggcggggcgcgcgaggaggacggggcggaggccgcgcggaccggggcgggcggagcggagctcggcgggcggcggcgctcggggcggggcgcggcggttccggcccagccatggcggacgaggccccgcggaagggcagcttctcggcgctcgtgggccgcaccaacggcctcaccaagcccgcggccctggccgccgcgcccgccaagccggggggcgcgggcggctccaagaagctggtcatcaagaacttccgagacagacctcggctgcccgacaactacacgcaggacacgtggcggaagctgcacgaggcggtgcgggccgtgcagagcagcacctccatcaggtacaacctcgaggagctctaccaggcctgtgaagaccacgtccaggcacagatccttccgtttagagaagactcactagatagtgttttatttttaaagaagattaacacgtgctggcaggaccactgcagacaaatgatcatgatcagaagcatcttcctgttcttggaccgcacctatgtgctgcagaactccacgctgccctccatctgggatatgggattagaactgtttagaacccatattattagtgataaaatggttcagagtaaaaccattgatggaatcctactgctgatcgagcgcgagaggagcggcgaggccgtggaccggagcctgttgcggagcctcctgggcatgctgtctgacctgcaggtgtataaagattcatttgaactgaaatttttggaagagactaattgcttatatgctgccgaaggccaaaggttaatgcaggaaagagaggttccagaatatcttaaccatgtaagtaaacgcttagaggaagagggagacagagtaatcacttacttggaccacagcacacagaaaccactgattgcttgtgtggagaaacagctattaggagaacatttaacagcaattctgcagaaagggctcgaccacttactggatgagaacagagtgccggacctcgcacagatgtaccagctgttcagccgggtgaggggcgggcagcaggcgctgctgcagcactggagcgagtacatcaagacttttggaacagcgatcgtaatcaatcctgagaaagacaaagacatggtccaagacctgttggacttcaaggacaaggtggaccacgtgatcgaggtctgcttccagaagaatgagcggttcgtcaacctgatgaaggagtcctttgagacgttcatcaacaagagacccaacaagcctgcagaactgatcgcaaagcatgtggattcaaagttaagagcaggcaacaaagaagccacagacgaggagctggagcggacgttggacaagatcatgatcctgttcaggtttatccacggtaaagatgtctttgaagcattttataaaaaagatttggcaaaaagactccttgttgggaaaagtgcctcagtcgatgctgaaaagtctatgttgtcaaagctcaagcatgagtgcggtgcagccttcaccagcaagctggaaggcatgttcaaggacatggagctttcgaaggacatcatggttcatttcaagcagcatatgcagaatcagagtgactcaggccctatagacctcacagtgaacatactcacaatgggctactggccaacatacacgcccatggaagtgcacttaaccccagaaatgattaaacttcaggaagtatttaaggcattttatcttggaaagcacagtggtcgaaaacttcagtggcaaactactttgggacatgctgttttaaaagcggagtttaaagaagggaagaaggaattccaggtgtccctcttccagacactggtgctcctcatgttcaacgagggagatggcttcagctttgaggagataaaaatggccacggggatagaggatagtgaattgcgcagaacgctgcagtccctggcctgtggcaaagcacgtgtgctgattaaaagtcccaaaggaaaggaagtggaagatggagacaagttcatttttaatggagagttcaagcacaagttgtttagaataaagatcaatcaaattcagatgaaggaaactgttgaggaacaggttagcaccactgagagagtgtttcaggatagacaatatcagattgatgctgctatcgtcagaataatgaagatgagaaagactcttggtcataatcttctagtttctgaattatataatcagctgaaatttccagtaaagcctggagatttgaaaaagagaattgaatctctgatagacagagactatatggagagagacaaagacaatccgaatcagtaccactacgtggcctgacgcatctgcagacggttccccttcatgaaacactagaatgtaccctcagagcaggaagcacacctgtgccatttctgggactctgattgatccagctgtggacattggaaggcgaaggaagggaggtggctcctgggtcatctttcacaaggctcaagacttcaacctgcagatgtatctttttccctccagtttttcctctagttcttttaggcatttaaattgtttctgttactctgtgcaaaataactttgagattggacaagaagatgttactaaagagaagttcctttaaaaggtcttgttcttgtgtcaaaaagctgcaagtttggtttgttctcgtgtgtgatcatgagtgcacaatgaagaagaccctagatgctgcattttttagctctgaagattccttaggtatccctgaagacagctcgctcagatgatcagcatttagagtgaaaacaagggcccttcatgggtgaacattagaaagagccagggttcaaagctggcgaatggatgacgcaccctagccactggcccctctctgtttcatgtatttccaaaagttgtaaactttgatggctgatttttcgtaagtcaggtttctaagtgagctccctgaggtgccaaggccatggtgtccgccctgctgcgtctgttcgtcagctgagttccttgtgaatctctgttttagggtttggggctagtgtgtttgtgtttccattctaagattgagtctggcagtccctgtttttttgcattggggtaactgctctttgattttttttaattgcagtatttgtgtgattgcaataataaagtttggtttggtttttacagtcatgcgcagggacgatccttgttctctgctgtaaactgtaaaaagtttatggagacttaaagtcttgatgttgtgaagcagaggttattttgtggaaagattaaaaggattttgttggtacctggttttgtgttgtgtatatatacatgaggttgaacagtgaaaggaaagttcagtagtgatgttagaagggtaactatgacaaagatacttttgagataacatttaaaagtactttatattttacataatagcatgtttcattttgattaaaagctaccaaaggaattttgatcatggcataagtgtttaaagcaatattttctggaatataccaagtttatataatttgattttgtgctaaattattaagagtctctttttgaaacatgcgggtttgaaatatgacaccttgtgggtttccatattaaaatcctcactctttaattgtcatttctatctttgaaaattttcatttatgagttccatgatatgtggtctaagaaagaccaaacagatttctatttttttttcttataagttcgttgtgtctagagattgttaatattgtaatttaatgtagacttactttgaataaaattagtttaattggccttaaaattacattaataaaactttgtgatatgcaaaaaaaaaattcttca

SEQ ID NO: 370643 - DNA, 2771 bp, Homo sapiens
  misc_feature (2)..(2): n is a, c, g, or t
  misc_feature (8)..(10): n is a, c, g, or t
  misc_feature (14)..(15): n is a, c, g, or t
  misc_feature (18)..(19): n is a, c, g, or t
gnattgannngctnntgnngacttttggaacagcgatcgtaatcaatcctgagaaagacaaagacatggtccaagacctgttggacttcaaggacaaggtggaccacgtgatcgaggtctgcttccagaagaatgagcggttcgtcaacctgatgaaggagtcctttgagacgttcatcaacaagagacccaacaagcctgcagaactgatcgcaaagcatgtggattcaaagttaagagcaggcaacaaagaagccacagacgaggagctggagcggacgttggacaagatcatgatcctgttcaggtttatccacggtaaagatgtctttgaagcattttataaaaaagatttggcaaaaagactccttgttgggaaaagtgcctcagtcgatgctgaaaagtctatgttgtcaaagctcaagcatgagtgcggtgcagccttcaccagcaagctggaaggcatgttcaaggacatggagctttcgaaggacatcatggttcatttcaagcagcatatgcagaatcagagtgactcaggccctatagacctcacagtgaacatactcacaatgggctactggccaacatacacgcccatggaagtgcacttaaccccagaaatgattaaacttcaggaagtatttaaggcattttatcttggaaagcacagtggtcgaaaacttcagtggcaaactactttgggacatgctgttttaaaagcggagtttaaagaagggaagaaggaattccaggtgtccctcttccagacactggtgctcctcatgttcaacgagggagatggcttcagctttgaggagataaaaatggccacggggatagaggatagtgaattgcgcagaacgctgcagtccctggcctgtggcaaagcacgtgtgctgattaaaagtcccaaaggaaaggaagtggaagatggagacaagttcatttttaatggagagttcaagcacaagttgtttagaataaagatcaatcaaattcagatgaaggaaactgttgaggaacaggttagcaccactgagagagtgtttcaggatagacaatatcagattgatgctgctatcgtcagaataatgaagatgagaaagactcttggtcataatcttctagtttctgaattatataatcagctgaaatttccagtaaagcctggagatttgaaaaagagaattgaatctctgatagacagagactatatggagagagacaaagacaatccgaatcagtaccactacgtggcctgacgcatctgcagacggttccccttcatgaaacactagaatgtaccctcagagcaggaagcacacctgtgccatttctgggactctgattgatccagctgtggacattggaaggcgaaggaagggaggtggctcctgggtcatctttcacaaggctcaagacttcaacctgcagatgtatctttttccctccagtttttcctctagttcttttaggcatttaaattgtttctgttactctgtgcaaaataactttgagattggacaagaagatgttactaaagagaagttcctttaaaaggtcttgttcttgtgtcaaaaagctgcaagtttggtttgttctcgtgtgtgatcatgagtgcacaatgaagaagaccctagatgctgcattttttagctctgaagattccttaggtatccctgaagacagctcgctcagatgatcagcatttagagtgaaaacaagggcccttcatgggtgaacattagaaagagccagggttcaaagctggcgaatggatgacgcaccctagccactggcccctctctgtttcatgtatttccaaaagttgtaaactttgatggctgatttttcgtaagtcaggtttctaagtgagctccctgaggtgccaaggccatggtgtccgccctgctgcgtctgttcgtcagctgagttccttgtgaatctctgttttagggtttggggctagtgtgtttgtgtttccattctaagattgagtctggcagtccctgtttttttgcattggggtaactgctctttgattttttttaattgcagtatttgtgtgattgcaataataaagtttggtttggtttttacagtcatgcgcagggacgatccttgttctctgctgtaaactgtaaaaagtttatggagacttaaagtcttgatgttgtgaagcagaggttattttgtggaaagattaaaaggattttgttggtacctggttttgtgttgtgtatatatacatgaggttgaacagtgaaaggaaagttcagtagtgatgttagaagggtaactatgacaaagatacttttgagataacatttaaaagtactttatattttacataatagcatgtttcattttgattaaaagctaccaaaggaattttgatcatggcataagtgtttaaagcaatattttctggaatataccaagtttatataatttgattttgtgctaaattattaagagtctctttttgaaacatgcgggtttgaaatatgacaccttgtgggtttccatattaaaatcctcactctttaattgtcatttctatctttgaaaattttcatttatgagttccatgatatgtggtctaagaaagaccaaacagatttctatttttttttcttataagttcgttgtgtctagagattgttaatattgtaatttaatgtagacttactttgaataaaattagtttaattggccttaaaattacattaataaaactttgtgatatgcaaaaaaaaaattcttca

SEQ ID NO: 370644 - DNA, 4362 bp, Homo sapiens
ctgacccttcgtctgccccttgtgaaaaccaggccgcggaggaccctccgcgcctggctgggccagggcctcggggcgcgcgcgcccgaggagggggagggggagggacatggcgcgcgctcccgagctctcataaggtgcctccgccgcgcgctcccgagcctgcaggagttagggcacgtcccggcgcgcacccctgagccctcgaggtggtctcacgcccggggtgggggtgccgagccctcaggaggcgcgcgccccggggccctcaggagggtgtcccggctcccgatcccctcaggaggggtgcccgcggcacgcatccccgagccaggagggggtgcccggagccctgggggcagggtctcggtgcgccccccggagccgggggtgagggtcccgatccctcaggacgggagtcccggcgcgcgccctcgagccaggagaggggtgtccgaatctcttagggggagtccgatccctcaggagggattcccggcgcgcgttcctaagccctcaggagtagccgggcgcggcggcggttgggctcgggcacgcgggcggggcggggcggggcgcgcgaggaggacggggcggaggccgcgcggaccggggcgggcggagcggagctcggcgggcggcggcgctcggggcggggcgcggcggttccggcccagccatggcggacgaggccccgcggaagggcagcttctcggcgctcgtgggccgcaccaacggcctcaccaagcccgcggccctggccgccgcgcccgccaagccggggggcgcgggcggctccaagaagctggtcatcaagaacttccgagacagacctcggctgcccgacaactacacgcaggacacgtggcggaagctgcacgaggcggtgcgggccgtgcagagcagcacctccatcaggtacaacctcgaggagctctaccaggctgtggaaaatctctgttctcacaaagtctccccaatgctctacaagcaactgcgtcaggcctgtgaagaccacgtccaggcacagatccttccgtttagagaagactcactagatagtgttttatttttaaagaagattaacacgtgctggcaggaccactgcagacaaatgatcatgatcagaagcatcttcctgttcttggaccgcacctatgtgctgcagaactccacgctgccctccatctgggatatgggattagaactgtttagaacccatattattagtgataaaatggttcagagtaaaaccattgatggaatcctactgctgatcgagcgcgagaggagcggcgaggccgtggaccggagcctgttgcggagcctcctgggcatgctgtctgacctgcaggtgtataaagattcatttgaactgaaatttttggaagagactaattgcttatatgctgccgaaggccaaaggttaatgcaggaaagagaggttccagaatatcttaaccatgtaagtaaacgcttagaggaagagggagacagagtaatcacttacttggaccacagcacacagaaaccactgattgcttgtgtggagaaacagctattaggagaacatttaacagcaattctgcagaaagggctcgaccacttactggatgagaacagagtgccggacctcgcacagatgtaccagctgttcagccgggtgaggggcgggcagcaggcgctgctgcagcactggagcgagtacatcaagacttttggaacagcgatcgtaatcaatcctgagaaagacaaagacatggtccaagacctgttggacttcaaggacaaggtggaccacgtgatcgaggtctgcttccagaagaatgagcggttcgtcaacctgatgaaggagtcctttgagacgttcatcaacaagagacccaacaagcctgcagaactgatcgcaaagcatgtggattcaaagttaagagcaggcaacaaagaagccacagacgaggagctggagcggacgttggacaagatcatgatcctgttcaggtttatccacggtaaagatgtctttgaagcattttataaaaaagatttggcaaaaagactccttgttgggaaaagtgcctcagtcgatgctgaaaagtctatgttgtcaaagctcaagcatgagtgcggtgcagccttcaccagcaagctggaaggcatgttcaaggacatggagctttcgaaggacatcatggttcatttcaagcagcatatgcagaatcagagtgactcaggccctatagacctcacagtgaacatactcacaatgggctactggccaacatacacgcccatggaagtgcacttaaccccagaaatgattaaacttcaggaagtatttaaggcattttatcttggaaagcacagtggtcgaaaacttcagtggcaaactactttgggacatgctgttttaaaagcggagtttaaagaagggaagaaggaattccaggtgtccctcttccagacactggtgctcctcatgttcaacgagggagatggcttcagctttgaggagataaaaatggccacggggatagaggatagtgaattgcgcagaacgctgcagtccctggcctgtggcaaagcacgtgtgctgattaaaagtcccaaaggaaaggaagtggaagatggagacaagttcatttttaatggagagttcaagcacaagttgtttagaataaagatcaatcaaattcagatgaaggaaactgttgaggaacaggttagcaccactgagagagtgtttcaggatagacaatatcagattgatgctgctatcgtcagaataatgaagatgagaaagactcttggtcataatcttctagtttctgaattatataatcagctgaaatttccagtaaagcctggagatttgaaaaagagaattgaatctctgatagacagagactatatggagagagacaaagacaatccgaatcagtaccactacgtggcctgacgcatctgcagacggttccccttcatgaaacactagaatgtaccctcagagcaggaagcacacctgtgccatttctgggactctgattgatccagctgtggacattggaaggcgaaggaagggaggtggctcctgggtcatctttcacaaggctcaagacttcaacctgcagatgtatctttttccctccagtttttcctctagttcttttaggcatttaaattgtttctgttactctgtgcaaaataactttgagattggacaagaagatgttactaaagagaagttcctttaaaaggtcttgttcttgtgtcaaaaagctgcaagtttggtttgttctcgtgtgtgatcatgagtgcacaatgaagaagaccctagatgctgcattttttagctctgaagattccttaggtatccctgaagacagctcgctcagatgatcagcatttagagtgaaaacaagggcccttcatgggtgaacattagaaagagccagggttcaaagcttgagctccctgaggtgccaaggccatggtgtccgccctgctgcgtctgttcgtcagctgagttccttgtgaatctctgttttagggtttggggctagtgtgtttgtgtttccattctaagattgagtctggcagtccctgtttttttgcattggggtaactgctctttgattttttttaattgcagtatttgtgtgattgcaataataaagtttggtttggtttttacagtcatgcgcagggacgatccttgttctctgctgtaaactgtaaaaagtttatggagacttaaagtcttgatgttgtgaagcagaggttattttgtggaaagattaaaaggattttgttggtacctggttttgtgttgtgtatatatacatgaggttgaacagtgaaaggaaagttcagtagtgatgttagaagggtaactatgacaaagatacttttgagataacatttaaaagtactttatattttacataatagcatgtttcattttgattaaaagctaccaaaggaattttgatcatggcataagtgtttaaagcaatattttctggaatataccaagtttatataatttgattttgtgctaaattattaagagtctctttttgaaacatgcgggtttgaaatatgacaccttgtgggtttccatattaaaatcctcactctttaattgtcatttctatctttgaaaattttcatttatgagttccatgatatgtggtctaagaaagaccaaacagatttctatttttttttcttataagttcgttgtgtctagagattgttaatattgtaatttaatgtagacttactttgaataaaattagtttaattggccttaaaattacattaataaaactttgtgatatgcaaaaaaaaaattcttca

SEQ ID NO: 370645 - DNA, 4052 bp, Homo sapiens
  misc_feature (782)..(782): n is a, c, g, or t
  misc_feature (867)..(867): n is a, c, g, or t
gatgagcacctaggaggactttcctcatgtttgccttttcacacacatgcaaatgtttcattgaaaatcttctgaaagccgcaatcttgccagaatccccagtaatgagcttcgttcttagtatactaagaatttagtttatgtgaacttagaaactattgcactccccccacaagtaaaaagctgtaagatcatttctgaaataattaaaataactcaaatttaagcaagatgataaaaacatacatgaaaacttaaaaatataaatgtaaatgataaaatttttcatttgtgtgaagcactgcaaaaaattttcccaaaaaaagctgtgcgaaaaaacacgtagtagtaataggaacccaaaaaacttaatcacctttccagataccagagcaaaatcataaaggaacctgccccatagactgtcacccaaatggtgcgtgctactgccagaatggaccttagccattggttccttcattctggctttgcagaggaagtttcatgtcagatactgagcccagctgcagctaccccagcagagcctcaggcctttcccgcactgtcttgggaaacatgggcgtactttgaggtctcctgcaaccgtgttgtttggtgtcccccaaatgaacaaccaccttgttgacttgcttttgctgacccagctgtgcggggcagggttgccatttagcacctcatcctcctaccaagtgaggctcagctccctgtgggccctggggatgggaggagggtgtgcacagaccccgaaacttggtggtgcncagggacgaaagagaagtgcagcctgggccctgttgtaggatggatgttaatatcagcgtcctttctccatgtcccccacacacntttccgtcctacctctccctccctgttaatctgtgttaatatttggcttgaatatgtattctgctttttaaaaaaattacatgtaaggaaaacaaaatctcaatttcttggatagtgtcgacattctttttgttactgatacatttaattgttttgtttgtaaggttccagaatatcttaaccatgtaagtaaacgcttagaggaagagggagacagagtaatcacttacttggaccacagcacacagaaaccactgattgcttgtgtggagaaacagctattaggagaacatttaacagcaattctgcagaaagggctcgaccacttactggatgagaacagagtgccggacctcgcacagatgtaccagctgttcagccgggtgaggggcgggcagcaggcgctgctgcagcactggagcgagtacatcaagacttttggaacagcgatcgtaatcaatcctgagaaagacaaagacatggtccaagacctgttggacttcaaggacaaggtggaccacgtgatcgaggtctgcttccagaagaatgagcggttcgtcaacctgatgaaggagtcctttgagacgttcatcaacaagagacccaacaagcctgcagaactgatcgcaaagcatgtggattcaaagttaagagcaggcaacaaagaagccacagacgaggagctggagcggacgttggacaagatcatgatcctgttcaggtttatccacggtaaagatgtctttgaagcattttataaaaaagatttggcaaaaagactccttgttgggaaaagtgcctcagtcgatgctgaaaagtctatgttgtcaaagctcaagcatgagtgcggtgcagccttcaccagcaagctggaaggcatgttcaaggacatggagctttcgaaggacatcatggttcatttcaagcagcatatgcagaatcagagtgactcaggccctatagacctcacagtgaacatactcacaatgggctactggccaacatacacgcccatggaagtgcacttaaccccagaaatgattaaacttcaggaagtatttaaggcattttatcttggaaagcacagtggtcgaaaacttcagtggcaaactactttgggacatgctgttttaaaagcggagtttaaagaagggaagaaggaattccaggtgtccctcttccagacactggtgctcctcatgttcaacgagggagatggcttcagctttgaggagataaaaatggccacggggatagaggatagtgaattgcgcagaacgctgcagtccctggcctgtggcaaagcacgtgtgctgattaaaagtcccaaaggaaaggaagtggaagatggagacaagttcatttttaatggagagttcaagcacaagttgtttagaataaagatcaatcaaattcagatgaaggaaactgttgaggaacaggttagcaccactgagagagtgtttcaggatagacaatatcagattgatgctgctatcgtcagaataatgaagatgagaaagactcttggtcataatcttctagtttctgaattatataatcagctgaaatttccagtaaagcctggagatttgaaaaagagaattgaatctctgatagacagagactatatggagagagacaaagacaatccgaatcagtaccactacgtggcctgacgcatctgcagacggttccccttcatgaaacactagaatgtaccctcagagcaggaagcacacctgtgccatttctgggactctgattgatccagctgtggacattggaaggcgaaggaagggaggtggctcctgggtcatctttcacaaggctcaagacttcaacctgcagatgtatctttttccctccagtttttcctctagttcttttaggcatttaaattgtttctgttactctgtgcaaaataactttgagattggacaagaagatgttactaaagagaagttcctttaaaaggtcttgttcttgtgtcaaaaagctgcaagtttggtttgttctcgtgtgtgatcatgagtgcacaatgaagaagaccctagatgctgcattttttagctctgaagattccttaggtatccctgaagacagctcgctcagatgatcagcatttagagtgaaaacaagggcccttcatgggtgaacattagaaagagccagggttcaaagctggcgaatggatgacgcaccctagccactggcccctctctgtttcatgtatttccaaaagttgtaaactttgatggctgatttttcgtaagtcaggtttctaagtgagctccctgaggtgccaaggccatggtgtccgccctgctgcgtctgttcgtcagctgagttccttgtgaatctctgttttagggtttggggctagtgtgtttgtgtttccattctaagattgagtctggcagtccctgtttttttgcattggggtaactgctctttgattttttttaattgcagtatttgtgtgattgcaataataaagtttggtttggtttttacagtcatgcgcagggacgatccttgttctctgctgtaaactgtaaaaagtttatggagacttaaagtcttgatgttgtgaagcagaggttattttgtggaaagattaaaaggattttgttggtacctggttttgtgttgtgtatatatacatgaggttgaacagtgaaaggaaagttcagtagtgatgttagaagggtaactatgacaaagatacttttgagataacatttaaaagtactttatattttacataatagcatgtttcattttgattaaaagctaccaaaggaattttgatcatggcataagtgtttaaagcaatattttctggaatataccaagtttatataatttgattttgtgctaaattattaagagtctctttttgaaacatgcgggtttgaaatatgacaccttgtgggtttccatattaaaatcctcactctttaattgtcatttctatctttgaaaattttcatttatgagttccatgatatgtggtctaagaaagaccaaacagatttctatttttttttcttataagttcgttgtgtctagagattgttaatattgtaatttaatgtagacttactttgaataaaattagtttaattggccttaaaattacattaataaaactttgtgatatgcaaaaaaaaaattcttca

SEQ ID NO: 370646 - DNA, 3119 bp, Homo sapiens
agggatgttgagctcttgggagtttgggcttctggaagtcttgggttctcccatcacatggggactttggtcctccctcccaagccacctgacgatggcttgtgcagcctcagaaacaggaagcccgagtagaaatgctttcaccctgcgttgccaccttggatgctctgagaaagtctttctctttgagaatgtctcctctgcattcatgacaccagatcctagaaataggcactccagcgtccggggcagtcacgtcctgaaacctgagcatgtatttgctgaagtcattttattttgaaattcagagattgcatttaaagataagaaagatatttaaacctgctttaaacattcagtcctggcttcattaaaattttggcaagtatttactctcacttgacttgagaagtacttaccttagaaaatcagatatttgtttttttgtcatatagtcattttgggaaggttccagaatgttcctgtacaatgttgctaatagaaattgaagatgctctctttttctagtttagagtatttactatatgtttatgctcacagcaaagcatgtggattcaaagttaagagcaggcaacaaagaagccacagacgaggagctggagcggacgttggacaagatcatgatcctgttcaggtttatccacggtaaagatgtctttgaagcattttataaaaaagatttggcaaaaagactccttgttgggaaaagtgcctcagtcgatgctgaaaagtctatgttgtcaaagctcaagcatgagtgcggtgcagccttcaccagcaagctggaaggcatgttcaaggacatggagctttcgaaggacatcatggttcatttcaagcagcatatgcagaatcagagtgactcaggccctatagacctcacagtgaacatactcacaatgggctactggccaacatacacgcccatggaagtgcacttaaccccagaaatgattaaacttcaggaagtatttaaggcattttatcttggaaagcacagtggtcgaaaacttcagtggcaaactactttgggacatgctgttttaaaagcggagtttaaagaagggaagaaggaattccaggtgtccctcttccagacactggtgctcctcatgttcaacgagggagatggcttcagctttgaggagataaaaatggccacggggatagaggatagtgaattgcgcagaacgctgcagtccctggcctgtggcaaagcacgtgtgctgattaaaagtcccaaaggaaaggaagtggaagatggagacaagttcatttttaatggagagttcaagcacaagttgtttagaataaagatcaatcaaattcagatgaaggaaactgttgaggaacaggttagcaccactgagagagtgtttcaggatagacaatatcagattgatgctgctatcgtcagaataatgaagatgagaaagactcttggtcataatcttctagtttctgaattatataatcagctgaaatttccagtaaagcctggagatttgaaaaagagaattgaatctctgatagacagagactatatggagagagacaaagacaatccgaatcagtaccactacgtggcctgacgcatctgcagacggttccccttcatgaaacactagaatgtaccctcagagcaggaagcacacctgtgccatttctgggactctgattgatccagctgtggacattggaaggcgaaggaagggaggtggctcctgggtcatctttcacaaggctcaagacttcaacctgcagatgtatctttttccctccagtttttcctctagttcttttaggcatttaaattgtttctgttactctgtgcaaaataactttgagattggacaagaagatgttactaaagagaagttcctttaaaaggtcttgttcttgtgtcaaaaagctgcaagtttggtttgttctcgtgtgtgatcatgagtgcacaatgaagaagaccctagatgctgcattttttagctctgaagattccttaggtatccctgaagacagctcgctcagatgatcagcatttagagtgaaaacaagggcccttcatgggtgaacattagaaagagccagggttcaaagctggcgaatggatgacgcaccctagccactggcccctctctgtttcatgtatttccaaaagttgtaaactttgatggctgatttttcgtaagtcaggtttctaagtgagctccctgaggtgccaaggccatggtgtccgccctgctgcgtctgttcgtcagctgagttccttgtgaatctctgttttagggtttggggctagtgtgtttgtgtttccattctaagattgagtctggcagtccctgtttttttgcattggggtaactgctctttgattttttttaattgcagtatttgtgtgattgcaataataaagtttggtttggtttttacagtcatgcgcagggacgatccttgttctctgctgtaaactgtaaaaagtttatggagacttaaagtcttgatgttgtgaagcagaggttattttgtggaaagattaaaaggattttgttggtacctggttttgtgttgtgtatatatacatgaggttgaacagtgaaaggaaagttcagtagtgatgttagaagggtaactatgacaaagatacttttgagataacatttaaaagtactttatattttacataatagcatgtttcattttgattaaaagctaccaaaggaattttgatcatggcataagtgtttaaagcaatattttctggaatataccaagtttatataatttgattttgtgctaaattattaagagtctctttttgaaacatgcgggtttgaaatatgacaccttgtgggtttccatattaaaatcctcactctttaattgtcatttctatctttgaaaattttcatttatgagttccatgatatgtggtctaagaaagaccaaacagatttctatttttttttcttataagttcgttgtgtctagagattgttaatattgtaatttaatgtagacttactttgaataaaattagtttaattggccttaaaattacattaataaaactttgtgatatgcaaaaaaaaaattcttca

SEQ ID NO: 370647 - DNA, 3065 bp, Homo sapiens
ctgacccttcgtctgccccttgtgaaaaccaggccgcggaggaccctccgcgcctggctgggccagggcctcggggcgcgcgcgcccgaggagggggagggggagggacatggcgcgcgctcccgagctctcataaggtgcctccgccgcgcgctcccgagcctgcaggagttagggcacgtcccggcgcgcacccctgagccctcgaggtggtctcacgcccggggtgggggtgccgagccctcaggaggcgcgcgccccggggccctcaggagggtgtcccggctcccgatcccctcaggaggggtgcccgcggcacgcatccccgagccaggagggggtgcccggagccctgggggcagggtctcggtgcgccccccggagccgggggtgagggtcccgatccctcaggacgggagtcccggcgcgcgccctcgagccaggagaggggtgtccgaatctcttagggggagtccgatccctcaggagggattcccggcgcgcgttcctaagccctcaggagtagccgggcgcggcggcggttgggctcgggcacgcgggcggggcggggcggggcgcgcgaggaggacggggcggaggccgcgcggaccggggcgggcggagcggagctcggcgggcggcggcgctcggggcggggcgcggcggttccggcccagccatggcggacgaggccccgcggaagggcagcttctcggcgctcgtgggccgcaccaacggcctcaccaagcccgcggccctggccgccgcgcccgccaagccggggggcgcgggcggctccaagaagctggtcatcaagaacttccgagacagacctcggctgcccgacaactacacgcaggacacgtggcggaagctgcacgaggcggtgcgggccgtgcagagcagcacctccatcaggtacaacctcgaggagctctaccaggctgtggaaaatctctgttctcacaaagtctccccaatgctctacaagcaactgcgtcaggcctgtgaagaccacgtccaggcacagatccttccgtttagagaagactcactagatagtgttttatttttaaagaagattaacacgtgctggcaggaccactgcagacaaatgatcatgatcagaagcatcttcctgttcttggaccgcacctatgtgctgcagaactccacgctgccctccatctgggatatgggattagaactgtttagaacccatattattagtgataaaatggttcagagtaaaaccattgatggaatcctactgctgatcgagcgcgagaggagcggcgaggccgtggaccggagcctgttgcggagcctcctgggcatgctgtctgacctgcaggtgtataaagattcatttgaactgaaatttttggaagagactaattgcttatatgctgccgaaggccaaaggttaatgcaggaaagagaggttccagaatatcttaaccatgtaagtaaacgcttagaggaagagggagacagagtaatcacttacttggaccacagcacacagaaaccactgattgcttgtgtggagaaacagctattaggagataaaaatggccacggggatagaggatagtgaattgcgcagaacgctgcagtccctgtgccatttctgggactctgattgatccagctgtggacattggaaggcgaaggaagggaggtggctcctgggtcatctttcacaaggctcaagacttcaacctgcagatgtatctttttccctccagtttttcctctagttcttttaggcatttaaattgtttctgttactctgtgcaaaataactttgagattggacaagaagatgttactaaagagaagttcctttaaaaggtcttgttcttgtgtcaaaaagctgcaagtttggtttgttctcgtgtgtgatcatgagtgcacaatgaagaagaccctagatgctgcattttttagctctgaagattccttaggtatccctgaagacagctcgctcagatgatcagcatttagagtgaaaacaagggcccttcatgggtgaacattagaaagagccagggttcaaagctggcgaatggatgacgcaccctagccactggcccctctctgtttcatgtatttccaaaagttgtaaactttgatggctgatttttcgtaagtcaggtttctaagtgagctccctgaggtgccaaggccatggtgtccgccctgctgcgtctgttcgtcagctgagttccttgtgaatctctgttttagggtttggggctagtgtgtttgtgtttccattctaagattgagtctggcagtccctgtttttttgcattggggtaactgctctttgattttttttaattgcagtatttgtgtgattgcaataataaagtttggtttggtttttacagtcatgcgcagggacgatccttgttctctgctgtaaactgtaaaaagtttatggagacttaaagtcttgatgttgtgaagcagaggttattttgtggaaagattaaaaggattttgttggtacctggttttgtgttgtgtatatatacatgaggttgaacagtgaaaggaaagttcagtagtgatgttagaagggtaactatgacaaagatacttttgagataacatttaaaagtactttatattttacataatagcatgtttcattttgattaaaagctaccaaaggaattttgatcatggcataagtgtttaaagcaatattttctggaatataccaagtttatataatttgattttgtgctaaattattaagagtctctttttgaaacatgcgggtttgaaatatgacaccttgtgggtttccatattaaaatcctcactctttaattgtcatttctatctttgaaaattttcatttatgagttccatgatatgtggtctaagaaagaccaaacagatttctatttttttttcttataagttcgttgtgtctagagattgttaatattgtaatttaatgtagacttactttgaataaaattagtttaattggccttaaaattacattaataaaactttgtgatatgcaaaaaaaaaattcttca

SEQ ID NO: 370648 - DNA, 3350 bp, Homo sapiens
ctgacccttcgtctgccccttgtgaaaaccaggccgcggaggaccctccgcgcctggctgggccagggcctcggggcgcgcgcgcccgaggagggggagggggagggacatggcgcgcgctcccgagctctcataaggtgcctccgccgcgcgctcccgagcctgcaggagttagggcacgtcccggcgcgcacccctgagccctcgaggtggtctcacgcccggggtgggggtgccgagccctcaggaggcgcgcgccccggggccctcaggagggtgtcccggctcccgatcccctcaggaggggtgcccgcggcacgcatccccgagccaggagggggtgcccggagccctgggggcagggtctcggtgcgccccccggagccgggggtgagggtcccgatccctcaggacgggagtcccggcgcgcgccctcgagccaggagaggggtgtccgaatctcttagggggagtccgatccctcaggagggattcccggcgcgcgttcctaagccctcaggagtagccgggcgcggcggcggttgggctcgggcacgcgggcggggcggggcggggcgcgcgaggaggacggggcggaggccgcgcggaccggggcgggcggagcggagctcggcgggcggcggcgctcggggcggggcgcggcggttccggcccagccatggcggacgaggccccgcggaagggcagcttctcggcgctcgtgggccgcaccaacggcctcaccaagcccgcggccctggccgccgcgcccgccaagccggggggcgcgggcggctccaagaagctggtcatcaagaacttccgagacagacctcggctgcccgacaactacacgcaggacacgtggcggaagctgcacgaggcggtgcgggccgtgcagagcagcacctccatcaggtacaacctcgaggagctctaccaggctgtggaaaatctctgttctcacaaagtctccccaatgctctacaagcaactgcgtcaggcctgtgaagaccacgtccaggcacagatccttccgtttagagaagactcactagatagtgttttatttttaaagaagattaacacgtgctggcaggaccactgcagacaaatgatcatgatcagaagcatcttcctgttcttggaccgcacctatgtgctgcagaactccacgctgccctccatctgggatatgggattagaactgtttagaacccatattattagtgataaaatggttcagagtaaaaccattgatggaatcctactgctgatcgagcgcgagaggagcggcgaggccgtggaccggagcctgttgcggagcctcctgggcatgctgtctgacctgcaggtgtataaagattcatttgaactgaaatttttggaagagactaattgcttatatgctgccgaaggccaaaggttaatgcaggaaagagaggttccagaatatcttaaccatgtaagtaaacgcttagaggaagagggagacagagtaatcacttacttggaccacagcacacagaaaccactgattgcttgtgtggagaaacagctattaggagaacatttaacagcaattctgcagaaagggctcgaccacttactggatgagaacagagtgccggacctcgcacagatgtaccagctgttcagccgggtgaggggcgggcagcaggcgctgctgcagcactggagcgagtacatcaagacttttggaacagcgatcgtaatcaatcctgagaaagacaaagacatggtccaagacctgttggacttcaaggacaaggtggaccacgtgatcgaggtctgcttccagaagaatgagcggttcgtcaacctgatgaaggagtcctttgagacgttcatcaacaagagacccaacaagcctgcagaactgatcgcaaagcatgtggattcaaagttaagagcaggcaacaaagaagccacagacgaggagctggagcggacgttggacaagatcatgatcctgttcaggtttatccacggtaaagatgtctttgaagcattttataaaaaagatttggcaaaaagactccttgttgggaaaagtgcctcagtcgatgctgaaaagtctatgttgtcaaagctcaagcatgagtgcggtgcagccttcaccagcaagctggaaggcatgttcaaggacatggagctttcgaaggacatcatggttcatttcaagcagcatatgcagaatcagagtgactcaggccctatagacctcacagtgaacatactcacaatgggctactggccaacatacacgcccatggaagtgcacttaaccccagaaatgattaaacttcaggaagtatttaaggcattttatcttggaaagcacagtggtcgaaaacttcagtggcaaactactttgggacatgctgttttaaaagcggagtttaaagaagggaagaaggaattccaggtgtccctcttccagacactggtgctcctcatgttcaacgagggagatggcttcagctttgaggagataaaaatggccacggggatagaggatagtgaattgcgcagaacgctgcagtccctggcctgtggcaaagcacgtgtgctgattaaaagtcccaaaggaaaggaagtggaagatggagacaagttcatttttaatggagagttcaagcacaagttgtttagaataaagatcaatcaaattcagatgaaggaaactgtatgtataaactttctctttttacttatagggggtttagcagggaatcatttgtttttgtagtaatgtttttggctgttagaggcctgaagcacatttctacaataatccaatttcactatgtaatgtttataagagtactcattttcctgtcgctttcattaacttcacattctcagtaggaaagaaaatcagaaaaaaagccacttaatgttattcctattcacaaaaaagttgtgtgctaagccagaactccccatggtcatagggtttcgaaaattatccacactttctatggtaatagaatctgatatggttcactcttggtgttgtacattctgtgggtctgggtaaatgtataatgttatgtatccaccattataggatcatacaggacagtttcattgccctaaaaattctcttatgttctgtcgctgtatccctgtctccctccgagcccctggcaacccctgaccctgttactgtcaccatagttttgccctttcctgaatgccgtacagttggagtcatagtgtatatagccttttcagattggcttctttatttattagaacgtatttgaggttcaccgtgtcttttcatgactgggtaactctgctttttgcactgaaggattctc

SEQ ID NO: 370649 - DNA, 2573 bp, Homo sapiens
ctgacccttcgtctgccccttgtgaaaaccaggccgcggaggaccctccgcgcctggctgggccagggcctcggggcgcgcgcgcccgaggagggggagggggagggacatggcgcgcgctcccgagctctcataaggtgcctccgccgcgcgctcccgagcctgcaggagttagggcacgtcccggcgcgcacccctgagccctcgaggtggtctcacgcccggggtgggggtgccgagccctcaggaggcgcgcgccccggggccctcaggagggtgtcccggctcccgatcccctcaggaggggtgcccgcggcacgcatccccgagccaggagggggtgcccggagccctgggggcagggtctcggtgcgccccccggagccgggggtgagggtcccgatccctcaggacgggagtcccggcgcgcgccctcgagccaggagaggggtgtccgaatctcttagggggagtccgatccctcaggagggattcccggcgcgcgttcctaagccctcaggagtagccgggcgcggcggcggttgggctcgggcacgcgggcggggcggggcggggcgcgcgaggaggacggggcggaggccgcgcggaccggggcgggcggagcggagctcggcgggcggcggcgctcggggcggggcgcggcggttccggcccagccatggcggacgaggccccgcggaagggcagcttctcggcgctcgtgggccgcaccaacggcctcaccaagcccgcggccctggccgccgcgcccgccaagccggggggcgcgggcggctccaagaagctggtcatcaagaacttccgagacagacctcggctgcccgacaactacacgcaggacacgtggcggaagctgcacgaggcggtgcgggccgtgcagagcagcacctccatcaggtacaacctcgaggagctctaccaggctgtggaaaatctctgttctcacaaagtctccccaatgctctacaagcaactgcgtcaggcctgtgaagaccacgtccaggcacagatccttccgtttagagaagactcactagatagtgttttatttttaaagaagattaacacgtgctggcaggaccactgcagacaaatgatcatgatcagaagcatcttcctgttcttggaccgcacctatgtgctgcagaactccacgctgccctccatctgggatatgggattagaactgtttagaacccatattattagtgataaaatggttcagagtaaaaccattgatggaatcctactgctgatcgagcgcgagaggagcggcgaggccgtggaccggagcctgttgcggagcctcctgggcatgctgtctgacctgcaggtgtataaagattcatttgaactgaaatttttggaagagactaattgcttatatgctgccgaaggccaaaggttaatgcaggaaagagaggttccagaatatcttaaccatgtaagtaaacgcttagaggaagagggagacagagtaatcacttacttggaccacagcacacagtaagtaccgtttgttcgctgagcgttcgtatcttcaccatggctggaaggttctcctggctggttattgaaataaagggtgtctttgtcaattcattcagtactaagagtgtttttgcacctagcatattttactttgttatttgtcattatttggcattcacaaattacagtttttacccagtgccttgtcatgagttacgtctaaagagagtaaatcttgctgagatacttggcatctttgagttttgagacggtctatttatgttaatggagtatcactgaatattaggttattttgattgtgcattctctgttacacattttatatcgctttaattttatttatggtgctgtcacacaattttctcttttcatcttatgtttttttcctgcaaacctgaggttgatgagtagctagggaaacaaaaagggagagattatgtgagcgtgtgtgtcaggcacagtgtgtccatatgatgggaggcaaggacagaggcagaggggacagcaagggagagaaatgaaaatgatacagtgtgcagctgggcgcggtggctcacgcctgtaatcccagcactttgggaggctgaggtgggcagatcacaaagtcaggagatcgagaccatcctgaccaacatggtgaaaccccgtctctactaacaatacaaaaaaattagccgggcgtggtggcgggaacctatagtcccagctacttgggaggctgaggcaggagaatggcatgagcccgggaggcagagcttgcagtgagccgagatcacgccactgcactccagcctgggcgacagagcgagactccgtctcaaaaaaaaaaaaaaaagaaaatgatacagtgtgcagaactggacccagtagggaatgataaaatgtacagatgtgcagaacaggacttggtaggactcagcagagaaaacaggaggagagatgaaaatgatatggtgtgcagaactggactcagtaaggtgcggaaaggggaaggattctgacagaatccagcacaaaaacagagagggtgcagaaaaaga

SEQ ID NO: 370650 - DNA, 1077 bp, Homo sapiens
cccgcccgacttggggggaaggccccgagatccgtgcgggccccgggagcgggggcgccggggcgccggccgggtcgggggtggctacgcggggcgcttcgcggcgcgccctgagccgcccgctctccctccgccctgcagacagacctcggctgcccgacaactacacgcaggacacgtggcggaagctgcacgaggcggtgcgggccgtgcagagcagcacctccatcaggtacaacctcgaggagctctaccaggctgtggaaaatctctgttctcacaaagtctccccaatgctctacaagcaactgcgtcaggcctgtgaagaccacgtccaggcacagatccttccgtttagagaagactcactagatagtgttttatttttaaagaagattaacacgtgctggcaggaccactgcagacaaatgatcatgatcagaagcatcttcctgttcttggaccgcacctatgtgctgcagaactccacgctgccctccatctgccaaaatcattaacgtgaacgtaggagtccaggtgggtcttagccttgaaacaccaggtgtctagccagcagcaaggagtggagcaggaagctcggacaggcggctgactttggtcatgagggtgaagacagagggtcttggtttctctctgacgactggaggttgagcctggagcggctctttccagcgctgcagttgaaactcggagaaagactgcctgctgcccgtggggtcgcagccctgaggctgtgcgtcccctgtggaatggcttgctcagcctcccggcctcctgagcacatagcactcatcgtccgtcatctttcggggactgtatacaccaggggttctggggcctttcctcagcagcgttcgcggccacggaccccacatgtcctctgctgacccctgtgtgtcctctgtggccaccccatggcgctgaatcctgccgcctcctgcaagccgactttggacaaaagctgtgtccggtctcaccgtctgatttgtcttgttctctgttaatgtagtgtttcattcttctcacattcatacataaaagtgatgtcgtgccttc

SEQ ID NO: 370651 - DNA, 1828 bp, Homo sapiens
ctgacccttcgtctgccccttgtgaaaaccaggccgcggaggaccctccgcgcctggctgggccagggcctcggggcgcgcgcgcccgaggagggggagggggagggacatggcgcgcgctcccgagctctcataaggtgcctccgccgcgcgctcccgagcctgcaggagttagggcacgtcccggcgcgcacccctgagccctcgaggtggtctcacgcccggggtgggggtgccgagccctcaggaggcgcgcgccccggggccctcaggagggtgtcccggctcccgatcccctcaggaggggtgcccgcggcacgcatccccgagccaggagggggtgcccggagccctgggggcagggtctcggtgcgccccccggagccgggggtgagggtcccgatccctcaggacgggagtcccggcgcgcgccctcgagccaggagaggggtgtccgaatctcttagggggagtccgatccctcaggagggattcccggcgcgcgttcctaagccctcaggagtagccgggcgcggcggcggttgggctcgggcacgcgggcggggcggggcggggcgcgcgaggaggacggggcggaggccgcgcggaccggggcgggcggagcggagctcggcgggcggcggcgctcggggcggggcgcggcggttccggcccagccatggcggacgaggccccgcggaagggcagcttctcggcgctcgtgggccgcaccaacggcctcaccaagcccgcggccctggccgccgcgcccgccaagccggggggcgcgggcggctccaagaagctggtcatcaagaacttccgagacagacctcggctgcccgacaactacacgcaggacacgtggcggaagctgcacgaggcggtgcgggccgtgcagagcagcacctccatcaggtacaacctcgaggagctctaccaggctgtggaaaatctctgttctcacaaagtctccccaatgctctacaagcaactgcgtcaggcctgtgaagaccacgtccaggcacagatccttccgtttagagaagactcactagatagtgttttatttttaaagaagattaacacgtgctggcaggaccactgcagacaaatgatcatgatcagaagcatcttcctgttcttggaccgcacctatgtgctgcagaactccacgctgccctccatctgccaaaatcattaacgtgaacgtaggagtccaggtgggtcttagccttgaaacaccaggtgtctagccagcagcaaggagtggagcaggaagctcggacaggcggctgactttggtcatgagggtgaagacagagggtcttggtttctctctgacgactggaggttgagcctggagcggctctttccagcgctgcagttgaaactcggagaaagactgcctgctgcccgtggggtcgcagccctgaggctgtgcgtcccctgtggaatggcttgctcagcctcccggcctcctgagcacatagcactcatcgtccgtcatctttcggggactgtatacaccaggggttctggggcctttcctcagcagcgttcgcggccacggaccccacatgtcctctgctgacccctgtgtgtcctctgtggccaccccatggcgctgaatcctgccgcctcctgcaagccgactttggacaaaagctgtgtccggtctcaccgtctgatttgtcttgttctctgttaatgtagtgtttcattcttctcacattcatacataaaagtgatgtcgtgccttctcatgagctttaaacccaagttctttaaaatgtgcctgcttttcctaccccaccctctgggcccg

SEQ ID NO: 370652 - DNA, 441 bp, Homo sapiens
atactgtttcatcaacaagggtgcaacatggatagcataagtcattagcataatccaaatgcttgctaacggcctttggaatgcctaaacttaaaaaagtacactaccaaggacttggaaagaatctcgcactccaacgccaaagaatctattgcatattaatcttcattagaaaaaaaattgattggggacctaaagacaaaaataagcctattgtgcaatagcaaaacattaaaaaaatttaaaaagctttaggaaatttcatgtcattgtacaaagatgctacaccggagaaagggggatctggtgatcctaattttgtcaccagctttgaaatctttagctaggcatttcagccctataaaaatccattttctcacttgtaaaaagaagagttgaagttatgtttttccagggcttttttctctgacaaaccgaatt

SEQ ID NO: 370653 - DNA, 469 bp, Homo sapiens
cctactctctcttccgtagggtggagttgcagctggtaaatggctcccagcagggagcttgccaggctccttgacacctgtgtgaagccatgcgactcattctgcaaatgaaagcaagcagaaaggatgcgggtcacttcttgatcaaggtggttaacagaggggcatatcttctccagagtctctcaatcctggcactagctggatggcaaagcccagggcaatcttagagacctggcggtaaagatgacaaaccctctctcagctttgggtcctgaatgggttcccaaatgtgaaatagggtctgctacataagacagaaacagacttcttttgtgttaaactgctgaaattgcagagttatttgttacagcaactaatgttaccctaattaacacaaacctaacaagaaatgtccaggatttacatgaaaaaacttctaaatgtttagaagactatatgagatttg

SEQ ID NO: 370654 - DNA, 234 bp, Homo sapiens
acctgttgaatgtcaggcagtgtgttggacagtgagatgtgaatacaaaacagcctctgtagaaagggatgtcacaatctagtgtcatccaaacaagatgataaaagtagatgaggccgggcacagcagctcacacctgtaatcccagcactttgggaggctcaggcaggcagatcgcttgagcctaggagtttgagaccgacttcagcaacctgataaaaaaaccctctatac

SEQ ID NO: 370655 - DNA, 951 bp, Homo sapiens
gtggtcatcccgcctcagccacctactacaggaccgccaaaaaagcaacagggcggaagaagtcttcatcacatgattctgggactgatattacttctgtgactcttggggatacaacagctgtcaaaaccaaaatacttataaagaaagggagaggaaatctggaaaaaaccaacttggacctcggcccaactgccccatccctggagaaggagaaaaccctctgcctttccactccttcatctagcactgttaaacattccacttcctccataggctccatgttggctcaggcagacaagcttccaatgactgacaagagggttgccagcctcctaaaaaaggccaaagctcagctctgcaagattgagaagagtaagagtcttaaacaaaccgaccagcccaaagcacagggtcaagaaagtgactcatcagagacctctgtgcgaggaccccggattaaacatgtctgcagaagagcagctgttgcccttggccgaaaacgagctgtgtttcctgatgacatgcccaccctgagtgccttaccatgggaagaacgagaaaagattttgtcttccatggggaatgatgacaagtcatcaattgctggctcagaagatgctgaacctcttgctccacccatcaaaccaattaaacctgtcactagaaacaaggcaccccaggaacctccagtaaagaaaggacgtcgatcgaggcggtgtgggcagtgtcccggctgccaggtgcctgaggactgtggtgtttgtactaattgcttagataagcccaagtttggtggtcgcaatataaagaagcagtgctgcaagatgagaaaatgtcagaatctacaatggatgccttccaaagcctacctgcagaagcaagctaaaggtggtggcctgtttggattcaggcccaggggccgagacattcccttcttcactcttttcc

SEQ ID NO: 370656 - DNA, 253 bp, Homo sapiens
gggtgggtgttataaaagccagtctgtaaagggtaaattcccaatcttgtgccttgttatacccatccctccttggccacccaccacctctcgcacagcccctctgtttttacaccaataacaagaattaagggggaagccctggcagctatacgttttcaaccagactcctttgccgggacccagcccgccaccctgctcgcctccgtcaatggcctgagatcgtcctgcctgaatgggatcctctagatca

SEQ ID NO: 370657 - DNA, 857 bp, Homo sapiens
attttaatagaatttacatggacaccttggttttagtgttagataaaagcaacatatctttcctggcaataggctgccaagcctccagacttaaatcccgagacagaggagagtataccttcccgcagctcccccgaaggacctgatccaccagttcttactgaggtcagcaaacaggatgatcagcagcctttagatctagaaggagtcaagaggaagatggaccaagggaattacacatctgtggtatgtttctacagtgagccatcagaatttctagtgccaataaagcttctttggacctttggggcatgaaactgagtataagtaaatttaaaaatgaattgtattatatttagaaatgtcacgtggctttagatacctaaaaatgtatgagttattttagctttgtgtttcagaagaagggttgtgatagggaagataatgtcttaaaatagttcttttatttggctttcatctcagttttctgaaaattatttttatattaagaggaagcactaagaaactgttgatgtgggaaatgctaatatgaaattaattggttctccctccccttttgagatcagatctgaataatgtgcctttctttataaggtcttcatttgtagatagatgcctgttaattttatgattttaagtatgtataggaaatgattatttattatctcatgatctatatttgcgattctgttgtttatttttatttatttatttatttatttgagatggagtctcgctctgttaccaagaggatataaaatgagccaagttagcacaaaatacacatcaagccaggctgaaaaaatgagctctgactcaaaaaaaaaaaccaccca

SEQ ID NO: 370658 - DNA, 1505 bp, Homo sapiens
gcatcccgggactgaacccctcctccctttcacagattacctcatccgagcaagattcctccctccctccctcctagagacctgatcccgccacatccccgcctccctctctgggcagatgtgttactcctagggcagttttcctctcgggcgtctctcgggtgatggcctcatccagggccacgttctcctggcccttggggatcgtgtcccttccagcaccttgctttcgaaaacccgatgaaccctcgcgccatccccgggccaggtccctatactgccagccactcccccttccttcacctccaccctctacccccaccccaagcagaccgatcctcccccatcccgcccttctcttctcgtcatttcattattgatccaccttttcctaggccaatcctggggcttggaaggggtgggggaagccaggttggggtgaggagagtagataagggacagttatactttagtgtggtggcggtggttgctttgggatgggagaaaaaggattatcaagcaaagttattccttagaaaggacttggggttgtctctgattcttgtaaggggacccaaggtggatgaagggtcagagcgttgccccttccccattagtactggggcaagaacggagttgcttctataaacattattcggcccccttcagcaaaaaggaaagttgcccaaggaagggaagttgagttcaggttcagccagtggcgttgcgcatttgttttccattggatgcagaaggggggagttcgaattgtagaggggggaggatggcatgggggatgctaggaggaggaagagcagctgctaggggctgaagcgaaggggggtagggggttgctgctctggagtgctcttgattgaaacagaaagggaaagataacaaccagccgtttcctgcgtgctctgccgttggtgcacacaaaatatcctgggcaaaccccttgtcccctattgtgccccgcacccctttagatttacggaaagatcctgggaagaaggggagggaggagatcccaaggaccctggcccctcctttcaaggagctggcattttttagttgttagtcttcctgcctcctttttttttaatcgtttctaaggcagcctgatcaggagactgacaacaacccgccttctgacagagcaaggaggacatgatgggggcgtgttccttgctatgtagctagctgcagcgtcccctttccctgcctctttctgctctatctccacctccttttcccagccttcagaaggcagctgcagtcagcagggttgtttgagactatttattggttgctgtagattattatttttttttgaaaggccaattctgtattttttaagctaacaacacagatcccatgtagttggagaaccaaaggccacatacatgacaaaaagactgaaccgttcaggttacttgcatggagttggtgcttaaatgtgagttgattttgcttttttaaaagatacagcagcaaaaaaaaaa

SEQ ID NO: 370659 - DNA, 17017 bp, Homo sapiens
ctgcttcacttcacggggcgaacatggcgcacagctgtcggtggcgcttccccgcccgacccgggaccaccgggggcggcggcggcggggggcgccggggcctagggggcgccccgcggcaacgcgtcccggccctgctgcttccccccgggcccccggtcggcggtggcggccccggggcgcccccctcccccccggctgtggcggccgcggcggcggcggcgggaagcagcggggctggggttccagggggagcggccgccgcctcagcagcctcctcgtcgtccgcctcgtcttcgtcttcgtcatcgtcctcagcctcttcagggccggccctgctccgggtgggcccgggcttcgacgcggcgctgcaggtctcggccgccatcggcaccaacctgcgccggttccgggccgtgtttggggagagcggcgggggaggcggcagcggagaggatgagcaattcttaggttttggctcagatgaagaagtcagagtgcgaagtcccacaaggtctccttcagttaaaactagtcctcgaaaacctcgtgggagacctagaagtggctctgaccgaaattcagctatcctctcagatccatctgtgttttcccctctaaataaatcagagaccaaatctggagataagatcaagaagaaagattctaaaagtatagaaaagaagagaggaagacctcccaccttccctggagtaaaaatcaaaataacacatggaaaggacatttcagagttaccaaagggaaacaaagaagatagcctgaaaaaaattaaaaggacaccttctgctacgtttcagcaagccacaaagattaaaaaattaagagcaggtaaactctctcctctcaagtctaagtttaagacagggaagcttcaaataggaaggaagggggtacaaattgtacgacggagaggaaggcctccatcaacagaaaggataaagaccccttcgggtctcctcattaattctgaactggaaaagccccagaaagtccggaaagacaaggaaggaacacctccacttacaaaagaagataagacagttgtcagacaaagccctcgaaggattaagccagttaggattattccttcttcaaaaaggacagatgcaaccattgctaagcaactcttacagagggcaaaaaagggggctcaaaagaaaattgaaaaagaagcagctcagctgcagggaagaaaggtgaagacacaggtcaaaaatattcgacagttcatcatgcctgttgtcagtgctatctcctcgcggatcattaagacccctcggcggtttatagaggatgaggattatgaccctccaattaaaattgcccgattagagtctacaccgaatagtagattcagtgccccgtcctgtggatcttctgaaaaatcaagtgcagcttctcagcactcctctcaaatgtcttcagactcctctcgatctagtagccccagtgttgatacctccacagactctcaggcttctgaggagattcaggtacttcctgaggagcggagcgatacccctgaagttcatcctccactgcccatttcccagtccccagaaaatgagagtaatgataggagaagcagaaggtattcagtgtcggagagaagttttggatctagaacgacgaaaaaattatcaactctacaaagtgccccccagcagcagacctcctcgtctccacctccacctctgctgactccaccgccaccactgcagccagcctccagtatctctgaccacacaccttggcttatgcctccaacaatccccttagcatcaccatttttgcctgcttccactgctcctatgcaagggaagcgaaaatctattttgcgagaaccgacatttaggtggacttctttaaagcattctaggtcagagccacaatacttttcctcagcaaagtatgccaaagaaggtcttattcgcaaaccaatatttgataatttccgaccccctccactaactcccgaggacgttggctttgcatctggtttttctgcatctggtaccgctgcttcagcccgattgttttcgccactccattctggaacaaggtttgatatgcacaaaaggagccctcttctgagagctccaagatttactccaagtgaggctcactctagaatatttgagtctgtaaccttgcctagtaatcgaacttctgctggaacatcttcttcaggagtatccaatagaaaaaggaaaagaaaagtgtttagtcctattcgatctgaaccaagatctccttctcactccatgaggacaagaagtggaaggcttagtagttctgagctctcacctctcacccccccgtcttctgtctcttcctcgttaagcatttctgttagtcctcttgccactagtgccttaaacccaacttttacttttccttctcattccctgactcagtctggggaatctgcagagaaaaatcagagaccaaggaagcagactagtgctccggcagagccattttcatcaagtagtcctactcctctcttcccttggtttaccccaggctctcagactgaaagagggagaaataaagacaaggcccccgaggagctgtccaaagatcgagatgctgacaagagcgtggagaaggacaagagtagagagagagaccgggagagagaaaaggagaataagcgggagtcaaggaaagagaaaaggaaaaagggatcagaaattcagagtagttctgctttgtatcctgtgggtagggtttccaaagagaaggttgttggtgaagatgttgccacttcatcttctgccaaaaaagcaacagggcggaagaagtcttcatcacatgattctgggactgatattacttctgtgactcttggggatacaacagctgtcaaaaccaaaatacttataaagaaagggagaggaaatctggaaaaaaccaacttggacctcggcccaactgccccatccctggagaaggagaaaaccctctgcctttccactccttcatctagcactgttaaacattccacttcctccataggctccatgttggctcaggcagacaagcttccaatgactgacaagagggttgccagcctcctaaaaaaggccaaagctcagctctgcaagattgagaagagtaagagtcttaaacaaaccgaccagcccaaagcacagggtcaagaaagtgactcatcagagacctctgtgcgaggaccccggattaaacatgtctgcagaagagcagctgttgcccttggccgaaaacgagctgtgtttcctgatgacatgcccaccctgagtgccttaccatgggaagaacgagaaaagattttgtcttccatggggaatgatgacaagtcatcaattgctggctcagaagatgctgaacctcttgctccacccatcaaaccaattaaacctgtcactagaaacaaggcaccccaggaacctccagtaaagaaaggacgtcgatcgaggcggtgtgggcagtgtcccggctgccaggtgcctgaggactgtggtgtttgtactaattgcttagataagcccaagtttggtggtcgcaatataaagaagcagtgctgcaagatgagaaaatgtcagaatctacaatggatgccttccaaagcctacctgcagaagcaagctaaagctgtgaaaaagaaagagaaaaagtctaagaccagtgaaaagaaagacagcaaagagagcagtgttgtgaagaacgtggtggactctagtcagaaacctaccccatcagcaagagaggatcctgccccaaagaaaagcagtagtgagcctcctccacgaaagcccgtcgaggaaaagagtgaagaagggaatgtctcggcccctgggcctgaatccaaacaggccaccactccagcttccaggaagtcaagcaagcaggtctcccagccagcagtggtcatcccgcctcagccacctactacaggaccgccaagaaaagaagttcccaaaaccactcctagtgagcccaagaaaaagcagcctccaccaccagaatcaggtccagagcagagcaaacagaaaaaagtggctccccgcccaagtatccctgtaaaacaaaaaccaaaagaaaaggaaaaaccacctccggtcaataagcaggagaatgcaggcactttgaacatcctcagcactctctccaatggcaatagttctaagcaaaaaattccagcagatggagtccacaggatcagagtggactttaaggaggattgtgaagcagaaaatgtgtgggagatgggaggcttaggaatcttgacttctgttcctataacacccagggtggtttgctttctctgtgccagtagtgggcatgtagagtttgtgtattgccaagtctgttgtgagcccttccacaagttttgtttagaggagaacgagcgccctctggaggaccagctggaaaattggtgttgtcgtcgttgcaaattctgtcacgtttgtggaaggcaacatcaggctacaaagcagctgctggagtgtaataagtgccgaaacagctatcaccctgagtgcctgggaccaaactaccccaccaaacccacaaagaagaagaaagtctggatctgtaccaagtgtgttcgctgtaagagctgtggatccacaactccaggcaaagggtgggatgcacagtggtctcatgatttctcactgtgtcatgattgcgccaagctctttgctaaaggaaacttctgccctctctgtgacaaatgttatgatgatgatgactatgagagtaagatgatgcaatgtggaaagtgtgatcgctgggtccattccaaatgtgagaatctttcagatgagatgtatgagattctatctaatctgccagaaagtgtggcctacacttgtgtgaactgtactgagcggcaccctgcagagtggcgactggcccttgaaaaagagctgcagatttctctgaagcaagttctgacagctttgttgaattctcggactaccagccatttgctacgctaccggcaggctgccaagcctccagacttaaatcccgagacagaggagagtataccttcccgcagctcccccgaaggacctgatccaccagttcttactgaggtcagcaaacaggatgatcagcagcctttagatctagaaggagtcaagaggaagatggaccaagggaattacacatctgtgttggagttcagtgatgatattgtgaagatcattcaagcagccattaattcagatggaggacagccagaaattaaaaaagccaacagcatggtcaagtccttcttcattcggcaaatggaacgtgtttttccatggttcagtgtcaaaaagtccaggttttgggagccaaataaagtatcaagcaacagtgggatgttaccaaacgcagtgcttccaccttcacttgaccataattatgctcagtggcaggagcgagaggaaaacagccacactgagcagcctcctttaatgaagaaaatcattccagctcccaaacccaaaggtcctggagaaccagactcaccaactcctctgcatcctcctacaccaccaattttgagtactgataggagtcgagaagacagtccagagctgaacccacccccaggcatagaagacaatagacagtgtgcgttatgtttgacttatggtgatgacagtgctaatgatgctggtcgtttactatatattggccaaaatgagtggacacatgtaaattgtgctttgtggtcagcggaagtgtttgaagatgatgacggatcactaaagaatgtgcatatggctgtgatcaggggcaagcagctgagatgtgaattctgccaaaagccaggagccaccgtgggttgctgtctcacatcctgcaccagcaactatcacttcatgtgttcccgagccaagaactgtgtctttctggatgataaaaaagtatattgccaacgacatcgggatttgatcaaaggcgaagtggttcctgagaatggatttgaagttttcagaagagtgtttgtggactttgaaggaatcagcttgagaaggaagtttctcaatggcttggaaccagaaaatatccacatgatgattgggtctatgacaatcgactgcttaggaattctaaatgatctctccgactgtgaagataagctctttcctattggatatcagtgttccagggtatactggagcaccacagatgctcgcaagcgctgtgtatatacatgcaagatagtggagtgccgtcctccagtcgtagagccggatatcaacagcactgttgaacatgatgaaaacaggaccattgcccatagtccaacatcttttacagaaagttcatcaaaagagagtcaaaacacagctgaaattataagtcctccatcaccagaccgacctcctcattcacaaacctctggctcctgttattatcatgtcatctcaaaggtccccaggattcgaacacccagttattctccaacacagagatcccctggctgtcgaccgttgccttctgcaggaagtcctaccccaaccactcatgaaatagtcacagtaggtgatcctttactctcctctggacttcgaagcattggctccaggcgtcacagtacctcttccttatcaccccagcggtccaaactccggataatgtctccaatgagaactgggaatacttactctaggaataatgtttcctcagtctccaccaccgggaccgctactgatcttgaatcaagtgccaaagtagttgatcatgtcttagggccactgaattcaagtactagtttagggcaaaacacttccacctcttcaaatttgcaaaggacagtggttactgtaggcaataaaaacagtcacttggatggatcttcatcttcagaaatgaagcagtccagtgcttcagacttggtgtccaagagctcctctttaaagggagagaagaccaaagtgctgagttccaagagctcagagggatctgcacataatgtggcttaccctggaattcctaaactggccccacaggttcataacacaacatctagagaactgaatgttagtaaaatcggctcctttgctgaaccctcttcagtgtcgttttcttctaaagaggccctctccttcccacacctccatttgagagggcaaaggaatgatcgagaccaacacacagattctacccaatcagcaaactcctctccagatgaagatactgaagtcaaaaccttgaagctatctggaatgagcaacagatcatccattatcaacgaacatatgggatctagttccagagataggagacagaaagggaaaaaatcctgtaaagaaactttcaaagaaaagcattccagtaaatcttttttggaacctggtcaggtgacaactggtgaggaaggaaacttgaagccagagtttatggatgaggttttgactcctgagtatatgggccaacgaccatgtaacaatgtttcttctgataagattggtgataaaggcctttctatgccaggagtccccaaagctccacccatgcaagtagaaggatctgccaaggaattacaggcaccacggaaacgcacagtcaaagtgacactgacacctctaaaaatggaaaatgagagtcaatccaaaaatgccctgaaagaaagtagtcctgcttcccctttgcaaatagagtcaacatctcccacagaaccaatttcagcctctgaaaatccaggagatggtccagtggcccaaccaagccccaataatacctcatgccaggattctcaaagtaacaactatcagaatcttccagtacaggacagaaacctaatgcttccagatggccccaaacctcaggaggatggctcttttaaaaggaggtatccccgtcgcagtgcccgtgcacgttctaacatgttttttgggcttaccccactctatggagtaagatcctatggtgaagaagacattccattctacagcagctcaactgggaagaagcgaggcaagagatcagctgaaggacaggtggatggggccgatgacttaagcacttcagatgaagacgacttatactattacaacttcactagaacagtgatttcttcaggtggagaggaacgactggcatcccataatttatttcgggaggaggaacagtgtgatcttccaaaaatctcacagttggatggtgttgatgatgggacagagagtgatactagtgtcacagccacaacaaggaaaagcagccagattccaaaaagaaatggtaaagaaaatggaacagagaacttaaagattgatagacctgaagatgctggggagaaagaacatgtcactaagagttctgttggccacaaaaatgagccaaagatggataactgccattctgtaagcagagttaaaacacagggacaagattccttggaagctcagctcagctcattggagtcaagccgcagagtccacacaagtaccccctccgacaaaaatttactggacacctataatactgagctcctgaaatcagattcagacaataacaacagtgatgactgtgggaatatcctgccttcagacattatggactttgtactaaagaatactccatccatgcaggctttgggtgagagcccagagtcatcttcatcagaactcctgaatcttggtgaaggattgggtcttgacagtaatcgtgaaaaagacatgggtctttttgaagtattttctcagcagctgcctacaacagaacctgtggatagtagtgtctcttcctctatctcagcagaggaacagtttgagttgcctctagagctaccatctgatctgtctgtcttgaccacccggagtcccactgtccccagccagaatcccagtagactagctgttatctcagactcaggggagaagagagtaaccatcacagaaaaatctgtagcctcctctgaaagtgacccagcactgctgagcccaggagtagatccaactcctgaaggccacatgactcctgatcattttatccaaggacacatggatgcagaccacatctctagccctccttgtggttcagtagagcaaggtcatggcaacaatcaggatttaactaggaacagtagcacccctggccttcaggtacctgtttccccaactgttcccatccagaaccagaagtatgtgcccaattctactgatagtcctggcccgtctcagatttccaatgcagctgtccagaccactccaccccacctgaagccagccactgagaaactcatagttgttaaccagaacatgcagccactttatgttctccaaactcttccaaatggagtgacccaaaaaatccaattgacctcttctgttagttctacacccagtgtgatggagacaaatacttcagtattgggacccatgggaggtggtctcacccttaccacaggactaaatccaagcttgccaacttctcaatctttgttcccttctgctagcaaaggattgctacccatgtctcatcaccagcacttacattccttccctgcagctactcaaagtagtttcccaccaaacatcagcaatcctccttcaggcctgcttattggggttcagcctcctccggatccccaacttttggtttcagaatccagccagaggacagacctcagtaccacagtagccactccatcctctggactcaagaaaagacccatatctcgtctacagacccgaaagaataaaaaacttgctccctctagtaccccttcaaacattgccccttctgatgtggtttctaatatgacattgattaacttcacaccctcccagcttcctaatcatccaagtctgttagatttggggtcacttaatacttcatctcaccgaactgtccccaacatcataaaaagatctaaatctagcatcatgtattttgaaccggcacccctgttaccacagagtgtgggaggaactgctgccacagcggcaggcacatcaacaataagccaggatactagccacctcacatcagggtctgtgtctggcttggcatccagttcctctgtcttgaatgttgtatccatgcaaactaccacaacccctacaagtagtgcgtcagttccaggacacgtcaccttaaccaacccaaggttgcttggtaccccagatattggctcaataagcaatcttttaatcaaagctagccagcagagcctggggattcaggaccagcctgtggctttaccgccaagttcaggaatgtttccacaactggggacatcacagaccccctctactgctgcaataacagcggcatctagcatctgtgtgctcccctccactcagactacgggcataacagccgcttcaccttctggggaagcagacgaacactatcagcttcagcatgtgaaccagctccttgccagcaaaactgggattcattcttcccagcgtgatcttgattctgcttcagggccccaggtatccaactttacccagacggtagacgctcctaatagcatgggactggagcagaacaaggctttatcctcagctgtgcaagccagccccacctctcctgggggttctccatcctctccatcttctggacagcggtcagcaagcccttcagtgccgggtcccactaaacccaaaccaaaaaccaaacggtttcagctgcctctagacaaagggaatggcaagaagcacaaagtttcccatttgcggaccagttcttctgaagcacacattccagaccaagaaacgacatccctgacctcaggcacagggactccaggagcagaggctgagcagcaggatacagctagcgtggagcagtcctcccagaaggagtgtgggcaacctgcagggcaagtcgctgttcttccggaagttcaggtgacccaaaatccagcaaatgaacaagaaagtgcagaacctaaaacagtggaagaagaggaaagtaatttcagctccccactgatgctttggcttcagcaagaacaaaagcggaaggaaagcattactgagaaaaaacccaagaaaggacttgtttttgaaatttccagtgatgatggctttcagatctgtgcagaaagtattgaagatgcctggaagtcattgacagataaagtccaggaagctcgatcaaatgcccgcctaaagcagctctcatttgcaggtgttaacggtttgaggatgctggggattctccatgatgcagttgtgttcctcattgagcagctgtctggtgccaagcactgtcgaaattacaaattccgtttccacaagccagaggaggccaatgaaccccccttgaaccctcacggctcagccagggctgaagtccacctcaggaagtcagcatttgacatgtttaacttcctggcttctaaacatcgtcagcctcctgaatacaaccccaatgatgaagaagaggaggaggtacagctgaagtcagctcggagggcaactagcatggatctgccaatgcccatgcgcttccggcacttaaaaaagacttctaaggaggcagttggtgtctacaggtctcccatccatggccggggtcttttctgtaagagaaacattgatgcaggtgagatggtgattgagtatgccggcaacgtcatccgctccatccagactgacaagcgggaaaagtattacgacagcaagggcattggttgctatatgttccgaattgatgactcagaggtagtggatgccaccatgcatggaaatgctgcacgcttcatcaatcactcgtgtgagcctaactgctattctcgggtcatcaatattgatgggcagaagcacattgtcatctttgccatgcgtaagatctaccgaggagaggaactcacttacgactataagttccccattgaggatgccagcaacaagctgccctgcaactgtggcgccaagaaatgccggaagttcctaaactaaagctgctcttctcccccagtgttggagtgcaaggaggcggggccatccaaagcaacgctgaaggccttttccagcagctgggagctcccggattgcgtggcacagctgaggggcctctgtgatggctgagctctcttatgtcctatactcacatcagacatgtgatcatagtcccagagacagagttgaggtctcgaagaaaagatccatgatcggctttctcctggggcccctccaattgtttactgttagaaagtgggaatggggtccctagcagacttgcctggaaggagcctattatagagggttggttatgttgggagattgggcctgaatttctccacagaaataagttgccatcctcaggttggccctttcccaagcactgtaagtgagtgggtcaggcaaagccccaaatggagggttggttagattcctgacagtttgccagccaggccccacctacagcgtctgtcgaacaaacagaggtctggtggttttccctactatcctcccactcgagagttcacttctggttgggagacaggattcctagcacctccggtgtcaaaaggctgtcatggggttgtgccaattaattaccaaacattgagcctgcaggctttgagtgggagtgttgcccccaggagccttatctcagccaattacctttcttgacagtaggagcggcttccctctcccattccctcttcactcccttttcttcctttcccctgtcttcatgccactgctttcccatgcttctttcgggttgtaggggagactgactgcctgctcaaggacactccctgctgggcataggatgtgcctgcaaaaagttccctgagcctgtaagcactccaggtggggaagtggacaggagccattggtcataaccagacagaatttggaaacattttcataaagctccatggagagttttaaagaaacatatgtagcatgattttgtaggagaggaaaaagattatttaaataggatttaaatcatgcaacaacgagagtatcacagccaggatgacccttgggtcccattcctaagacatggttactttattttccccttgttaagacataggaagacttaatttttaaacggtcagtgtccagttgaaggcagaacactaatcagatttcaaggcccacaacttggggactagaccaccttatgttgagggaactctgccacctgcgtgcaacccacagctaaagtaaattcaatgacactactgccctgattactccttaggatgtggtcaaaacagcatcaaatgtttcttctcttcctttccccaagacagagtcctgaacctgttaaattaagtcattggattttactctgttctgtttacagtttactatttaaggttttataaatgtaaatatattttgtatatttttctatgagaagcacttcatagggagaagcacttatgacaaggctattttttaaaccgcggtattatcctaatttaaaagaagatcggtttttaataattttttattttcataggatgaagttagagaaaatattcagctgtacacacaaagtctggtttttcctgcccaacttccccctggaaggtgtactttttgttgtttaatgtgtagcttgtttgtgccctgttgacataaatgtttcctgggtttgctctttgacaataaatggagaaggaaggtcacccaactccattgggccactcccctccttcccctattgaagctcctcaaaaggctacagtaatatcttgatacaacagattctcttctttcccgcctctctcctttccggcgcaacttccagagtggtgggagacggcaatctttacatttccctcatctttcttacttcagagttagcaaacaacaagttgaatggcaacttgacatttttgcatcaccatctgcctcataggccactctttcctttccctctgcccaccaagtcctcatatctgcagagaacccattgatcaccttgtgccctcttttggggcagcctgttgaaactgaagcacagtctgaccactcacgataaagcagatttttctctgcctctgccacaaggtttcagagtagtgtagtccaagtagagggtggggcacccttttctcgccgcaagaagcccattcctatggaagtctagcaaagcaatacgactcagcccagcactctctgccccaggactcatggctctgctgtgccttccatcctgggctcccttctctcctgtgaccttaagaactttgtctggtggctttgctggaacattgtcactgttttcactgtcatgcagggagcccagcactgtggccaggatggcagagacttccttgtcatcatggagaagtgccagcaggggactgggaaaagcactctacccagacctcacctcccttcctccttttgcccatgaacaagatgcagtggccctaggggttccactagtgtctgctttcctttattattgcactgtgtgaggtttttttgtaaatccttgtattcctattttttttaaagaaaaaaaaaaaaccttaagctgcatttgttactgaaatgattaatgcactgatgggtcctgaattcaccttgagaaagacccaaaggccagtcagggggtggggggaactcagctaaatagacctagttactgccctgctaggccatgctgtactgtgagcccctcctcactctctaccaaccctaaaccctgaggacaggggaggaacccacagcttccttctcctgccagctgcagatggtttgccttgcctttccaccccctaattgtcaaccacaaaaatgagaaattcctcttctagctcagccttgagtccattgccaaattttcagcacacctgccagcaacttgggggaataagcgaaggtttccctacaagagggaaagaaggcaaaaacggcacagctatctccaaacacatctgagttcatttcaaaagtgaccaagggaatctccgcacaaaagtgcagattgaggaattgtgatgggtcattcccaagaatcccccaaggggcatcccaaatccctgaggagtaacagctgcaaacctggtcagttctcagtgagagccagctcacttatagctttgctgctagaacctgttgtggctgcatttcctggtggccagtgacaactgtgtaaccagaatagctgcatggcgctgaccctttggccggaacttggtctcttggctccctccttggccacccaccacctctcgcacagcccctctgtttttacaccaataacaagaattaagggggaagccctggcagctatacgttttcaaccagactcctttgccgggacccagcccgccaccctgctcgcctccgtcaaacccccggccaatgcagtgagcaccatgtagctcccttgatttaaaaaaaataaaaaataaaaaaaaaaggaaaaaaaaatacaacacacacacaaaaataaaaaaaatattctaatgaatgtatctttctaaaggactgacgttcaatcaaatatctgaaaatactaaaggtcaaaaccttgtcagatgttaacttctaagttcggtttgggattttttttttttaatagaaatcaagttgtttttgtttttaaggaaaagcgggtcattgcaaagggctgggtgtaattttatgtttcatttccttcattttaaagcaatacaaggttatggagcagatggttttgtgccgaatcatgaatactagtcaagtcacacactctggaaacttgcaactttttgtttgttttggttttcaaataaatataaatatgatatatataggaactaatatagtaatgcaccatgtaacaaagcctagttcagtccatggcttttaattctcttaacactatagataaggattgtgttacagttgctagtagcggcaggaagatgtcaggctcactttcctctgattcccgaaatggggggaacctctaaccataaaggaatggtagaacagtccattcctcggatcagagaaaaatgcagacatggtgtcacctggatttttttctgcccatgaatgttgccagtcagtacctgtcctccttgtttctctatttttggttatgaatgttggggttaccacctgcatttaggggaaaattgtgttctgtgctttcctggtatcttgttccgaggtactctagttctgtctttcaaccaagaaaatagaattgtggtgtttcttttattgaacttttaacagtctctttagtaaatacaggtagttgaataattgtttcaagagctcaacagatgacaagcttcttttctagaaataagacattttttgacaactttatcatgtataacagatctgttttttttccttgtgttcttccaagcttctggttagagaaaaagagaaaaaaaaaaaaggaaaatgtgtctaaagtccatcagtgttaactccctgtgacagggatgaaggaaaatactttaatagttcaaaaaataataatgctgaaagctctctacgaaagactgaatgtaaaagtaaaaagtgtacatagttgtaaaaaaaaggagtttttaaacatgtttattttctatgcacttttttttatttaagtgatagtttaattaataaacatgtcaagtttattgctgcacatggttaagcttccttttggctttggttggagagggtggagaaaagcgggaggggcatggcctgtgacctggtcacaaagtaccttccacagtcctttactttaaggtggcatcactaaattattccctgtagcccaccttcaggtccactccacactggctctcttgactattttcttcctttattcatcagtgatgtatgttcaggacctaattaattgtggatatgaggcagggtcaagaggacaaaggaacagggcctttaccttctacatagctcccctgtttcatccaaggaggttaagtattgatttttatcggttttctcaactgtgaatataataaactgaaagcatttcagggagaagctggagaacaccttctctagctgcactccaccttaaggctgaagctggatttgtt

SEQ ID NO: 370660 - DNA, 16964 bp, Homo sapiens
ctgcttcacttcacggggcgaacatggcgcacagctgtcggtggcgcttccccgcccgacccgggaccaccgggggcggcggcggcggggggcgccggggcctagggggcgccccgcggcaacgcgtcccggccctgctgcttccccccgggcccccggtcggcggtggcggccccggggcgcccccctcccccccggctgtggcggccgcggcggcggcggcgggaagcagcggggctggggttccagggggagcggccgccgcctcagcagcctcctcgtcgtccgcctcgtcttcgtcttcgtcatcgtcctcagcctcttcagggccggccctgctccgggtgggcccgggcttcgacgcggcgctgcaggtctcggccgccatcggcaccaacctgcgccggttccgggccgtgtttggggagagcggcgggggaggcggcagcggagaggatgagcaattcttaggttttggctcagatgaagaagtcagagtgcgaagtcccacaaggtctccttcagttaaaactagtcctcgaaaacctcgtgggagacctagaagtggctctgaccgaaattcagctatcctctcagatccatctgtgttttcccctctaaataaatcagagaccaaatctggagataagatcaagaagaaagattctaaaagtatagaaaagaagagaggaagacctcccaccttccctggagtaaaaatcaaaataacacatggaaaggacatttcagagttaccaaagggaaacaaagaagatagcctgaaaaaaattaaaaggacaccttctgctacgtttcagcaagccacaaagattaaaaaattaagagcaggtaaactctctcctctcaagtctaagtttaagacagggaagcttcaaataggaaggaagggggtacaaattgtacgacggagaggaaggcctccatcaacagaaaggataaagaccccttcgggtctcctcattaattctgaactggaaaagccccagaaagtccggaaagacaaggaaggaacacctccacttacaaaagaagataagacagttgtcagacaaagccctcgaaggattaagccagttaggattattccttcttcaaaaaggacagatgcaaccattgctaagcaactcttacagagggcaaaaaagggggctcaaaagaaaattgaaaaagaagcagctcagctgcagggaagaaaggtgaagacacaggtcaaaaatattcgacagttcatcatgcctgttgtcagtgctatctcctcgcggatcattaagacccctcggcggtttatagaggatgaggattatgaccctccaattaaaattgcccgattagagtctacaccgaatagtagattcagtgccccgtcctgtggatcttctgaaaaatcaagtgcagcttctcagcactcctctcaaatgtcttcagactcctctcgatctagtagccccagtgttgatacctccacagactctcaggcttctgaggagattcaggtacttcctgaggagcggagcgatacccctgaagttcatcctccactgcccatttcccagtccccagaaaatgagagtaatgataggagaagcagaaggtattcagtgtcggagagaagttttggatctagaacgacgaaaaaattatcaactctacaaagtgccccccagcagcagacctcctcgtctccacctccacctctgctgactccaccgccaccactgcagccagcctccagtatctctgaccacacaccttggcttatgcctccaacaatccccttagcatcaccatttttgcctgcttccactgctcctatgcaagggaagcgaaaatctattttgcgagaaccgacatttaggtggacttctttaaagcattctaggtcagagccacaatacttttcctcagcaaagtatgccaaagaaggtcttattcgcaaaccaatatttgataatttccgaccccctccactaactcccgaggacgttggctttgcatctggtttttctgcatctggtaccgctgcttcagcccgattgttttcgccactccattctggaacaaggtttgatatgcacaaaaggagccctcttctgagagctccaagatttactccaagtgaggctcactctagaatatttgagtctgtaaccttgcctagtaatcgaacttctgctggaacatcttcttcaggagtatccaatagaaaaaggaaaagaaaagtgtttagtcctattcgatctgaaccaagatctccttctcactccatgaggacaagaagtggaaggcttagtagttctgagctctcacctctcacccccccgtcttctgtctcttcctcgttaagcatttctgttagtcctcttgccactagtgccttaaacccaacttttacttttccttctcattccctgactcagtctggggaatctgcagagaaaaatcagagaccaaggaagcagactagtgctccggcagagccattttcatcaagtagtcctactcctctcttcccttggtttaccccaggctctcagactgaaagagggagaaataaagacaaggcccccgaggagctgtccaaagatcgagatgctgacaagagcgtggagaaggacaagagtagagagagagaccgggagagagaaaaggagaataagcgggagtcaaggaaagagaaaaggaaaaagggatcagaaattcagagtagttctgctttgtatcctgtgggtagggtttccaaagagaaggttgttggtgaagatgttgccacttcatcttctgccaaaaaagcaacagggcggaagaagtcttcatcacatgattctgggactgatattacttctgtgactcttggggatacaacagctgtcaaaaccaaaatacttataaagaaagggagaggaaatctggaaaaaaccaacttggacctcggcccaactgccccatccctggagaaggagaaaaccctctgcctttccactccttcatctagcactgttaaacattccacttcctccataggctccatgttggctcaggcagacaagcttccaatgactgacaagagggttgccagcctcctaaaaaaggccaaagctcagctctgcaagattgagaagagtaagagtcttaaacaaaccgaccagcccaaagcacagggtcaagaaagtgactcatcagagacctctgtgcgaggaccccggattaaacatgtctgcagaagagcagctgttgcccttggccgaaaacgagctgtgtttcctgatgacatgcccaccctgagtgccttaccatgggaagaacgagaaaagattttgtcttccatggggaatgatgacaagtcatcaattgctggctcagaagatgctgaacctcttgctccacccatcaaaccaattaaacctgtcactagaaacaaggcaccccaggaacctccagtaaagaaaggacgtcgatcgaggcggtgtgggcagtgtcccggctgccaggtgcctgaggactgtggtgtttgtactaattgcttagataagcccaagtttggtggtcgcaatataaagaagcagtgctgcaagatgagaaaatgtcagaatctacaatggatgccttccaaagcctacctgcagaagcaagctaaagctgtgaaaaagaaagagaaaaagtctaagaccagtgaaaagaaagacagcaaagagagcagtgttgtgaagaacgtggtggactctagtcagaaacctaccccatcagcaagagaggatcctgccccaaagaaaagcagtagtgagcctcctccacgaaagcccgtcgaggaaaagagtgaagaagggaatgtctcggcccctgggcctgaatccaaacaggccaccactccagcttccaggaagtcaagcaagcaggtctcccagccagcagtggtcatcccgcctcagccacctactacaggaccgccaagaaaagaagttcccaaaaccactcctagtgagcccaagaaaaagcagcctccaccaccagaatcaggtccagagcagagcaaacagaaaaaagtggctccccgcccaagtatccctgtaaaacaaaaaccaaaagaaaaggaaaaaccacctccggtcaataagcaggagaatgcaggcactttgaacatcctcagcactctctccaatggcaatagttctaagcaaaaaattccagcagatggagtccacaggatcagagtggactttaaggaggattgtgaagcagaaaatgtgtgggagatgggaggcttaggaatcttgacttctgttcctataacacccagggtggtttgctttctctgtgccagtagtgggcatgtagagtttgtgtattgccaagtctgttgtgagcccttccacaagttttgtttagaggagaacgagcgccctctggaggaccagctggaaaattggtgttgtcgtcgttgcaaattctgtcacgtttgtggaaggcaacatcaggctacaaagcagctgctggagtgtaataagtgccgaaacagctatcaccctgagtgcctgggaccaaactaccccaccaaacccacaaagaagaagaaagtctggatctgtaccaagtgtgttcgctgtaagagctgtggatccacaactccaggcaaagggtgggatgcacagtggtctcatgatttctcactgtgtcatgattgcgccaagctctttgctaaaggaaacttctgccctctctgtgacaaatgttatgatgatgatgactatgagagtaagatgatgcaatgtggaaagtgtgatcgctgggtccattccaaatgtgagaatctttcagatgagatgtatgagattctatctaatctgccagaaagtgtggcctacacttgtgtgaactgtactgagcggcaccctgcagagtggcgactggcccttgaaaaagagctgcagatttctctgaagcaagttctgacagctttgttgaattctcggactaccagccatttgctacgctaccggcaggctgccaagcctccagacttaaatcccgagacagaggagagtataccttcccgcagctcccccgaaggacctgatccaccagttcttactgaggtcagcaaacaggatgatcagcagcctttagatctagaaggagtcaagaggaagatggaccaagggaattacacatctgtgttggagttcagtgatgatattgtgaagatcattcaagcagccattaattcagatggaggacagccagaaattaaaaaagccaacagcatggtcaagtccttcttcattcggcaaatggaacgtgtttttccatggttcagtgtcaaaaagtccaggttttgggagccaaataaagtatcaagcaacagtgggatgttaccaaacgcagtgcttccaccttcacttgaccataattatgctcagtggcaggagcgagaggaaaacagccacactgagcagcctcctttaatgaagaaaatcattccagctcccaaacccaaaggtcctggagaaccagactcaccaactcctctgcatcctcctacaccaccaattttgagtactgataggagtcgagaagacagtccagagctgaacccacccccaggcatagaagacaatagacagtgtgcgttatgtttgacttatggtgatgacagtgctaatgatgctggtcgtttactatatattggccaaaatgagtggacacatgtaaattgtgctttgtggtcagcggaagtgtttgaagatgatgacggatcactaaagaatgtgcatatggctgtgatcaggggcaagcagctgagatgtgaattctgccaaaagccaggagccaccgtgggttgctgtctcacatcctgcaccagcaactatcacttcatgtgttcccgagccaagaactgtgtctttctggatgataaaaaagtatattgccaacgacatcgggatttgatcaaaggcgaagtggttcctgagaatggatttgaagttttcagaagagtgtttgtggactttgaaggaatcagcttgagaaggaagtttctcaatggcttggaaccagaaaatatccacatgatgattgggtctatgacaatcgactgcttaggaattctaaatgatctctccgactgtgaagataagctctttcctattggatatcagtgttccagggtatactggagcaccacagatgctcgcaagcgctgtgtatatacatgcaagatagtggagtgccgtcctccagtcgtagagccggatatcaacagcactgttgaacatgatgaaaacaggaccattgcccatagtccaacatcttttacagaaagttcatcaaaagagagtcaaaacacagctgaaattataagtcctccatcaccagaccgacctcctcattcacaaacctctggctcctgttattatcatgtcatctcaaaggtccccaggattcgaacacccagttattctccaacacagagatcccctggctgtcgaccgttgccttctgcaggaagtcctaccccaaccactcatgaaatagtcacagtaggtgatcctttactctcctctggacttcgaagcattggctccaggcgtcacagtacctcttccttatcaccccagcggtccaaactccggataatgtctccaatgagaactgggaatacttactctaggaataatgtttcctcagtctccaccaccgggaccgctactgatcttgaatcaagtgccaaagtagttgatcatgtcttagggccactgaattcaagtactagtttagggcaaaacacttccacctcttcaaatttgcaaaggacagtggttactgtaggcaataaaaacagtcacttggatggatcttcatcttcagaaatgaagcagtccagtgcttcagacttggtgtccaagagctcctctttaaagggagagaagaccaaagtgctgagttccaagagctcagagggatctgcacataatgtggcttaccctggaattcctaaactggccccacaggttcataacacaacatctagagaactgaatgttagtaaaatcggctcctttgctgaaccctcttcagtgtcgttttcttctaaagaggccctctccttcccacacctccatttgagagggcaaaggaatgatcgagaccaacacacagattctacccaatcagcaaactcctctccagatgaagatactgaagtcaaaaccttgaagctatctggaatgagcaacagatcatccattatcaacgaacatatgggatctagttccagagataggagacagaaagggaaaaaatcctgtaaagaaactttcaaagaaaagcattccagtaaatcttttttggaacctggtcaggtgacaactggtgaggaaggaaacttgaagccagagtttatggatgaggttttgactcctgagtatatgggccaacgaccatgtaacaatgtttcttctgataagattggtgataaaggcctttctatgccaggagtccccaaagctccacccatgcaagtagaaggatctgccaaggaattacaggcaccacggaaacgcacagtcaaagtgacactgacacctctaaaaatggaaaatgagagtcaatccaaaaatgccctgaaagaaagtagtcctgcttcccctttgcaaatagagtcaacatctcccacagaaccaatttcagcctctgaaaatccaggagatggtccagtggcccaaccaagccccaataatacctcatgccaggattctcaaagtaacaactatcagaatcttccagtacaggacagaaacctaatgcttccagatggccccaaacctcaggaggatggctcttttaaaaggaggtatccccgtcgcagtgcccgtgcacgttctaacatgttttttgggcttaccccactctatggagtaagatcctatggtgaagaagacattccattctacagcagctcaactgggaagaagcgaggcaagagatcagctgaaggacaggtggatggggccgatgacttaagcacttcagatgaagacgacttatactattacaacttcactagaacagtgatttcttcaggtggagaggaacgactggcatcccataatttatttcgggaggaggaacagtgtgatcttccaaaaatctcacagttggatggtgttgatgatgggacagagagtgatactagtgtcacagccacaacaaggaaaagcagccagattccaaaaagaaatggtaaagaaaatggaacagagaacttaaagattgatagacctgaagatgctggggagaaagaacatgtcactaagagttctgttggccacaaaaatgagccaaagatggataactgccattctgtaagcagagttaaaacacagggacaagattccttggaagctcagctcagctcattggagtcaagccgcagagtccacacaagtaccccctccgacaaaaatttactggacacctataatactgagctcctgaaatcagattcagacaataacaacagtgatgactgtgggaatatcctgccttcagacattatggactttgtactaaagaatactccatccatgcaggctttgggtgagagcccagagtcatcttcatcagaactcctgaatcttggtgaaggattgggtcttgacagtaatcgtgaaaaagacatgggtctttttgaagtattttctcagcagctgcctacaacagaacctgtggatagtagtgtctcttcctctatctcagcagaggaacagtttgagttgcctctagagctaccatctgatctgtctgtcttgaccacccggagtcccactgtccccagccagaatcccagtagactagctgttatctcagactcaggggagaagagagtaaccatcacagaaaaatctgtagcctcctctgaaagtgacccagcactgctgagcccaggagtagatccaactcctgaaggccacatgactcctgatcattttatccaaggacacatggatgcagaccacatctctagccctccttgtggttcagtagagcaaggtcatggcaacaatcaggatttaactaggaacagtagcacccctggccttcaggtacctgtttccccaactgttcccatccagaaccagaagtatgtgcccaattctactgatagtcctggcccgtctcagatttccaatgcagctgtccagaccactccaccccacctgaagccagccactgagaaactcatagttgttaaccagaacatgcagccactttatgttctccaaactcttccaaatggagtgacccaaaaaatccaattgacctcttctgttagttctacacccagtgtgatggagacaaatacttcagtattgggacccatgggaggtggtctcacccttaccacaggactaaatccaagcttgccaacttctcaatctttgttcccttctgctagcaaaggattgctacccatgtctcatcaccagcacttacattccttccctgcagctactcaaagtagtttcccaccaaacatcagcaatcctccttcaggcctgcttattggggttcagcctcctccggatccccaacttttggtttcagaatccagccagaggacagacctcagtaccacagtagccactccatcctctggactcaagaaaagacccatatctcgtctacagacccgaaagaataaaaaacttgctccctctagtaccccttcaaacattgccccttctgatgtggtttctaatatgacattgattaacttcacaccctcccagcttcctaatcatccaagtctgttagatttggggtcacttaatacttcatctcaccgaactgtccccaacatcataaaaagatctaaatctagcatcatgtattttgaaccggcacccctgttaccacagagtgtgggaggaactgctgccacagcggcaggcacatcaacaataagccaggatactagccacctcacatcagggtctgtgtctggcttggcatccagttcctctgtcttgaatgttgtatccatgcaaactaccacaacccctacaagtagtgcgtcagttccaggacacgtcaccttaaccaacccaaggttgcttggtaccccagatattggctcaataagcaatcttttaatcaaagctagccagcagagcctggggattcaggaccagcctgtggctttaccgccaagttcaggaatgtttccacaactggggacatcacagaccccctctactgctgcaataacagcggcatctagcatctgtgtgctcccctccactcagactacgggcataacagccgcttcaccttctggggaagcagacgaacactatcagcttcagcatgtgaaccagctccttgccagcaaaactgggattcattcttcccagcgtgatcttgattctgcttcagggccccaggtatccaactttacccagacggtagacgctcctaatagcatgggactggagcagaacaaggctttatcctcagctgtgcaagccagccccacctctcctgggggttctccatcctctccatcttctggacagcggtcagcaagcccttcagtgccgggtcccactaaacccaaaccaaaaaccaaacggtttcagctgcctctagacaaagggaatggcaagaagcacaaagtttcccatttgcggaccagttcttctgaagcacacattccagaccaagaaacgacatccctgacctcaggcacagggactccaggagcagaggctgagcagcaggatacagctagcgtggagcagtcctcccagaaggagtgtgggcaacctgcagggcaagtcgctgttcttccggaagttcaggtgacccaaaatccagcaaatgaacaagaaagtgcagaacctaaaacagtggaagaagaggaaagtaatttcagctccccactgatgctttggcttcagcaagaacaaaagcggaaggaaagcattactgagaaaaaacccaagaaaggacttgtttttgaaatttccagtgatgatggctttcagatctgtgcagaaagtattgaagatgcctggaagtcattgacagataaagtccaggaagctcgatcaaatgcccgcctaaagcagctctcatttgcaggtgttaacggtttgaggatgctggggattctccatgatgcagttgtgttcctcattgagcagctgtctggtgccaagcactgtcgaaattacaaattccgtttccacaagccagaggaggccaatgaaccccccttgaaccctcacggctcagccagggctgaagtccacctcaggaagtcagcatttgacatgtttaacttcctggcttctaaacatcgtcagcctcctgaatacaaccccaatgatgaagaagaggaggaggtacagctgaagtcagctcggagggcaactagcatggatctgccaatgcccatgcgcttccggcacttaaaaaagacttctaaggaggcagttggtgtctacaggtctcccatccatggccggggtcttttctgtaagagaaacattgatgcaggtgagatggtgattgagtatgccggcaacgtcatccgctccatccagactgacaagcgggaaaagtattacgacagcaagggcattggttgctatatgttccgaattgatgactcagaggtagtggatgccaccatgcatggaaatgctgcacgcttcatcaatcactcgtgtgagcctaactgctattctcgggtcatcaatattgatgggcagaagcacattgtcatctttgccatgcgtaagatctaccgaggagaggaactcacttacgactataagttccccattgaggatgccagcaacaagctgccctgcaactgtggcgccaagaaatgccggaagttcctaaactaaagctgctcttctcccccagtgttggagtgcaaggaggcggggccatccaaagcaacgctgaaggccttttccagcagctgggagctcccggattgcgtggcacagctgaggggcctctgtgatggctgagctctcttatgtcctatactcacatcagacatgtgatcatagtcccagagacagagttgaggtctcgaagaaaagatccatgatcggctttctcctggggcccctccaattgtttactgttagaaagtgggaatggggtccctagcagacttgcctggaaggagcctattatagagggttggttatgttgggagattgggcctgaatttctccacagaaataagttgccatcctcaggttggccctttcccaagcactgtaagtgagtgggtcaggcaaagccccaaatggagggttggttagattcctgacagtttgccagccaggccccacctacagcgtctgtcgaacaaacagaggtctggtggttttccctactatcctcccactcgagagttcacttctggttgggagacaggattcctagcacctccggtgtcaaaaggctgtcatggggttgtgccaattaattaccaaacattgagcctgcaggctttgagtgggagtgttgcccccaggagccttatctcagccaattacctttcttgacagtaggagcggcttccctctcccattccctcttcactcccttttcttcctttcccctgtcttcatgccactgctttcccatgcttctttcgggttgtaggggagactgactgcctgctcaaggacactccctgctgggcataggatgtgcctgcaaaaagttccctgagcctgtaagcactccaggtggggaagtggacaggagccattggtcataaccagacagaatttggaaacattttcataaagctccatggagagttttaaagaaacatatgtagcatgattttgtaggagaggaaaaagattatttaaataggatttaaatcatgcaacaacgagagtatcacagccaggatgacccttgggtcccattcctaagacatggttactttattttccccttgttaagacataggaagacttaatttttaaacggtcagtgtccagttgaaggcagaacactaatcagatttcaaggcccacaacttggggactagaccaccttatgttgagggaactctgccacctgcgtgcaacccacagctaaagtaaattcaatgacactactgccctgattactccttaggatgtggtcaaaacagcatcaaatgtttcttctcttcctttccccaagacagagtcctgaacctgttaaattaagtcattggattttactctgttctgtttacagtttactatttaaggttttataaatgtaaatatattttgtatatttttctatgagaagcacttcatagggagaagcacttatgacaaggctattttttaaaccgcggtattatcctaatttaaaagaagatcggtttttaataattttttattttcataggatgaagttagagaaaatattcagctgtacacacaaagtctggtttttcctgcccaacttccccctggaaggtgtactttttgttgtttaatgtgtagcttgtttgtgccctgttgacataaatgtttcctgggtttgctctttgacaataaatggagaaggaaggtcacccaactccattgggccactcccctccttcccctattgaagctcctcaaaaggctacagtaatatcttgatacaacagattctcttctttcccgcctctctcctttccggcgcaacttccagagtggtgggagacggcaatctttacatttccctcatctttcttacttcagagttagcaaacaacaagttgaatggcaacttgacatttttgcatcaccatctgcctcataggccactctttcctttccctctgcccaccaagtcctcatatctgcagagaacccattgatcaccttgtgccctcttttggggcagcctgttgaaactgaagcacagtctgaccactcacgataaagcagatttttctctgcctctgccacaaggtttcagagtagtgtagtccaagtagagggtggggcacccttttctcgccgcaagaagcccattcctatggaagtctagcaaagcaatacgactcagcccagcactctctgccccaggactcatggctctgctgtgccttccatcctgggctcccttctctcctgtgaccttaagaactttgtctggtggctttgctggaacattgtcactgttttcactgtcatgcagggagcccagcactgtggccaggatggcagagacttccttgtcatcatggagaagtgccagcaggggactgggaaaagcactctacccagacctcacctcccttcctccttttgcccatgaacaagatgcagtggccctaggggttccactagtgtctgctttcctttattattgcactgtgtgaggtttttttgtaaatccttgtattcctattttttttaaagaaaaaaaaaaaaccttaagctgcatttgttactgaaatgattaatgcactgatgggtcctgaattcaccttgagaaagacccaaaggccagtcagggggtggggggaactcagctaaatagacctagttactgccctgctaggccatgctgtactgtgagcccctcctcactctctaccaaccctaaaccctgaggacaggggaggaacccacagcttccttctcctgccagctgcagatggtttgccttgcctttccaccccctaattgtcaaccacaaaaatgagaaattcctcttctagctcagccttgagtccattgccaaattttcagcacacctgccagcaacttgggggaataagcgaaggtttccctacaagagggaaagaaggcaaaaacggcacagctatctccaaacacatctgagttcatttcaaaagtgaccaagggaatctccgcacaaaagtgcagattgaggaattgtgatgggtcattcccaagaatcccccaaggggcatcccaaatccctgaggagtaacagctgcaaacctggtcagttctcagtgagagccagctcacttatagctttgctgctagaacctgttgtggctgcatttcctggtggccagtgacaactgtgtaaccagaatagctgcatggcgctgaccctttggccggaacttggtctcttggctccctccttggccacccaccacctctcgcacagcccctctgtttttacaccaataacaagaattaagggggaagccctggcagctatacgttttcaaccagactcctttgccgggacccagcccgccaccctgctcgcctccgtcaaacccccggccaatgcagtgagcaccatgtagctcccttgatttaaaaaaaataaaaaataaaaaaaaaaggaaaaaaaaatacaacacacacacaaaaataaaaaaaatattctaatgaatgtatctttctaaaggactgacgttcaatcaaatatctgaaaatactaaaggtcaaaaccttgtcagatgttaacttctaagttcggtttgggattttttttttttaatagaaatcaagttgtttttgtttttaaggaaaagcgggtcattgcaaagggctgggtgtaattttatgtttcatttccttcattttaaagcaatacaaggttatggagcagatggttttgtgccgaatcatgaatactagtcaagtcacacactctggaaacttgcaactttttgtttgttttggttttcaaataaatataaatatgatatatataggaactaatatagtaatgcaccatgtaacaaagcctagttcagtccatggcttttaattctcttaacactatagataaggattgtgttacagttgctagtagcggcaggaagatgtcaggctcactttcctctgattcccgaaatggggggaacctctaaccataaaggaatggtagaacagtccattcctcggatcagagatcagtacctgtcctccttgtttctctatttttggttatgaatgttggggttaccacctgcatttaggggaaaattgtgttctgtgctttcctggtatcttgttccgaggtactctagttctgtctttcaaccaagaaaatagaattgtggtgtttcttttattgaacttttaacagtctctttagtaaatacaggtagttgaataattgtttcaagagctcaacagatgacaagcttcttttctagaaataagacattttttgacaactttatcatgtataacagatctgttttttttccttgtgttcttccaagcttctggttagagaaaaagagaaaaaaaaaaaaggaaaatgtgtctaaagtccatcagtgttaactccctgtgacagggatgaaggaaaatactttaatagttcaaaaaataataatgctgaaagctctctacgaaagactgaatgtaaaagtaaaaagtgtacatagttgtaaaaaaaaggagtttttaaacatgtttattttctatgcacttttttttatttaagtgatagtttaattaataaacatgtcaagtttattgctgcacatggttaagcttccttttggctttggttggagagggtggagaaaagcgggaggggcatggcctgtgacctggtcacaaagtaccttccacagtcctttactttaaggtggcatcactaaattattccctgtagcccaccttcaggtccactccacactggctctcttgactattttcttcctttattcatcagtgatgtatgttcaggacctaattaattgtggatatgaggcagggtcaagaggacaaaggaacagggcctttaccttctacatagctcccctgtttcatccaaggaggttaagtattgatttttatcggttttctcaactgtgaatataataaactgaaagcatttcagggagaagctggagaacaccttctctagctgcactccaccttaaggctgaagctggatttgtt

SEQ ID NO: 370661 - DNA, 15389 bp, Homo sapiens
ctgcttcacttcacggggcgaacatggcgcacagctgtcggtggcgcttccccgcccgacccgggaccaccgggggcggcggcggcggggggcgccggggcctagggggcgccccgcggcaacgcgtcccggccctgctgcttccccccgggcccccggtcggcggtggcggccccggggcgcccccctcccccccggctgtggcggccgcggcggcggcggcgggaagcagcggggctggggttccagggggagcggccgccgcctcagcagcctcctcgtcgtccgcctcgtcttcgtcttcgtcatcgtcctcagcctcttcagggccggccctgctccgggtgggcccgggcttcgacgcggcgctgcaggtctcggccgccatcggcaccaacctgcgccggttccgggccgtgtttggggagagcggcgggggaggcggcagcggagaggatgagcaattcttaggttttggctcagatgaagaagtcagagtgcgaagtcccacaaggtctccttcagttaaaactagtcctcgaaaacctcgtgggagacctagaagtggctctgaccgaaattcagctatcctctcagatccatctgtgttttcccctctaaataaatcagagaccaaatctggagataagatcaagaagaaagattctaaaagtatagaaaagaagagaggaagacctcccaccttccctggagtaaaaatcaaaataacacatggaaaggacatttcagagttaccaaagggaaacaaagaagatagcctgaaaaaaattaaaaggacaccttctgctacgtttcagcaagccacaaagattaaaaaattaagagcaggtaaactctctcctctcaagtctaagtttaagacagggaagcttcaaataggaaggaagggggtacaaattgtacgacggagaggaaggcctccatcaacagaaaggataaagaccccttcgggtctcctcattaattctgaactggaaaagccccagaaagtccggaaagacaaggaaggaacacctccacttacaaaagaagataagacagttgtcagacaaagccctcgaaggattaagccagttaggattattccttcttcaaaaaggacagatgcaaccattgctaagcaactcttacagagggcaaaaaagggggctcaaaagaaaattgaaaaagaagcagctcagctgcagggaagaaaggtgaagacacaggtcaaaaatattcgacagttcatcatgcctgttgtcagtgctatctcctcgcggatcattaagacccctcggcggtttatagaggatgaggattatgaccctccaattaaaattgcccgattagagtctacaccgaatagtagattcagtgccccgtcctgtggatcttctgaaaaatcaagtgcagcttctcagcactcctctcaaatgtcttcagactcctctcgatctagtagccccagtgttgatacctccacagactctcaggcttctgaggagattcaggtacttcctgaggagcggagcgatacccctgaagttcatcctccactgcccatttcccagtccccagaaaatgagagtaatgataggagaagcagaaggtattcagtgtcggagagaagttttggatctagaacgacgaaaaaattatcaactctacaaagtgccccccagcagcagacctcctcgtctccacctccacctctgctgactccaccgccaccactgcagccagcctccagtatctctgaccacacaccttggcttatgcctccaacaatccccttagcatcaccatttttgcctgcttccactgctcctatgcaagggaagcgaaaatctattttgcgagaaccgacatttaggtggacttctttaaagcattctaggtcagagccacaatacttttcctcagcaaagtatgccaaagaaggtcttattcgcaaaccaatatttgataatttccgaccccctccactaactcccgaggacgttggctttgcatctggtttttctgcatctggtaccgctgcttcagcccgattgttttcgccactccattctggaacaaggtttgatatgcacaaaaggagccctcttctgagagctccaagatttactccaagtgaggctcactctagaatatttgagtctgtaaccttgcctagtaatcgaacttctgctggaacatcttcttcaggagtatccaatagaaaaaggaaaagaaaagtgtttagtcctattcgatctgaaccaagatctccttctcactccatgaggacaagaagtggaaggcttagtagttctgagctctcacctctcacccccccgtcttctgtctcttcctcgttaagcatttctgttagtcctcttgccactagtgccttaaacccaacttttacttttccttctcattccctgactcagtctggggaatctgcagagaaaaatcagagaccaaggaagcagactagtgctccggcagagccattttcatcaagtagtcctactcctctcttcccttggtttaccccaggctctcagactgaaagagggagaaataaagacaaggcccccgaggagctgtccaaagatcgagatgctgacaagagcgtggagaaggacaagagtagagagagagaccgggagagagaaaaggagaataagcgggagtcaaggaaagagaaaaggaaaaagggatcagaaattcagagtagttctgctttgtatcctgtgggtagggtttccaaagagaaggttgttggtgaagatgttgccacttcatcttctgccaaaaaagcaacagggcggaagaagtcttcatcacatgattctgggactgatattacttctgtgactcttggggatacaacagctgtcaaaaccaaaatacttataaagaaagggagaggaaatctggaaaaaaccaacttggacctcggcccaactgccccatccctggagaaggagaaaaccctctgcctttccactccttcatctagcactgttaaacattccacttcctccataggctccatgttggctcaggcagacaagcttccaatgactgacaagagggttgccagcctcctaaaaaaggccaaagctcagctctgcaagattgagaagagtaagagtcttaaacaaaccgaccagcccaaagcacagggtcaagaaagtgactcatcagagacctctgtgcgaggaccccggattaaacatgtctgcagaagagcagctgttgcccttggccgaaaacgagctgtgtttcctgatgacatgcccaccctgagtgccttaccatgggaagaacgagaaaagattttgtcttccatggggaatgatgacaagtcatcaattgctggctcagaagatgctgaacctcttgctccacccatcaaaccaattaaacctgtcactagaaacaaggcaccccaggaacctccagtaaagaaaggacgtcgatcgaggcggtgtgggcagtgtcccggctgccaggtgcctgaggactgtggtgtttgtactaattgcttagataagcccaagtttggtggtcgcaatataaagaagcagtgctgcaagatgagaaaatgtcagaatctacaatggatgccttccaaagcctacctgcagaagcaagctaaagctgtgaaaaagaaagagaaaaagtctaagaccagtgaaaagaaagacagcaaagagagcagtgttgtgaagaacgtggtggactctagtcagaaacctaccccatcagcaagagaggatcctgccccaaagaaaagcagtagtgagcctcctccacgaaagcccgtcgaggaaaagagtgaagaagggaatgtctcggcccctgggcctgaatccaaacaggccaccactccagcttccaggaagtcaagcaagcaggtctcccagccagcagtggtcatcccgcctcagccacctactacaggaccgccaagaaaagaagttcccaaaaccactcctagtgagcccaagaaaaagcagcctccaccaccagaatcaggtccagagcagagcaaacagaaaaaagtggctccccgcccaagtatccctgtaaaacaaaaaccaaaagaaaaggaaaaaccacctccggtcaataagcaggagaatgcaggcactttgaacatcctcagcactctctccaatggcaatagttctaagcaaaaaattccagcagatggagtccacaggatcagagtggactttaaggaggattgtgaagcagaaaatgtgtgggagatgggaggcttaggaatcttgacttctgttcctataacacccagggtggtttgctttctctgtgccagtagtgggcatgtagagtttgtgtattgccaagtctgttgtgagcccttccacaagttttgtttagaggagaacgagcgccctctggaggaccagctggaaaattggtgttgtcgtcgttgcaaattctgtcacgtttgtggaaggcaacatcaggctacaaagcagctgctggagtgtaataagtgccgaaacagctatcaccctgagtgcctgggaccaaactaccccaccaaacccacaaagaagaagaaagtctggatctgtaccaagtgtgttcgctgtaagagctgtggatccacaactccaggcaaagggtgggatgcacagtggtctcatgatttctcactgtgtcatgattgcgccaagctctttgctaaaggaaacttctgccctctctgtgacaaatgttatgatgatgatgactatgagagtaagatgatgcaatgtggaaagtgtgatcgctgggtccattccaaatgtgagaatctttcagatgagatgtatgagattctatctaatctgccagaaagtgtggcctacacttgtgtgaactgtactgagcggcaccctgcagagtggcgactggcccttgaaaaagagctgcagatttctctgaagcaagttctgacagctttgttgaattctcggactaccagccatttgctacgctaccggcaggctgccaagcctccagacttaaatcccgagacagaggagagtataccttcccgcagctcccccgaaggacctgatccaccagttcttactgaggtcagcaaacaggatgatcagcagcctttagatctagaaggagtcaagaggaagatggaccaagggaattacacatctgtgttggagttcagtgatgatattgtgaagatcattcaagcagccattaattcagatggaggacagccagaaattaaaaaagccaacagcatggtcaagtccttcttcattcggcaaatggaacgtgtttttccatggttcagtgtcaaaaagtccaggttttgggagccaaataaagtatcaagcaacagtgggatgttaccaaacgcagtgcttccaccttcacttgaccataattatgctcagtggcaggagcgagaggaaaacagccacactgagcagcctcctttaatgaagaaaatcattccagctcccaaacccaaaggtcctggagaaccagactcaccaactcctctgcatcctcctacaccaccaattttgagtactgataggagtcgagaagacagtccagagctgaacccacccccaggcatagaagacaatagacagtgtgcgttatgtttgacttatggtgatgacagtgctaatgatgctggtcgtttactatatattggccaaaatgagtggacacatgtaaattgtgctttgtggtcagcggaagtgtttgaagatgatgacggatcactaaagaatgtgcatatggctgtgatcaggggcaagcagctgagatgtgaattctgccaaaagccaggagccaccgtgggttgctgtctcacatcctgcaccagcaactatcacttcatgtgttcccgagccaagaactgtgtctttctggatgataaaaaagtatattgccaacgacatcgggatttgatcaaaggcgaagtggttcctgagaatggatttgaagttttcagaagagtgtttgtggactttgaaggaatcagcttgagaaggaagtttctcaatggcttggaaccagaaaatatccacatgatgattgggtctatgacaatcgactgcttaggaattctaaatgatctctccgactgtgaagataagctctttcctattggatatcagtgttccagggtatactggagcaccacagatgctcgcaagcgctgtgtatatacatgcaagatagtggagtgccgtcctccagtcgtagagccggatatcaacagcactgttgaacatgatgaaaacaggaccattgcccatagtccaacatcttttacagaaagttcatcaaaagagagtcaaaacacagctgaaattataagtcctccatcaccagaccgacctcctcattcacaaacctctggctcctgttattatcatgtcatctcaaaggtccccaggattcgaacacccagttattctccaacacagagatcccctggctgtcgaccgttgccttctgcaggaagtcctaccccaaccactcatgaaatagtcacagtaggtgatcctttactctcctctggacttcgaagcattggctccaggcgtcacagtacctcttccttatcaccccagcggtccaaactccggataatgtctccaatgagaactgggaatacttactctaggaataatgtttcctcagtctccaccaccgggaccgctactgatcttgaatcaagtgccaaagtagttgatcatgtcttagggccactgaattcaagtactagtttagggcaaaacacttccacctcttcaaatttgcaaaggacagtggttactgtaggcaataaaaacagtcacttggatggatcttcatcttcagaaatgaagcagtccagtgcttcagacttggtgtccaagagctcctctttaaagggagagaagaccaaagtgctgagttccaagagctcagagggatctgcacataatgtggcttaccctggaattcctaaactggccccacaggttcataacacaacatctagagaactgaatgttagtaaaatcggctcctttgctgaaccctcttcagtgtcgttttcttctaaagaggccctctccttcccacacctccatttgagagggcaaaggaatgatcgagaccaacacacagattctacccaatcagcaaactcctctccagatgaagatactgaagtcaaaaccttgaagctatctggaatgagcaacagatcatccattatcaacgaacatatgggatctagttccagagataggagacagaaagggaaaaaatcctgtaaagaaactttcaaagaaaagcattccagtaaatcttttttggaacctggtcaggtgacaactggtgaggaaggaaacttgaagccagagtttatggatgaggttttgactcctgagtatatgggccaacgaccatgtaacaatgtttcttctgataagattggtgataaaggcctttctatgccaggagtccccaaagctccacccatgcaagtagaaggatctgccaaggaattacaggcaccacggaaacgcacagtcaaagtgacactgacacctctaaaaatggaaaatgagagtcaatccaaaaatgccctgaaagaaagtagtcctgcttcccctttgcaaatagagtcaacatctcccacagaaccaatttcagcctctgaaaatccaggagatggtccagtggcccaaccaagccccaataatacctcatgccaggattctcaaagtaacaactatcagaatcttccagtacaggacagaaacctaatgcttccagatggccccaaacctcaggaggatggctcttttaaaaggaggtatccccgtcgcagtgcccgtgcacgttctaacatgttttttgggcttaccccactctatggagtaagatcctatggtgaagaagacattccattctacagcagctcaactgggaagaagcgaggcaagagatcagctgaaggacaggtggatggggccgatgacttaagcacttcagatgaagacgacttatactattacaacttcactagaacagtgatttcttcaggtggagaggaacgactggcatcccataatttatttcgggaggaggaacagtgtgatcttccaaaaatctcacagttggatggtgttgatgatgggacagagagtgatactagtgtcacagccacaacaaggaaaagcagccagattccaaaaagaaatggtaaagaaaatggaacagagaacttaaagattgatagacctgaagatgctggggagaaagaacatgtcactaagagttctgttggccacaaaaatgagccaaagatggataactgccattctgtaagcagagttaaaacacagggacaagattccttggaagctcagctcagctcattggagtcaagccgcagagtccacacaagtaccccctccgacaaaaatttactggacacctataatactgagctcctgaaatcagattcagacaataacaacagtgatgactgtgggaatatcctgccttcagacattatggactttgtactaaagaatactccatccatgcaggctttgggtgagagcccagagtcatcttcatcagaactcctgaatcttggtgaaggattgggtcttgacagtaatcgtgaaaaagacatgggtctttttgaagtattttctcagcagctgcctacaacagaacctgtggatagtagtgtctcttcctctatctcagcagaggaacagtttgagttgcctctagagctaccatctgatctgtctgtcttgaccacccggagtcccactgtccccagccagaatcccagtagactagctgttatctcagactcaggggagaagagagtaaccatcacagaaaaatctgtagcctcctctgaaagtgacccagcactgctgagcccaggagtagatccaactcctgaaggccacatgactcctgatcattttatccaaggacacatggatgcagaccacatctctagccctccttgtggttcagtagagcaaggtcatggcaacaatcaggatttaactaggaacagtagcacccctggccttcaggtacctgtttccccaactgttcccatccagaaccagaagtatgtgcccaattctactgatagtcctggcccgtctcagatttccaatgcagctgtccagaccactccaccccacctgaagccagccactgagaaactcatagttgttaaccagaacatgcagccactttatgttctccaaactcttccaaatggagtgacccaaaaaatccaattgacctcttctgttagttctacacccagtgtgatggagacaaatacttcagtattgggacccatgggaggtggtctcacccttaccacaggactaaatccaagcttgccaacttctcaatctttgttcccttctgctagcaaaggattgctacccatgtctcatcaccagcacttacattccttccctgcagctactcaaagtagtttcccaccaaacatcagcaatcctccttcaggcctgcttattggggttcagcctcctccggatccccaacttttggtttcagaatccagccagaggacagacctcagtaccacagtagccactccatcctctggactcaagaaaagacccatatctcgtctacagacccgaaagaataaaaaacttgctccctctagtaccccttcaaacattgccccttctgatgtggtttctaatatgacattgattaacttcacaccctcccagcttcctaatcatccaagtctgttagatttggggtcacttaatacttcatctcaccgaactgtccccaacatcataaaaagatctaaatctagcatcatgtattttgaaccggcacccctgttaccacagagtgtgggaggaactgctgccacagcggcaggcacatcaacaataagccaggatactagccacctcacatcagggtctgtgtctggcttggcatccagttcctctgtcttgaatgttgtatccatgcaaactaccacaacccctacaagtagtgcgtcagttccaggacacgtcaccttaaccaacccaaggttgcttggtaccccagatattggctcaataagcaatcttttaatcaaagctagccagcagagcctggggattcaggaccagcctgtggctttaccgccaagttcaggaatgtttccacaactggggacatcacagaccccctctactgctgcaataacagcggcatctagcatctgtgtgctcccctccactcagactacgggcataacagccgcttcaccttctggggaagcagacgaacactatcagcttcagcatgtgaaccagctccttgccagcaaaactgggattcattcttcccagcgtgatcttgattctgcttcagggccccaggtatccaactttacccagacggtagacgctcctaatagcatgggactggagcagaacaaggctttatcctcagctgtgcaagccagccccacctctcctgggggttctccatcctctccatcttctggacagcggtcagcaagcccttcagtgccgggtcccactaaacccaaaccaaaaaccaaacggtttcagctgcctctagacaaagggaatggcaagaagcacaaagtttcccatttgcggaccagttcttctgaagcacacattccagaccaagaaacgacatccctgacctcaggcacagggactccaggagcagaggctgagcagcaggatacagctagcgtggagcagtcctcccagaaggagtgtgggcaacctgcagggcaagtcgctgttcttccggaagttcaggtgacccaaaatccagcaaatgaacaagaaagtgcagaacctaaaacagtggaagaagaggaaagtaatttcagctccccactgatgctttggcttcagcaagaacaaaagcggaaggaaagcattactgagaaaaaacccaagaaaggacttgtttttgaaatttccagtgatgatggctttcagatctgtgcagaaagtattgaagatgcctggaagtcattgacagataaagtccaggaagctcgatcaaatgcccgcctaaagcagctctcatttgcaggtgttaacggtttgaggatgctggggattctccatgatgcagttgtgttcctcattgagcagctgtctggtgccaagcactgtcgaaattacaaattccgtttccacaagccagaggaggccaatgaaccccccttgaaccctcacggctcagccagggctgaagtccacctcaggaagtcagcatttgacatgtttaacttcctggcttctaaacatcgtcagcctcctgaatacaaccccaatgatgaagaagaggaggaggtacagctgaagtcagctcggagggcaactagcatggatctgccaatgcccatgcgcttccggcacttaaaaaagacttctaaggaggcagttggtgtctacaggtctcccatccatggccggggtcttttctgtaagagaaacattgatgcaggtgagatggtgattgagtatgccggcaacgtcatccgctccatccagactgacaagcgggaaaagtattacgacagcaagggcattggttgctatatgttccgaattgatgactcagaggtagtggatgccaccatgcatggaaatgctgcacgcttcatcaatcactcgtgtgagcctaactgctattctcgggtcatcaatattgatgggcagaagcacattgtcatctttgccatgcgtaagatctaccgaggagaggaactcacttacgactataagttccccattgaggatgccagcaacaagctgccctgcaactgtggcgccaagaaatgccggaagttcctaaactaaagctgctcttctcccccagtgttggagtgcaaggaggcggggccatccaaagcaacgctgaaggccttttccagcagctgggagctcccggattgcgtggcacagctgaggggcctctgtgatggctgagctctcttatgtcctatactcacatcagacatgtgatcatagtcccagagacagagttgaggtctcgaagaaaagatccatgatcggctttctcctggggcccctccaattgtttactgttagaaagtgggaatggggtccctagcagacttgcctggaaggagcctattatagagggttggttatgttgggagattgggcctgaatttctccacagaaataagttgccatcctcaggttggccctttcccaagcactgtaagtgagtgggtcaggcaaagccccaaatggagggttggttagattcctgacagtttgccagccaggccccacctacagcgtctgtcgaacaaacagaggtctggtggttttccctactatcctcccactcgagagttcacttctggttgggagacaggattcctagcacctccggtgtcaaaaggctgtcatggggttgtgccaattaattaccaaacattgagcctgcaggctttgagtgggagtgttgcccccaggagccttatctcagccaattacctttcttgacagtaggagcggcttccctctcccattccctcttcactcccttttcttcctttcccctgtcttcatgccactgctttcccatgcttctttcgggttgtaggggagactgactgcctgctcaaggacactccctgctgggcataggatgtgcctgcaaaaagttccctgagcctgtaagcactccaggtggggaagtggacaggagccattggtcataaccagacagaatttggaaacattttcataaagctccatggagagttttaaagaaacatatgtagcatgattttgtaggagaggaaaaagattatttaaataggatttaaatcatgcaacaacgagagtatcacagccaggatgacccttgggtcccattcctaagacatggttactttattttccccttgttaagacataggaagacttaatttttaaacggtcagtgtccagttgaaggcagaacactaatcagatttcaaggcccacaacttggggactagaccaccttatgttgagggaactctgccacctgcgtgcaacccacagctaaagtaaattcaatgacactactgccctgattactccttaggatgtggtcaaaacagcatcaaatgtttcttctcttcctttccccaagacagagtcctgaacctgttaaattaagtcattggattttactctgttctgtttacagtttactatttaaggttttataaatgtaaatatattttgtatatttttctatgagaagcacttcatagggagaagcacttatgacaaggctattttttaaaccgcggtattatcctaatttaaaagaagatcggtttttaataattttttattttcataggatgaagttagagaaaatattcagctgtacacacaaagtctggtttttcctgcccaacttccccctggaaggtgtactttttgttgtttaatgtgtagcttgtttgtgccctgttgacataaatgtttcctgggtttgctctttgacaataaatggagaaggaaggtcacccaactccattgggccactcccctccttcccctattgaagctcctcaaaaggctacagtaatatcttgatacaacagattctcttctttcccgcctctctcctttccggcgcaacttccagagtggtgggagacggcaatctttacatttccctcatctttcttacttcagagttagcaaacaacaagttgaatggcaacttgacatttttgcatcaccatctgcctcataggccactctttcctttccctctgcccaccaagtcctcatatctgcagagaacccattgatcaccttgtgccctcttttggggcagcctgttgaaactgaagcacagtctgaccactcacgataaagcagatttttctctgcctctgccacaaggtttcagagtagtgtagtccaagtagagggtggggcacccttttctcgccgcaagaagcccattcctatggaagtctagcaaagcaatacgactcagcccagcactctctgccccaggactcatggctctgctgtgccttccatcctgggctcccttctctcctgtgaccttaagaactttgtctggtggctttgctggaacattgtcactgttttcactgtcatgcagggagcccagcactgtggccaggatggcagagacttccttgtcatcatggagaagtgccagcaggggactgggaaaagcactctacccagacctcacctcccttcctccttttgcccatgaacaagatgcagtggccctaggggttccactagtgtctgctttcctttattattgcactgtgtgaggtttttttgtaaatccttgtattcctattttttttaaagaaaaaaaaaaaaccttaagctgcatttgttactgaaatgattaatgcactgatgggtcctgaattcaccttgagaaagacccaaaggccagtcagggggtggggggaactcagctaaatagacctagttactgccctgctaggccatgctgtactgtgagcccctcctcactctctaccaaccctaaaccctgaggacaggggaggaacccacagcttccttctcctgccagctgcagatggtttgccttgcctttccaccccctaattgtcaaccacaaaaatgagaaattcctcttctagctcagccttgagtccattgccaaattttcagcacacctgccagcaacttgggggaataagcgaaggtttccctacaagagggaaagaaggcaaaaacggcacagctatctccaaacacatctgagttcatttcaaaagtgaccaagggaatctccgcacaaaagtgcagattgaggaattgtgatgggtcattcccaagaatcccccaaggggcatcccaaatccctgaggagtaacagctgcaaacctggtcagttctcagtgagagccagctcacttatagctttgctgctagaacctgttgtggctgcatttcctggtggccagtgacaactgtgtaaccagaatagctgcatggcgctgaccctttggccggaacttggtctcttggctccctccttggccacccaccacctctcgcacagcccctctgtttttacaccaataacaagaattaagggggaagccctggcagctatacgttttcaaccagactcctttgccgggacccagcccgccaccctgctcgcctccgtcaagtccccgcctccttgcctctgggcgacccattgatgatcatagatgagtgtccagcgaaaaaaaaagcgttatcttt

SEQ ID NO: 370662 - DNA, 17764 bp, Homo sapiens
ctgcttcacttcacggggcgaacatggcgcacagctgtcggtggcgcttccccgcccgacccgggaccaccgggggcggcggcggcggggggcgccggggcctagggggcgccccgcggcaacgcgtcccggccctgctgcttccccccgggcccccggtcggcggtggcggccccggggcgcccccctcccccccggctgtggcggccgcggcggcggcggcgggaagcagcggggctggggttccagggggagcggccgccgcctcagcagcctcctcgtcgtccgcctcgtcttcgtcttcgtcatcgtcctcagcctcttcagggccggccctgctccgggtgggcccgggcttcgacgcggcgctgcaggtctcggccgccatcggcaccaacctgcgccggttccgggccgtgtttggggagagcggcgggggaggcggcagcggagaggatgagcaattcttaggttttggctcagatgaagaagtcagagtgcgaagtcccacaaggtctccttcagttaaaactagtcctcgaaaacctcgtgggagacctagaagtggctctgaccgaaattcagctatcctctcagatccatctgtgttttcccctctaaataaatcagagaccaaatctggagataagatcaagaagaaagattctaaaagtatagaaaagaagagaggaagacctcccaccttccctggagtaaaaatcaaaataacacatggaaaggacatttcagagttaccaaagggaaacaaagaagatagcctgaaaaaaattaaaaggacaccttctgctacgtttcagcaagccacaaagattaaaaaattaagagcaggtaaactctctcctctcaagtctaagtttaagacagggaagcttcaaataggaaggaagggggtacaaattgtacgacggagaggaaggcctccatcaacagaaaggataaagaccccttcgggtctcctcattaattctgaactggaaaagccccagaaagtccggaaagacaaggaaggaacacctccacttacaaaagaagataagacagttgtcagacaaagccctcgaaggattaagccagttaggattattccttcttcaaaaaggacagatgcaaccattgctaagcaactcttacagagggcaaaaaagggggctcaaaagaaaattgaaaaagaagcagctcagctgcagggaagaaaggtgaagacacaggtcaaaaatattcgacagttcatcatgcctgttgtcagtgctatctcctcgcggatcattaagacccctcggcggtttatagaggatgaggattatgaccctccaattaaaattgcccgattagagtctacaccgaatagtagattcagtgccccgtcctgtggatcttctgaaaaatcaagtgcagcttctcagcactcctctcaaatgtcttcagactcctctcgatctagtagccccagtgttgatacctccacagactctcaggcttctgaggagattcaggtacttcctgaggagcggagcgatacccctgaagttcatcctccactgcccatttcccagtccccagaaaatgagagtaatgataggagaagcagaaggtattcagtgtcggagagaagttttggatctagaacgacgaaaaaattatcaactctacaaagtgccccccagcagcagacctcctcgtctccacctccacctctgctgactccaccgccaccactgcagccagcctccagtatctctgaccacacaccttggcttatgcctccaacaatccccttagcatcaccatttttgcctgcttccactgctcctatgcaagggaagcgaaaatctattttgcgagaaccgacatttaggtggacttctttaaagcattctaggtcagagccacaatacttttcctcagcaaagtatgccaaagaaggtcttattcgcaaaccaatatttgataatttccgaccccctccactaactcccgaggacgttggctttgcatctggtttttctgcatctggtaccgctgcttcagcccgattgttttcgccactccattctggaacaaggtttgatatgcacaaaaggagccctcttctgagagctccaagatttactccaagtgaggctcactctagaatatttgagtctgtaaccttgcctagtaatcgaacttctgctggaacatcttcttcaggagtatccaatagaaaaaggaaaagaaaagtgtttagtcctattcgatctgaaccaagatctccttctcactccatgaggacaagaagtggaaggcttagtagttctgagctctcacctctcacccccccgtcttctgtctcttcctcgttaagcatttctgttagtcctcttgccactagtgccttaaacccaacttttacttttccttctcattccctgactcagtctggggaatctgcagagaaaaatcagagaccaaggaagcagactagtgctccggcagagccattttcatcaagtagtcctactcctctcttcccttggtttaccccaggctctcagactgaaagagggagaaataaagacaaggcccccgaggagctgtccaaagatcgagatgctgacaagagcgtggagaaggacaagagtagagagagagaccgggagagagaaaaggagaataagcgggagtcaaggaaagagaaaaggaaaaagggatcagaaattcagagtagttctgctttgtatcctgtgggtagggtttccaaagagaaggttgttggtgaagatgttgccacttcatcttctgccaaaaaagcaacagggcggaagaagtcttcatcacatgattctgggactgatattacttctgtgactcttggggatacaacagctgtcaaaaccaaaatacttataaagaaagggagaggaaatctggaaaaaaccaacttggacctcggcccaactgccccatccctggagaaggagaaaaccctctgcctttccactccttcatctagcactgttaaacattccacttcctccataggctccatgttggctcaggcagacaagcttccaatgactgacaagagggttgccagcctcctaaaaaaggccaaagctcagctctgcaagattgagaagagtaagagtcttaaacaaaccgaccagcccaaagcacagggtcaagaaagtgactcatcagagacctctgtgcgaggaccccggattaaacatgtctgcagaagagcagctgttgcccttggccgaaaacgagctgtgtttcctgatgacatgcccaccctgagtgccttaccatgggaagaacgagaaaagattttgtcttccatggggaatgatgacaagtcatcaattgctggctcagaagatgctgaacctcttgctccacccatcaaaccaattaaacctgtcactagaaacaaggcaccccaggaacctccagtaaagaaaggacgtcgatcgaggcggtgtgggcagtgtcccggctgccaggtgcctgaggactgtggtgtttgtactaattgcttagataagcccaagtttggtggtcgcaatataaagaagcagtgctgcaagatgagaaaatgtcagaatctacaatggatgccttccaaagcctacctgcagaagcaagctaaagctgtgaaaaagaaagagaaaaagtctaagaccagtgaaaagaaagacagcaaagagagcagtgttgtgaagaacgtggtggactctagtcagaaacctaccccatcagcaagagaggatcctgccccaaagaaaagcagtagtgagcctcctccacgaaagcccgtcgaggaaaagagtgaagaagggaatgtctcggcccctgggcctgaatccaaacaggccaccactccagcttccaggaagtcaagcaagcaggtctcccagccagcagtggtcatcccgcctcagccacctactacaggaccgccaagaaaagaagttcccaaaaccactcctagtgagcccaagaaaaagcagcctccaccaccagaatcaggtccagagcagagcaaacagaaaaaagtggctccccgcccaagtatccctgtaaaacaaaaaccaaaagaaaaggaaaaaccacctccggtcaataagcaggagaatgcaggcactttgaacatcctcagcactctctccaatggcaatagttctaagcaaaaaattccagcagatggagtccacaggatcagagtggactttaaggaggattgtgaagcagaaaatgtgtgggagatgggaggcttaggaatcttgacttctgttcctataacacccagggtggtttgctttctctgtgccagtagtgggcatgtagagtttgtgtattgccaagtctgttgtgagcccttccacaagttttgtttagaggagaacgagcgccctctggaggaccagctggaaaattggtgttgtcgtcgttgcaaattctgtcacgtttgtggaaggcaacatcaggctacaaagcagctgctggagtgtaataagtgccgaaacagctatcaccctgagtgcctgggaccaaactaccccaccaaacccacaaagaagaagaaagtctggatctgtaccaagtgtgttcgctgtaagagctgtggatccacaactccaggcaaagggtgggatgcacagtggtctcatgatttctcactgtgtcatgattgcgccaagctctttgctaaaggaaacttctgccctctctgtgacaaatgttatgatgatgatgactatgagagtaagatgatgcaatgtggaaagtgtgatcgctgggtccattccaaatgtgagaatctttcagatgagatgtatgagattctatctaatctgccagaaagtgtggcctacacttgtgtgaactgtactgagcggcaccctgcagagtggcgactggcccttgaaaaagagctgcagatttctctgaagcaagttctgacagctttgttgaattctcggactaccagccatttgctacgctaccggcaggctgccaagcctccagacttaaatcccgagacagaggagagtataccttcccgcagctcccccgaaggacctgatccaccagttcttactgaggtcagcaaacaggatgatcagcagcctttagatctagaaggagtcaagaggaagatggaccaagggaattacacatctgtgttggagttcagtgatgatattgtgaagatcattcaagcagccattaattcagatggaggacagccagaaattaaaaaagccaacagcatggtcaagtccttcttcattcggcaaatggaacgtgtttttccatggttcagtgtcaaaaagtccaggttttgggagccaaataaagtatcaagcaacagtgggatgttaccaaacgcagtgcttccaccttcacttgaccataattatgctcagtggcaggagcgagaggaaaacagccacactgagcagcctcctttaatgaagaaaatcattccagctcccaaacccaaaggtcctggagaaccagactcaccaactcctctgcatcctcctacaccaccaattttgagtactgataggagtcgagaagacagtccagagctgaacccacccccaggcatagaagacaatagacagtgtgcgttatgtttgacttatggtgatgacagtgctaatgatgctggtcgtttactatatattggccaaaatgagtggacacatgtaaattgtgctttgtggtcagcggaagtgtttgaagatgatgacggatcactaaagaatgtgcatatggctgtgatcaggggcaagcagctgagatgtgaattctgccaaaagccaggagccaccgtgggttgctgtctcacatcctgcaccagcaactatcacttcatgtgttcccgagccaagaactgtgtctttctggatgataaaaaagtatattgccaacgacatcgggatttgatcaaaggcgaagtggttcctgagaatggatttgaagttttcagaagagtgtttgtggactttgaaggaatcagcttgagaaggaagtttctcaatggcttggaaccagaaaatatccacatgatgattgggtctatgacaatcgactgcttaggaattctaaatgatctctccgactgtgaagataagctctttcctattggatatcagtgttccagggtatactggagcaccacagatgctcgcaagcgctgtgtatatacatgcaagatagtggagtgccgtcctccagtcgtagagccggatatcaacagcactgttgaacatgatgaaaacaggaccattgcccatagtccaacatcttttacagaaagttcatcaaaagagagtcaaaacacagctgaaattataagtcctccatcaccagaccgacctcctcattcacaaacctctggctcctgttattatcatgtcatctcaaaggtccccaggattcgaacacccagttattctccaacacagagatcccctggctgtcgaccgttgccttctgcaggaagtcctaccccaaccactcatgaaatagtcacagtaggtgatcctttactctcctctggacttcgaagcattggctccaggcgtcacagtacctcttccttatcaccccagcggtccaaactccggataatgtctccaatgagaactgggaatacttactctaggaataatgtttcctcagtctccaccaccgggaccgctactgatcttgaatcaagtgccaaagtagttgatcatgtcttagggccactgaattcaagtactagtttagggcaaaacacttccacctcttcaaatttgcaaaggacagtggttactgtaggcaataaaaacagtcacttggatggatcttcatcttcagaaatgaagcagtccagtgcttcagacttggtgtccaagagctcctctttaaagggagagaagaccaaagtgctgagttccaagagctcagagggatctgcacataatgtggcttaccctggaattcctaaactggccccacaggttcataacacaacatctagagaactgaatgttagtaaaatcggctcctttgctgaaccctcttcagtgtcgttttcttctaaagaggccctctccttcccacacctccatttgagagggcaaaggaatgatcgagaccaacacacagattctacccaatcagcaaactcctctccagatgaagatactgaagtcaaaaccttgaagctatctggaatgagcaacagatcatccattatcaacgaacatatgggatctagttccagagataggagacagaaagggaaaaaatcctgtaaagaaactttcaaagaaaagcattccagtaaatcttttttggaacctggtcaggtgacaactggtgaggaaggaaacttgaagccagagtttatggatgaggttttgactcctgagtatatgggccaacgaccatgtaacaatgtttcttctgataagattggtgataaaggcctttctatgccaggagtccccaaagctccacccatgcaagtagaaggatctgccaaggaattacaggcaccacggaaacgcacagtcaaagtgacactgacacctctaaaaatggaaaatgagagtcaatccaaaaatgccctgaaagaaagtagtcctgcttcccctttgcaaatagagtcaacatctcccacagaaccaatttcagcctctgaaaatccaggagatggtccagtggcccaaccaagccccaataatacctcatgccaggattctcaaagtaacaactatcagaatcttccagtacaggacagaaacctaatgcttccagatggccccaaacctcaggaggatggctcttttaaaaggaggtatccccgtcgcagtgcccgtgcacgttctaacatgttttttgggcttaccccactctatggagtaagatcctatggtgaagaagacattccattctacagcagctcaactgggaagaagcgaggcaagagatcagctgaaggacaggtggatggggccgatgacttaagcacttcagatgaagacgacttatactattacaacttcactagaacagtgatttcttcaggtggagaggaacgactggcatcccataatttatttcgggaggaggaacagtgtgatcttccaaaaatctcacagttggatggtgttgatgatgggacagagagtgatactagtgtcacagccacaacaaggaaaagcagccagattccaaaaagaaatggtaaagaaaatggaacagagaacttaaagattgatagacctgaagatgctggggagaaagaacatgtcactaagagttctgttggccacaaaaatgagccaaagatggataactgccattctgtaagcagagttaaaacacagggacaagattccttggaagctcagctcagctcattggagtcaagccgcagagtccacacaagtaccccctccgacaaaaatttactggacacctataatactgagctcctgaaatcagattcagacaataacaacagtgatgactgtgggaatatcctgccttcagacattatggactttgtactaaagaatactccatccatgcaggctttgggtgagagcccagagtcatcttcatcagaactcctgaatcttggtgaaggattgggtcttgacagtaatcgtgaaaaagacatgggtctttttgaagtattttctcagcagctgcctacaacagaacctgtggatagtagtgtctcttcctctatctcagcagaggaacagtttgagttgcctctagagctaccatctgatctgtctgtcttgaccacccggagtcccactgtccccagccagaatcccagtagactagctgttatctcagactcaggggagaagagagtaaccatcacagaaaaatctgtagcctcctctgaaagtgacccagcactgctgagcccaggagtagatccaactcctgaaggccacatgactcctgatcattttatccaaggacacatggatgcagaccacatctctagccctccttgtggttcagtagagcaaggtcatggcaacaatcaggatttaactaggaacagtagcacccctggccttcaggtacctgtttccccaactgttcccatccagaaccagaagtatgtgcccaattctactgatagtcctggcccgtctcagatttccaatgcagctgtccagaccactccaccccacctgaagccagccactgagaaactcatagttgttaaccagaacatgcagccactttatgttctccaaactcttccaaatggagtgacccaaaaaatccaattgacctcttctgttagttctacacccagtgtgatggagacaaatacttcagtattgggacccatgggaggtggtctcacccttaccacaggactaaatccaagcttgccaacttctcaatctttgttcccttctgctagcaaaggattgctacccatgtctcatcaccagcacttacattccttccctgcagctactcaaagtagtttcccaccaaacatcagcaatcctccttcaggcctgcttattggggttcagcctcctccggatccccaacttttggtttcagaatccagccagaggacagacctcagtaccacagtagccactccatcctctggactcaagaaaagacccatatctcgtctacagacccgaaagaataaaaaacttgctccctctagtaccccttcaaacattgccccttctgatgtggtttctaatatgacattgattaacttcacaccctcccagcttcctaatcatccaagtctgttagatttggggtcacttaatacttcatctcaccgaactgtccccaacatcataaaaagatctaaatctagcatcatgtattttgaaccggcacccctgttaccacagagtgtgggaggaactgctgccacagcggcaggcacatcaacaataagccaggatactagccacctcacatcagggtctgtgtctggcttggcatccagttcctctgtcttgaatgttgtatccatgcaaactaccacaacccctacaagtagtgcgtcagttccaggacacgtcaccttaaccaacccaaggttgcttggtaccccagatattggctcaataagcaatcttttaatcaaagctagccagcagagcctggggattcaggaccagcctgtggctttaccgccaagttcaggaatgtttccacaactggggacatcacagaccccctctactgctgcaataacagcggcatctagcatctgtgtgctcccctccactcagactacgggcataacagccgcttcaccttctggggaagcagacgaacactatcagcttcagcatgtgaaccagctccttgccagcaaaactgggattcattcttcccagcgtgatcttgattctgcttcagggccccaggtatccaactttacccagacggtagacgctcctaatagcatgggactggagcagaacaaggctttatcctcagctgtgcaagccagccccacctctcctgggggttctccatcctctccatcttctggacagcggtcagcaagcccttcagtgccgggtcccactaaacccaaaccaaaaaccaaacggtttcagctgcctctagacaaagggaatggcaagaagcacaaagtttcccatttgcggaccagttcttctgaagcacacattccagaccaagaaacgacatccctgacctcaggcacagggactccaggagcagaggctgagcagcaggatacagctagcgtggagcagtcctcccagaaggagtgtgggcaacctgcagggcaagtcgctgttcttccggaagttcaggtgacccaaaatccagcaaatgaacaagaaagtgcaggtatgtgggtgggtaaaaggttagaatcagagaatatcaatgctaaaaggattatgagaatcacccactttacctacttattttctacatttaaaaaaaaaaatctaagctccaaagaagttaagtgatttggcccacattggactgaaacttggcgcacctgtctctcggtgcagtgttcttccagtacatattgtgtgatcacctgtcagctaaggactcaagaccatacccatactcttctgctgtactggttttaccagcactgaggcttaaatagctagtaataacctgacttcactttttagttgttactaaagaaaactaagaaccatttttattagatagtcagattttggttacaataccagatacatctccatggcattttccatcagttctaatgaatttgattaggaaacaaatggtcacttcaagattagagagttctgggtataactctattgaggacagttgcttattgaaaaactatcagatcgtcatactagaaattctaccacagagagcataacttcatgtaaaaaaaaatctggttttagtcaccactttctagcaatgacctaggcaagctctttgagtcttgggtttgttatctataaatgggaataataaaccaactgtggaatgttgttaggcttagagatcatttatgtaaagtactctacatgtagtcagtgctcagtgagcatttgttactgcaaccactatctattttctccctattagaacctaaaacagtggaagaagaggaaagtaatttcagctccccactgatgctttggcttcagcaagaacaaaagcggaaggaaagcattactgagaaaaaacccaagaaaggacttgtttttgaaatttccagtgatgatggctttcagatctgtgcagaaagtattgaagatgcctggaagtcattgacagataaagtccaggaagctcgatcaaatgcccgcctaaagcagctctcatttgcaggtgttaacggtttgaggatgctggggattctccatgatgcagttgtgttcctcattgagcagctgtctggtgccaagcactgtcgaaattacaaattccgtttccacaagccagaggaggccaatgaaccccccttgaaccctcacggctcagccagggctgaagtccacctcaggaagtcagcatttgacatgtttaacttcctggcttctaaacatcgtcagcctcctgaatacaaccccaatgatgaagaagaggaggaggtacagctgaagtcagctcggagggcaactagcatggatctgccaatgcccatgcgcttccggcacttaaaaaagacttctaaggaggcagttggtgtctacaggtctcccatccatggccggggtcttttctgtaagagaaacattgatgcaggtgagatggtgattgagtatgccggcaacgtcatccgctccatccagactgacaagcgggaaaagtattacgacagcaagggcattggttgctatatgttccgaattgatgactcagaggtagtggatgccaccatgcatggaaatgctgcacgcttcatcaatcactcgtgtgagcctaactgctattctcgggtcatcaatattgatgggcagaagcacattgtcatctttgccatgcgtaagatctaccgaggagaggaactcacttacgactataagttccccattgaggatgccagcaacaagctgccctgcaactgtggcgccaagaaatgccggaagttcctaaactaaagctgctcttctcccccagtgttggagtgcaaggaggcggggccatccaaagcaacgctgaaggccttttccagcagctgggagctcccggattgcgtggcacagctgaggggcctctgtgatggctgagctctcttatgtcctatactcacatcagacatgtgatcatagtcccagagacagagttgaggtctcgaagaaaagatccatgatcggctttctcctggggcccctccaattgtttactgttagaaagtgggaatggggtccctagcagacttgcctggaaggagcctattatagagggttggttatgttgggagattgggcctgaatttctccacagaaataagttgccatcctcaggttggccctttcccaagcactgtaagtgagtgggtcaggcaaagccccaaatggagggttggttagattcctgacagtttgccagccaggccccacctacagcgtctgtcgaacaaacagaggtctggtggttttccctactatcctcccactcgagagttcacttctggttgggagacaggattcctagcacctccggtgtcaaaaggctgtcatggggttgtgccaattaattaccaaacattgagcctgcaggctttgagtgggagtgttgcccccaggagccttatctcagccaattacctttcttgacagtaggagcggcttccctctcccattccctcttcactcccttttcttcctttcccctgtcttcatgccactgctttcccatgcttctttcgggttgtaggggagactgactgcctgctcaaggacactccctgctgggcataggatgtgcctgcaaaaagttccctgagcctgtaagcactccaggtggggaagtggacaggagccattggtcataaccagacagaatttggaaacattttcataaagctccatggagagttttaaagaaacatatgtagcatgattttgtaggagaggaaaaagattatttaaataggatttaaatcatgcaacaacgagagtatcacagccaggatgacccttgggtcccattcctaagacatggttactttattttccccttgttaagacataggaagacttaatttttaaacggtcagtgtccagttgaaggcagaacactaatcagatttcaaggcccacaacttggggactagaccaccttatgttgagggaactctgccacctgcgtgcaacccacagctaaagtaaattcaatgacactactgccctgattactccttaggatgtggtcaaaacagcatcaaatgtttcttctcttcctttccccaagacagagtcctgaacctgttaaattaagtcattggattttactctgttctgtttacagtttactatttaaggttttataaatgtaaatatattttgtatatttttctatgagaagcacttcatagggagaagcacttatgacaaggctattttttaaaccgcggtattatcctaatttaaaagaagatcggtttttaataattttttattttcataggatgaagttagagaaaatattcagctgtacacacaaagtctggtttttcctgcccaacttccccctggaaggtgtactttttgttgtttaatgtgtagcttgtttgtgccctgttgacataaatgtttcctgggtttgctctttgacaataaatggagaaggaaggtcacccaactccattgggccactcccctccttcccctattgaagctcctcaaaaggctacagtaatatcttgatacaacagattctcttctttcccgcctctctcctttccggcgcaacttccagagtggtgggagacggcaatctttacatttccctcatctttcttacttcagagttagcaaacaacaagttgaatggcaacttgacatttttgcatcaccatctgcctcataggccactctttcctttccctctgcccaccaagtcctcatatctgcagagaacccattgatcaccttgtgccctcttttggggcagcctgttgaaactgaagcacagtctgaccactcacgataaagcagatttttctctgcctctgccacaaggtttcagagtagtgtagtccaagtagagggtggggcacccttttctcgccgcaagaagcccattcctatggaagtctagcaaagcaatacgactcagcccagcactctctgccccaggactcatggctctgctgtgccttccatcctgggctcccttctctcctgtgaccttaagaactttgtctggtggctttgctggaacattgtcactgttttcactgtcatgcagggagcccagcactgtggccaggatggcagagacttccttgtcatcatggagaagtgccagcaggggactgggaaaagcactctacccagacctcacctcccttcctccttttgcccatgaacaagatgcagtggccctaggggttccactagtgtctgctttcctttattattgcactgtgtgaggtttttttgtaaatccttgtattcctattttttttaaagaaaaaaaaaaaaccttaagctgcatttgttactgaaatgattaatgcactgatgggtcctgaattcaccttgagaaagacccaaaggccagtcagggggtggggggaactcagctaaatagacctagttactgccctgctaggccatgctgtactgtgagcccctcctcactctctaccaaccctaaaccctgaggacaggggaggaacccacagcttccttctcctgccagctgcagatggtttgccttgcctttccaccccctaattgtcaaccacaaaaatgagaaattcctcttctagctcagccttgagtccattgccaaattttcagcacacctgccagcaacttgggggaataagcgaaggtttccctacaagagggaaagaaggcaaaaacggcacagctatctccaaacacatctgagttcatttcaaaagtgaccaagggaatctccgcacaaaagtgcagattgaggaattgtgatgggtcattcccaagaatcccccaaggggcatcccaaatccctgaggagtaacagctgcaaacctggtcagttctcagtgagagccagctcacttatagctttgctgctagaacctgttgtggctgcatttcctggtggccagtgacaactgtgtaaccagaatagctgcatggcgctgaccctttggccggaacttggtctcttggctccctccttggccacccaccacctctcgcacagcccctctgtttttacaccaataacaagaattaagggggaagccctggcagctatacgttttcaaccagactcctttgccgggacccagcccgccaccctgctcgcctccgtcaaacccccggccaatgcagtgagcaccatgtagctcccttgatttaaaaaaaataaaaaataaaaaaaaaaggaaaaaaaaatacaacacacacacaaaaataaaaaaaatattctaatgaatgtatctttctaaaggactgacgttcaatcaaatatctgaaaatactaaaggtcaaaaccttgtcagatgttaacttctaagttcggtttgggattttttttttttaatagaaatcaagttgtttttgtttttaaggaaaagcgggtcattgcaaagggctgggtgtaattttatgtttcatttccttcattttaaagcaatacaaggttatggagcagatggttttgtgccgaatcatgaatactagtcaagtcacacactctggaaacttgcaactttttgtttgttttggttttcaaataaatataaatatgatatatataggaactaatatagtaatgcaccatgtaacaaagcctagttcagtccatggcttttaattctcttaacactatagataaggattgtgttacagttgctagtagcggcaggaagatgtcaggctcactttcctctgattcccgaaatggggggaacctctaaccataaaggaatggtagaacagtccattcctcggatcagagaaaaatgcagacatggtgtcacctggatttttttctgcccatgaatgttgccagtcagtacctgtcctccttgtttctctatttttggttatgaatgttggggttaccacctgcatttaggggaaaattgtgttctgtgctttcctggtatcttgttccgaggtactctagttctgtctttcaaccaagaaaatagaattgtggtgtttcttttattgaacttttaacagtctctttagtaaatacaggtagttgaataattgtttcaagagctcaacagatgacaagcttcttttctagaaataagacattttttgacaactttatcatgtataacagatctgttttttttccttgtgttcttccaagcttctggttagagaaaaagagaaaaaaaaaaaaggaaaatgtgtctaaagtccatcagtgttaactccctgtgacagggatgaaggaaaatactttaatagttcaaaaaataataatgctgaaagctctctacgaaagactgaatgtaaaagtaaaaagtgtacatagttgtaaaaaaaaggagtttttaaacatgtttattttctatgcacttttttttatttaagtgatagtttaattaataaacatgtcaagtttattgctgcacatggttaagcttccttttggctttggttggagagggtggagaaaagcgggaggggcatggcctgtgacctggtcacaaagtaccttccacagtcctttactttaaggtggcatcactaaattattccctgtagcccaccttcaggtccactccacactggctctcttgactattttcttcctttattcatcagtgatgtatgttcaggacctaattaattgtggatatgaggcagggtcaagaggacaaaggaacagggcctttaccttctacatagctcccctgtttcatccaaggaggttaagtattgatttttatcggttttctcaactgtgaatataataaactgaaagcatttcagggagaagctggagaacaccttctctagctgcactccaccttaaggctgaagctggatttgtt

SEQ ID NO: 370663 - DNA, 16391 bp, Homo sapiens
ctgcttcacttcacggggcgaacatggcgcacagctgtcggtggcgcttccccgcccgacccgggaccaccgggggcggcggcggcggggggcgccggggcctagggggcgccccgcggcaacgcgtcccggccctgctgcttccccccgggcccccggtcggcggtggcggccccggggcgcccccctcccccccggctgtggcggccgcggcggcggcggcgggaagcagcggggctggggttccagggggagcggccgccgcctcagcagcctcctcgtcgtccgcctcgtcttcgtcttcgtcatcgtcctcagcctcttcagggccggccctgctccgggtgggcccgggcttcgacgcggcgctgcaggtctcggccgccatcggcaccaacctgcgccggttccgggccgtgtttggggagagcggcgggggaggcggcagcggagaggatgagcaattcttaggttttggctcagatgaagaagtcagagtgcgaagtcccacaaggtctccttcagttaaaactagtcctcgaaaacctcgtgggagacctagaagtggctctgaccgaaattcagctatcctctcagatccatctgtgttttcccctctaaataaatcagagaccaaatctggagataagatcaagaagaaagattctaaaagtatagaaaagaagagaggaagacctcccaccttccctggagtaaaaatcaaaataacacatggaaaggacatttcagagttaccaaagggaaacaaagaagatagcctgaaaaaaattaaaaggacaccttctgctacgtttcagcaagccacaaagattaaaaaattaagagcaggtaaactctctcctctcaagtctaagtttaagacagggaagcttcaaataggaaggaagggggtacaaattgtacgacggagaggaaggcctccatcaacagaaaggataaagaccccttcgggtctcctcattaattctgaactggaaaagccccagaaagtccggaaagacaaggaaggaacacctccacttacaaaagaagataagacagttgtcagacaaagccctcgaaggattaagccagttaggattattccttcttcaaaaaggacagatgcaaccattgctaagcaactcttacagagggcaaaaaagggggctcaaaagaaaattgaaaaagaagcagctcagctgcagggaagaaaggtgaagacacaggtcaaaaatattcgacagttcatcatgcctgttgtcagtgctatctcctcgcggatcattaagacccctcggcggtttatagaggatgaggattatgaccctccaattaaaattgcccgattagagtctacaccgaatagtagattcagtgccccgtcctgtggatcttctgaaaaatcaagtgcagcttctcagcactcctctcaaatgtcttcagactcctctcgatctagtagccccagtgttgatacctccacagactctcaggcttctgaggagattcaggtacttcctgaggagcggagcgatacccctgaagttcatcctccactgcccatttcccagtccccagaaaatgagagtaatgataggagaagcagaaggtattcagtgtcggagagaagttttggatctagaacgacgaaaaaattatcaactctacaaagtgccccccagcagcagacctcctcgtctccacctccacctctgctgactccaccgccaccactgcagccagcctccagtatctctgaccacacaccttggcttatgcctccaacaatccccttagcatcaccatttttgcctgcttccactgctcctatgcaagggaagcgaaaatctattttgcgagaaccgacatttaggtggacttctttaaagcattctaggtcagagccacaatacttttcctcagcaaagtatgccaaagaaggtcttattcgcaaaccaatatttgataatttccgaccccctccactaactcccgaggacgttggctttgcatctggtttttctgcatctggtaccgctgcttcagcccgattgttttcgccactccattctggaacaaggtttgatatgcacaaaaggagccctcttctgagagctccaagatttactccaagtgaggctcactctagaatatttgagtctgtaaccttgcctagtaatcgaacttctgctggaacatcttcttcaggagtatccaatagaaaaaggaaaagaaaagtgtttagtcctattcgatctgaaccaagatctccttctcactccatgaggacaagaagtggaaggcttagtagttctgagctctcacctctcacccccccgtcttctgtctcttcctcgttaagcatttctgttagtcctcttgccactagtgccttaaacccaacttttacttttccttctcattccctgactcagtctggggaatctgcagagaaaaatcagagaccaaggaagcagactagtgctccggcagagccattttcatcaagtagtcctactcctctcttcccttggtttaccccaggctctcagactgaaagagggagaaataaagacaaggcccccgaggagctgtccaaagatcgagatgctgacaagagcgtggagaaggacaagagtagagagagagaccgggagagagaaaaggagaataagcgggagtcaaggaaagagaaaaggaaaaagggatcagaaattcagagtagttctgctttgtatcctgtgggtagggtttccaaagagaaggttgttggtgaagatgttgccacttcatcttctgccaaaaaagcaacagggcggaagaagtcttcatcacatgattctgggactgatattacttctgtgactcttggggatacaacagctgtcaaaaccaaaatacttataaagaaagggagaggaaatctggaaaaaaccaacttggacctcggcccaactgccccatccctggagaaggagaaaaccctctgcctttccactccttcatctagcactgttaaacattccacttcctccataggctccatgttggctcaggcagacaagcttccaatgactgacaagagggttgccagcctcctaaaaaaggccaaagctcagctctgcaagattgagaagagtaagagtcttaaacaaaccgaccagcccaaagcacagggtcaagaaagtgactcatcagagacctctgtgcgaggaccccggattaaacatgtctgcagaagagcagctgttgcccttggccgaaaacgagctgtgtttcctgatgacatgcccaccctgagtgccttaccatgggaagaacgagaaaagattttgtcttccatggggaatgatgacaagtcatcaattgctggctcagaagatgctgaacctcttgctccacccatcaaaccaattaaacctgtcactagaaacaaggcaccccaggaacctccagtaaagaaaggacgtcgatcgaggcggtgtgggcagtgtcccggctgccaggtgcctgaggactgtggtgtttgtactaattgcttagataagcccaagtttggtggtcgcaatataaagaagcagtgctgcaagatgagaaaatgtcagaatctacaatggatgccttccaaagcctacctgcagaagcaagctaaagctgtgaaaaagaaagagaaaaagtctaagaccagtgaaaagaaagacagcaaagagagcagtgttgtgaagaacgtggtggactctagtcagaaacctaccccatcagcaagagaggatcctgccccaaagaaaagcagtagtgagcctcctccacgaaagcccgtcgaggaaaagagtgaagaagggaatgtctcggcccctgggcctgaatccaaacaggccaccactccagcttccaggaagtcaagcaagcaggtctcccagccagcagtggtcatcccgcctcagccacctactacaggaccgccaagaaaagaagttcccaaaaccactcctagtgagcccaagaaaaagcagcctccaccaccagaatcaggtccagagcagagcaaacagaaaaaagtggctccccgcccaagtatccctgtaaaacaaaaaccaaaagaaaaggaaaaaccacctccggtcaataagcaggagaatgcaggcactttgaacatcctcagcactctctccaatggcaatagttctaagcaaaaaattccagcagatggagtccacaggatcagagtggactttaaggaggattgtgaagcagaaaatgtgtgggagatgggaggcttaggaatcttgacttctgttcctataacacccagggtggtttgctttctctgtgccagtagtgggcatgtagagtttgtgtattgccaagtctgttgtgagcccttccacaagttttgtttagaggagaacgagcgccctctggaggaccagctggaaaattggtgttgtcgtcgttgcaaattctgtcacgtttgtggaaggcaacatcaggctacaaagcagctgctggagtgtaataagtgccgaaacagctatcaccctgagtgcctgggaccaaactaccccaccaaacccacaaagaagaagaaagtctggatctgtaccaagtgtgttcgctgtaagagctgtggatccacaactccaggcaaagggtgggatgcacagtggtctcatgatttctcactgtgtcatgattgcgccaagctctttgctaaaggaaacttctgccctctctgtgacaaatgttatgatgatgatgactatgagagtaagatgatgcaatgtggaaagtgtgatcgctgggtccattccaaatgtgagaatctttcagatgagatgtatgagattctatctaatctgccagaaagtgtggcctacacttgtgtgaactgtactgagcggcaccctgcagagtggcgactggcccttgaaaaagagctgcagatttctctgaagcaagttctgacagctttgttgaattctcggactaccagccatttgctacgctaccggcaggctgccaagcctccagacttaaatcccgagacagaggagagtataccttcccgcagctcccccgaaggacctgatccaccagttcttactgaggtcagcaaacaggatgatcagcagcctttagatctagaaggagtcaagaggaagatggaccaagggaattacacatctgtgttggagttcagtgatgatattgtgaagatcattcaagcagccattaattcagatggaggacagccagaaattaaaaaagccaacagcatggtcaagtccttcttcattcggcaaatggaacgtgtttttccatggttcagtgtcaaaaagtccaggttttgggagccaaataaagtatcaagcaacagtgggatgttaccaaacgcagtgcttccaccttcacttgaccataattatgctcagtggcaggagcgagaggaaaacagccacactgagcagcctcctttaatgaagaaaatcattccagctcccaaacccaaaggtcctggagaaccagactcaccaactcctctgcatcctcctacaccaccaattttgagtactgataggagtcgagaagacagtccagagctgaacccacccccaggcatagaagacaatagacagtgtgcgttatgtttgacttatggtgatgacagtgctaatgatgctggtcgtttactatatattggccaaaatgagtggacacatgtaaattgtgctttgtggtcagcggaagtgtttgaagatgatgacggatcactaaagaatgtgcatatggctgtgatcaggggcaagcagctgagatgtgaattctgccaaaagccaggagccaccgtgggttgctgtctcacatcctgcaccagcaactatcacttcatgtgttcccgagccaagaactgtgtctttctggatgataaaaaagtatattgccaacgacatcgggatttgatcaaaggcgaagtggttcctgagaatggatttgaagttttcagaagagtgtttgtggactttgaaggaatcagcttgagaaggaagtttctcaatggcttggaaccagaaaatatccacatgatgattgggtctatgacaatcgactgcttaggaattctaaatgatctctccgactgtgaagataagctctttcctattggatatcagtgttccagggtatactggagcaccacagatgctcgcaagcgctgtgtatatacatgcaagatagtggagtgccgtcctccagtcgtagagccggatatcaacagcactgttgaacatgatgaaaacaggaccattgcccatagtccaacatcttttacagaaagttcatcaaaagagagtcaaaacacagctgaaattataagtcctccatcaccagaccgacctcctcattcacaaacctctggctcctgttattatcatgtcatctcaaaggtccccaggattcgaacacccagttattctccaacacagagatcccctggctgtcgaccgttgccttctgcaggaagtcctaccccaaccactcatgaaatagtcacagtaggtgatcctttactctcctctggacttcgaagcattggctccaggcgtcacagtacctcttccttatcaccccagcggtccaaactccggataatgtctccaatgagaactgggaatacttactctaggaataatgtttcctcagtctccaccaccgggaccgctactgatcttgaatcaagtgccaaagtagttgatcatgtcttagggccactgaattcaagtactagtttagggcaaaacacttccacctcttcaaatttgcaaaggacagtggttactgtaggcaataaaaacagtcacttggatggatcttcatcttcagaaatgaagcagtccagtgcttcagacttggtgtccaagagctcctctttaaagggagagaagaccaaagtgctgagttccaagagctcagagggatctgcacataatgtggcttaccctggaattcctaaactggccccacaggttcataacacaacatctagagaactgaatgttagtaaaatcggctcctttgctgaaccctcttcagtgtcgttttcttctaaagaggccctctccttcccacacctcatgccaggattctcaaagtaacaactatcagaatcttccagtacaggacagaaacctaatgcttccagatggccccaaacctcaggaggatggctcttttaaaaggaggtatccccgtcgcagtgcccgtgcacgttctaacatgttttttgggcttaccccactctatggagtaagatcctatggtgaagaagacattccattctacagcagctcaactgggaagaagcgaggcaagagatcagctgaaggacaggtggatggggccgatgacttaagcacttcagatgaagacgacttatactattacaacttcactagaacagtgatttcttcaggtggagaggaacgactggcatcccataatttatttcgggaggaggaacagtgtgatcttccaaaaatctcacagttggatggtgttgatgatgggacagagagtgatactagtgtcacagccacaacaaggaaaagcagccagattccaaaaagaaatggtaaagaaaatggaacagagaacttaaagattgatagacctgaagatgctggggagaaagaacatgtcactaagagttctgttggccacaaaaatgagccaaagatggataactgccattctgtaagcagagttaaaacacagggacaagattccttggaagctcagctcagctcattggagtcaagccgcagagtccacacaagtaccccctccgacaaaaatttactggacacctataatactgagctcctgaaatcagattcagacaataacaacagtgatgactgtgggaatatcctgccttcagacattatggactttgtactaaagaatactccatccatgcaggctttgggtgagagcccagagtcatcttcatcagaactcctgaatcttggtgaaggattgggtcttgacagtaatcgtgaaaaagacatgggtctttttgaagtattttctcagcagctgcctacaacagaacctgtggatagtagtgtctcttcctctatctcagcagaggaacagtttgagttgcctctagagctaccatctgatctgtctgtcttgaccacccggagtcccactgtccccagccagaatcccagtagactagctgttatctcagactcaggggagaagagagtaaccatcacagaaaaatctgtagcctcctctgaaagtgacccagcactgctgagcccaggagtagatccaactcctgaaggccacatgactcctgatcattttatccaaggacacatggatgcagaccacatctctagccctccttgtggttcagtagagcaaggtcatggcaacaatcaggatttaactaggaacagtagcacccctggccttcaggtacctgtttccccaactgttcccatccagaaccagaagtatgtgcccaattctactgatagtcctggcccgtctcagatttccaatgcagctgtccagaccactccaccccacctgaagccagccactgagaaactcatagttgttaaccagaacatgcagccactttatgttctccaaactcttccaaatggagtgacccaaaaaatccaattgacctcttctgttagttctacacccagtgtgatggagacaaatacttcagtattgggacccatgggaggtggtctcacccttaccacaggactaaatccaagcttgccaacttctcaatctttgttcccttctgctagcaaaggattgctacccatgtctcatcaccagcacttacattccttccctgcagctactcaaagtagtttcccaccaaacatcagcaatcctccttcaggcctgcttattggggttcagcctcctccggatccccaacttttggtttcagaatccagccagaggacagacctcagtaccacagtagccactccatcctctggactcaagaaaagacccatatctcgtctacagacccgaaagaataaaaaacttgctccctctagtaccccttcaaacattgccccttctgatgtggtttctaatatgacattgattaacttcacaccctcccagcttcctaatcatccaagtctgttagatttggggtcacttaatacttcatctcaccgaactgtccccaacatcataaaaagatctaaatctagcatcatgtattttgaaccggcacccctgttaccacagagtgtgggaggaactgctgccacagcggcaggcacatcaacaataagccaggatactagccacctcacatcagggtctgtgtctggcttggcatccagttcctctgtcttgaatgttgtatccatgcaaactaccacaacccctacaagtagtgcgtcagttccaggacacgtcaccttaaccaacccaaggttgcttggtaccccagatattggctcaataagcaatcttttaatcaaagctagccagcagagcctggggattcaggaccagcctgtggctttaccgccaagttcaggaatgtttccacaactggggacatcacagaccccctctactgctgcaataacagcggcatctagcatctgtgtgctcccctccactcagactacgggcataacagccgcttcaccttctggggaagcagacgaacactatcagcttcagcatgtgaaccagctccttgccagcaaaactgggattcattcttcccagcgtgatcttgattctgcttcagggccccaggtatccaactttacccagacggtagacgctcctaatagcatgggactggagcagaacaaggctttatcctcagctgtgcaagccagccccacctctcctgggggttctccatcctctccatcttctggacagcggtcagcaagcccttcagtgccgggtcccactaaacccaaaccaaaaaccaaacggtttcagctgcctctagacaaagggaatggcaagaagcacaaagtttcccatttgcggaccagttcttctgaagcacacattccagaccaagaaacgacatccctgacctcaggcacagggactccaggagcagaggctgagcagcaggatacagctagcgtggagcagtcctcccagaaggagtgtgggcaacctgcagggcaagtcgctgttcttccggaagttcaggtgacccaaaatccagcaaatgaacaagaaagtgcagaacctaaaacagtggaagaagaggaaagtaatttcagctccccactgatgctttggcttcagcaagaacaaaagcggaaggaaagcattactgagaaaaaacccaagaaaggacttgtttttgaaatttccagtgatgatggctttcagatctgtgcagaaagtattgaagatgcctggaagtcattgacagataaagtccaggaagctcgatcaaatgcccgcctaaagcagctctcatttgcaggtgttaacggtttgaggatgctggggattctccatgatgcagttgtgttcctcattgagcagctgtctggtgccaagcactgtcgaaattacaaattccgtttccacaagccagaggaggccaatgaaccccccttgaaccctcacggctcagccagggctgaagtccacctcaggaagtcagcatttgacatgtttaacttcctggcttctaaacatcgtcagcctcctgaatacaaccccaatgatgaagaagaggaggaggtacagctgaagtcagctcggagggcaactagcatggatctgccaatgcccatgcgcttccggcacttaaaaaagacttctaaggaggcagttggtgtctacaggtctcccatccatggccggggtcttttctgtaagagaaacattgatgcaggtgagatggtgattgagtatgccggcaacgtcatccgctccatccagactgacaagcgggaaaagtattacgacagcaagggcattggttgctatatgttccgaattgatgactcagaggtagtggatgccaccatgcatggaaatgctgcacgcttcatcaatcactcgtgtgagcctaactgctattctcgggtcatcaatattgatgggcagaagcacattgtcatctttgccatgcgtaagatctaccgaggagaggaactcacttacgactataagttccccattgaggatgccagcaacaagctgccctgcaactgtggcgccaagaaatgccggaagttcctaaactaaagctgctcttctcccccagtgttggagtgcaaggaggcggggccatccaaagcaacgctgaaggccttttccagcagctgggagctcccggattgcgtggcacagctgaggggcctctgtgatggctgagctctcttatgtcctatactcacatcagacatgtgatcatagtcccagagacagagttgaggtctcgaagaaaagatccatgatcggctttctcctggggcccctccaattgtttactgttagaaagtgggaatggggtccctagcagacttgcctggaaggagcctattatagagggttggttatgttgggagattgggcctgaatttctccacagaaataagttgccatcctcaggttggccctttcccaagcactgtaagtgagtgggtcaggcaaagccccaaatggagggttggttagattcctgacagtttgccagccaggccccacctacagcgtctgtcgaacaaacagaggtctggtggttttccctactatcctcccactcgagagttcacttctggttgggagacaggattcctagcacctccggtgtcaaaaggctgtcatggggttgtgccaattaattaccaaacattgagcctgcaggctttgagtgggagtgttgcccccaggagccttatctcagccaattacctttcttgacagtaggagcggcttccctctcccattccctcttcactcccttttcttcctttcccctgtcttcatgccactgctttcccatgcttctttcgggttgtaggggagactgactgcctgctcaaggacactccctgctgggcataggatgtgcctgcaaaaagttccctgagcctgtaagcactccaggtggggaagtggacaggagccattggtcataaccagacagaatttggaaacattttcataaagctccatggagagttttaaagaaacatatgtagcatgattttgtaggagaggaaaaagattatttaaataggatttaaatcatgcaacaacgagagtatcacagccaggatgacccttgggtcccattcctaagacatggttactttattttccccttgttaagacataggaagacttaatttttaaacggtcagtgtccagttgaaggcagaacactaatcagatttcaaggcccacaacttggggactagaccaccttatgttgagggaactctgccacctgcgtgcaacccacagctaaagtaaattcaatgacactactgccctgattactccttaggatgtggtcaaaacagcatcaaatgtttcttctcttcctttccccaagacagagtcctgaacctgttaaattaagtcattggattttactctgttctgtttacagtttactatttaaggttttataaatgtaaatatattttgtatatttttctatgagaagcacttcatagggagaagcacttatgacaaggctattttttaaaccgcggtattatcctaatttaaaagaagatcggtttttaataattttttattttcataggatgaagttagagaaaatattcagctgtacacacaaagtctggtttttcctgcccaacttccccctggaaggtgtactttttgttgtttaatgtgtagcttgtttgtgccctgttgacataaatgtttcctgggtttgctctttgacaataaatggagaaggaaggtcacccaactccattgggccactcccctccttcccctattgaagctcctcaaaaggctacagtaatatcttgatacaacagattctcttctttcccgcctctctcctttccggcgcaacttccagagtggtgggagacggcaatctttacatttccctcatctttcttacttcagagttagcaaacaacaagttgaatggcaacttgacatttttgcatcaccatctgcctcataggccactctttcctttccctctgcccaccaagtcctcatatctgcagagaacccattgatcaccttgtgccctcttttggggcagcctgttgaaactgaagcacagtctgaccactcacgataaagcagatttttctctgcctctgccacaaggtttcagagtagtgtagtccaagtagagggtggggcacccttttctcgccgcaagaagcccattcctatggaagtctagcaaagcaatacgactcagcccagcactctctgccccaggactcatggctctgctgtgccttccatcctgggctcccttctctcctgtgaccttaagaactttgtctggtggctttgctggaacattgtcactgttttcactgtcatgcagggagcccagcactgtggccaggatggcagagacttccttgtcatcatggagaagtgccagcaggggactgggaaaagcactctacccagacctcacctcccttcctccttttgcccatgaacaagatgcagtggccctaggggttccactagtgtctgctttcctttattattgcactgtgtgaggtttttttgtaaatccttgtattcctattttttttaaagaaaaaaaaaaaaccttaagctgcatttgttactgaaatgattaatgcactgatgggtcctgaattcaccttgagaaagacccaaaggccagtcagggggtggggggaactcagctaaatagacctagttactgccctgctaggccatgctgtactgtgagcccctcctcactctctaccaaccctaaaccctgaggacaggggaggaacccacagcttccttctcctgccagctgcagatggtttgccttgcctttccaccccctaattgtcaaccacaaaaatgagaaattcctcttctagctcagccttgagtccattgccaaattttcagcacacctgccagcaacttgggggaataagcgaaggtttccctacaagagggaaagaaggcaaaaacggcacagctatctccaaacacatctgagttcatttcaaaagtgaccaagggaatctccgcacaaaagtgcagattgaggaattgtgatgggtcattcccaagaatcccccaaggggcatcccaaatccctgaggagtaacagctgcaaacctggtcagttctcagtgagagccagctcacttatagctttgctgctagaacctgttgtggctgcatttcctggtggccagtgacaactgtgtaaccagaatagctgcatggcgctgaccctttggccggaacttggtctcttggctccctccttggccacccaccacctctcgcacagcccctctgtttttacaccaataacaagaattaagggggaagccctggcagctatacgttttcaaccagactcctttgccgggacccagcccgccaccctgctcgcctccgtcaaacccccggccaatgcagtgagcaccatgtagctcccttgatttaaaaaaaataaaaaataaaaaaaaaaggaaaaaaaaatacaacacacacacaaaaataaaaaaaatattctaatgaatgtatctttctaaaggactgacgttcaatcaaatatctgaaaatactaaaggtcaaaaccttgtcagatgttaacttctaagttcggtttgggattttttttttttaatagaaatcaagttgtttttgtttttaaggaaaagcgggtcattgcaaagggctgggtgtaattttatgtttcatttccttcattttaaagcaatacaaggttatggagcagatggttttgtgccgaatcatgaatactagtcaagtcacacactctggaaacttgcaactttttgtttgttttggttttcaaataaatataaatatgatatatataggaactaatatagtaatgcaccatgtaacaaagcctagttcagtccatggcttttaattctcttaacactatagataaggattgtgttacagttgctagtagcggcaggaagatgtcaggctcactttcctctgattcccgaaatggggggaacctctaaccataaaggaatggtagaacagtccattcctcggatcagagaaaaatgcagacatggtgtcacctggatttttttctgcccatgaatgttgccagtcagtacctgtcctccttgtttctctatttttggttatgaatgttggggttaccacctgcatttaggggaaaattgtgttctgtgctttcctggtatcttgttccgaggtactctagttctgtctttcaaccaagaaaatagaattgtggtgtttcttttattgaacttttaacagtctctttagtaaatacaggtagttgaataattgtttcaagagctcaacagatgacaagcttcttttctagaaataagacattttttgacaactttatcatgtataacagatctgttttttttccttgtgttcttccaagcttctggttagagaaaaagagaaaaaaaaaaaaggaaaatgtgtctaaagtccatcagtgttaactccctgtgacagggatgaaggaaaatactttaatagttcaaaaaataataatgctgaaagctctctacgaaagactgaatgtaaaagtaaaaagtgtacatagttgtaaaaaaaaggagtttttaaacatgtttattttctatgcacttttttttatttaagtgatagtttaattaataaacatgtcaagtttattgctgcacatggttaagcttccttttggctttggttggagagggtggagaaaagcgggaggggcatggcctgtgacctggtcacaaagtaccttccacagtcctttactttaaggtggcatcactaaattattccctgtagcccaccttcaggtccactccacactggctctcttgactattttcttcctttattcatcagtgatgtatgttcaggacctaattaattgtggatatgaggcagggtcaagaggacaaaggaacagggcctttaccttctacatagctcccctgtttcatccaaggaggttaagtattgatttttatcggttttctcaactgtgaatataataaactgaaagcatttcagggagaagctggagaacaccttctctagctgcactccaccttaaggctgaagctggatttgtt

SEQ ID NO: 370664 - DNA, 17116 bp, Homo sapiens
ctgcttcacttcacggggcgaacatggcgcacagctgtcggtggcgcttccccgcccgacccgggaccaccgggggcggcggcggcggggggcgccggggcctagggggcgccccgcggcaacgcgtcccggccctgctgcttccccccgggcccccggtcggcggtggcggccccggggcgcccccctcccccccggctgtggcggccgcggcggcggcggcgggaagcagcggggctggggttccagggggagcggccgccgcctcagcagcctcctcgtcgtccgcctcgtcttcgtcttcgtcatcgtcctcagcctcttcagggccggccctgctccgggtgggcccgggcttcgacgcggcgctgcaggtctcggccgccatcggcaccaacctgcgccggttccgggccgtgtttggggagagcggcgggggaggcggcagcggagagctaacaacacagatcccatgtagttggagaaccaaaggccacatacatgacaaaaagactgaaccgttcaggttacttgcatggagttggtgcttaaatgatgagcaattcttaggttttggctcagatgaagaagtcagagtgcgaagtcccacaaggtctccttcagttaaaactagtcctcgaaaacctcgtgggagacctagaagtggctctgaccgaaattcagctatcctctcagatccatctgtgttttcccctctaaataaatcagagaccaaatctggagataagatcaagaagaaagattctaaaagtatagaaaagaagagaggaagacctcccaccttccctggagtaaaaatcaaaataacacatggaaaggacatttcagagttaccaaagggaaacaaagaagatagcctgaaaaaaattaaaaggacaccttctgctacgtttcagcaagccacaaagattaaaaaattaagagcaggtaaactctctcctctcaagtctaagtttaagacagggaagcttcaaataggaaggaagggggtacaaattgtacgacggagaggaaggcctccatcaacagaaaggataaagaccccttcgggtctcctcattaattctgaactggaaaagccccagaaagtccggaaagacaaggaaggaacacctccacttacaaaagaagataagacagttgtcagacaaagccctcgaaggattaagccagttaggattattccttcttcaaaaaggacagatgcaaccattgctaagcaactcttacagagggcaaaaaagggggctcaaaagaaaattgaaaaagaagcagctcagctgcagggaagaaaggtgaagacacaggtcaaaaatattcgacagttcatcatgcctgttgtcagtgctatctcctcgcggatcattaagacccctcggcggtttatagaggatgaggattatgaccctccaattaaaattgcccgattagagtctacaccgaatagtagattcagtgccccgtcctgtggatcttctgaaaaatcaagtgcagcttctcagcactcctctcaaatgtcttcagactcctctcgatctagtagccccagtgttgatacctccacagactctcaggcttctgaggagattcaggtacttcctgaggagcggagcgatacccctgaagttcatcctccactgcccatttcccagtccccagaaaatgagagtaatgataggagaagcagaaggtattcagtgtcggagagaagttttggatctagaacgacgaaaaaattatcaactctacaaagtgccccccagcagcagacctcctcgtctccacctccacctctgctgactccaccgccaccactgcagccagcctccagtatctctgaccacacaccttggcttatgcctccaacaatccccttagcatcaccatttttgcctgcttccactgctcctatgcaagggaagcgaaaatctattttgcgagaaccgacatttaggtggacttctttaaagcattctaggtcagagccacaatacttttcctcagcaaagtatgccaaagaaggtcttattcgcaaaccaatatttgataatttccgaccccctccactaactcccgaggacgttggctttgcatctggtttttctgcatctggtaccgctgcttcagcccgattgttttcgccactccattctggaacaaggtttgatatgcacaaaaggagccctcttctgagagctccaagatttactccaagtgaggctcactctagaatatttgagtctgtaaccttgcctagtaatcgaacttctgctggaacatcttcttcaggagtatccaatagaaaaaggaaaagaaaagtgtttagtcctattcgatctgaaccaagatctccttctcactccatgaggacaagaagtggaaggcttagtagttctgagctctcacctctcacccccccgtcttctgtctcttcctcgttaagcatttctgttagtcctcttgccactagtgccttaaacccaacttttacttttccttctcattccctgactcagtctggggaatctgcagagaaaaatcagagaccaaggaagcagactagtgctccggcagagccattttcatcaagtagtcctactcctctcttcccttggtttaccccaggctctcagactgaaagagggagaaataaagacaaggcccccgaggagctgtccaaagatcgagatgctgacaagagcgtggagaaggacaagagtagagagagagaccgggagagagaaaaggagaataagcgggagtcaaggaaagagaaaaggaaaaagggatcagaaattcagagtagttctgctttgtatcctgtgggtagggtttccaaagagaaggttgttggtgaagatgttgccacttcatcttctgccaaaaaagcaacagggcggaagaagtcttcatcacatgattctgggactgatattacttctgtgactcttggggatacaacagctgtcaaaaccaaaatacttataaagaaagggagaggaaatctggaaaaaaccaacttggacctcggcccaactgccccatccctggagaaggagaaaaccctctgcctttccactccttcatctagcactgttaaacattccacttcctccataggctccatgttggctcaggcagacaagcttccaatgactgacaagagggttgccagcctcctaaaaaaggccaaagctcagctctgcaagattgagaagagtaagagtcttaaacaaaccgaccagcccaaagcacagggtcaagaaagtgactcatcagagacctctgtgcgaggaccccggattaaacatgtctgcagaagagcagctgttgcccttggccgaaaacgagctgtgtttcctgatgacatgcccaccctgagtgccttaccatgggaagaacgagaaaagattttgtcttccatggggaatgatgacaagtcatcaattgctggctcagaagatgctgaacctcttgctccacccatcaaaccaattaaacctgtcactagaaacaaggcaccccaggaacctccagtaaagaaaggacgtcgatcgaggcggtgtgggcagtgtcccggctgccaggtgcctgaggactgtggtgtttgtactaattgcttagataagcccaagtttggtggtcgcaatataaagaagcagtgctgcaagatgagaaaatgtcagaatctacaatggatgccttccaaagcctacctgcagaagcaagctaaagctgtgaaaaagaaagagaaaaagtctaagaccagtgaaaagaaagacagcaaagagagcagtgttgtgaagaacgtggtggactctagtcagaaacctaccccatcagcaagagaggatcctgccccaaagaaaagcagtagtgagcctcctccacgaaagcccgtcgaggaaaagagtgaagaagggaatgtctcggcccctgggcctgaatccaaacaggccaccactccagcttccaggaagtcaagcaagcaggtctcccagccagcagtggtcatcccgcctcagccacctactacaggaccgccaagaaaagaagttcccaaaaccactcctagtgagcccaagaaaaagcagcctccaccaccagaatcaggtccagagcagagcaaacagaaaaaagtggctccccgcccaagtatccctgtaaaacaaaaaccaaaagaaaaggaaaaaccacctccggtcaataagcaggagaatgcaggcactttgaacatcctcagcactctctccaatggcaatagttctaagcaaaaaattccagcagatggagtccacaggatcagagtggactttaaggaggattgtgaagcagaaaatgtgtgggagatgggaggcttaggaatcttgacttctgttcctataacacccagggtggtttgctttctctgtgccagtagtgggcatgtagagtttgtgtattgccaagtctgttgtgagcccttccacaagttttgtttagaggagaacgagcgccctctggaggaccagctggaaaattggtgttgtcgtcgttgcaaattctgtcacgtttgtggaaggcaacatcaggctacaaagcagctgctggagtgtaataagtgccgaaacagctatcaccctgagtgcctgggaccaaactaccccaccaaacccacaaagaagaagaaagtctggatctgtaccaagtgtgttcgctgtaagagctgtggatccacaactccaggcaaagggtgggatgcacagtggtctcatgatttctcactgtgtcatgattgcgccaagctctttgctaaaggaaacttctgccctctctgtgacaaatgttatgatgatgatgactatgagagtaagatgatgcaatgtggaaagtgtgatcgctgggtccattccaaatgtgagaatctttcagatgagatgtatgagattctatctaatctgccagaaagtgtggcctacacttgtgtgaactgtactgagcggcaccctgcagagtggcgactggcccttgaaaaagagctgcagatttctctgaagcaagttctgacagctttgttgaattctcggactaccagccatttgctacgctaccggcaggctgccaagcctccagacttaaatcccgagacagaggagagtataccttcccgcagctcccccgaaggacctgatccaccagttcttactgaggtcagcaaacaggatgatcagcagcctttagatctagaaggagtcaagaggaagatggaccaagggaattacacatctgtgttggagttcagtgatgatattgtgaagatcattcaagcagccattaattcagatggaggacagccagaaattaaaaaagccaacagcatggtcaagtccttcttcattcggcaaatggaacgtgtttttccatggttcagtgtcaaaaagtccaggttttgggagccaaataaagtatcaagcaacagtgggatgttaccaaacgcagtgcttccaccttcacttgaccataattatgctcagtggcaggagcgagaggaaaacagccacactgagcagcctcctttaatgaagaaaatcattccagctcccaaacccaaaggtcctggagaaccagactcaccaactcctctgcatcctcctacaccaccaattttgagtactgataggagtcgagaagacagtccagagctgaacccacccccaggcatagaagacaatagacagtgtgcgttatgtttgacttatggtgatgacagtgctaatgatgctggtcgtttactatatattggccaaaatgagtggacacatgtaaattgtgctttgtggtcagcggaagtgtttgaagatgatgacggatcactaaagaatgtgcatatggctgtgatcaggggcaagcagctgagatgtgaattctgccaaaagccaggagccaccgtgggttgctgtctcacatcctgcaccagcaactatcacttcatgtgttcccgagccaagaactgtgtctttctggatgataaaaaagtatattgccaacgacatcgggatttgatcaaaggcgaagtggttcctgagaatggatttgaagttttcagaagagtgtttgtggactttgaaggaatcagcttgagaaggaagtttctcaatggcttggaaccagaaaatatccacatgatgattgggtctatgacaatcgactgcttaggaattctaaatgatctctccgactgtgaagataagctctttcctattggatatcagtgttccagggtatactggagcaccacagatgctcgcaagcgctgtgtatatacatgcaagatagtggagtgccgtcctccagtcgtagagccggatatcaacagcactgttgaacatgatgaaaacaggaccattgcccatagtccaacatcttttacagaaagttcatcaaaagagagtcaaaacacagctgaaattataagtcctccatcaccagaccgacctcctcattcacaaacctctggctcctgttattatcatgtcatctcaaaggtccccaggattcgaacacccagttattctccaacacagagatcccctggctgtcgaccgttgccttctgcaggaagtcctaccccaaccactcatgaaatagtcacagtaggtgatcctttactctcctctggacttcgaagcattggctccaggcgtcacagtacctcttccttatcaccccagcggtccaaactccggataatgtctccaatgagaactgggaatacttactctaggaataatgtttcctcagtctccaccaccgggaccgctactgatcttgaatcaagtgccaaagtagttgatcatgtcttagggccactgaattcaagtactagtttagggcaaaacacttccacctcttcaaatttgcaaaggacagtggttactgtaggcaataaaaacagtcacttggatggatcttcatcttcagaaatgaagcagtccagtgcttcagacttggtgtccaagagctcctctttaaagggagagaagaccaaagtgctgagttccaagagctcagagggatctgcacataatgtggcttaccctggaattcctaaactggccccacaggttcataacacaacatctagagaactgaatgttagtaaaatcggctcctttgctgaaccctcttcagtgtcgttttcttctaaagaggccctctccttcccacacctccatttgagagggcaaaggaatgatcgagaccaacacacagattctacccaatcagcaaactcctctccagatgaagatactgaagtcaaaaccttgaagctatctggaatgagcaacagatcatccattatcaacgaacatatgggatctagttccagagataggagacagaaagggaaaaaatcctgtaaagaaactttcaaagaaaagcattccagtaaatcttttttggaacctggtcaggtgacaactggtgaggaaggaaacttgaagccagagtttatggatgaggttttgactcctgagtatatgggccaacgaccatgtaacaatgtttcttctgataagattggtgataaaggcctttctatgccaggagtccccaaagctccacccatgcaagtagaaggatctgccaaggaattacaggcaccacggaaacgcacagtcaaagtgacactgacacctctaaaaatggaaaatgagagtcaatccaaaaatgccctgaaagaaagtagtcctgcttcccctttgcaaatagagtcaacatctcccacagaaccaatttcagcctctgaaaatccaggagatggtccagtggcccaaccaagccccaataatacctcatgccaggattctcaaagtaacaactatcagaatcttccagtacaggacagaaacctaatgcttccagatggccccaaacctcaggaggatggctcttttaaaaggaggtatccccgtcgcagtgcccgtgcacgttctaacatgttttttgggcttaccccactctatggagtaagatcctatggtgaagaagacattccattctacagcagctcaactgggaagaagcgaggcaagagatcagctgaaggacaggtggatggggccgatgacttaagcacttcagatgaagacgacttatactattacaacttcactagaacagtgatttcttcaggtggagaggaacgactggcatcccataatttatttcgggaggaggaacagtgtgatcttccaaaaatctcacagttggatggtgttgatgatgggacagagagtgatactagtgtcacagccacaacaaggaaaagcagccagattccaaaaagaaatggtaaagaaaatggaacagagaacttaaagattgatagacctgaagatgctggggagaaagaacatgtcactaagagttctgttggccacaaaaatgagccaaagatggataactgccattctgtaagcagagttaaaacacagggacaagattccttggaagctcagctcagctcattggagtcaagccgcagagtccacacaagtaccccctccgacaaaaatttactggacacctataatactgagctcctgaaatcagattcagacaataacaacagtgatgactgtgggaatatcctgccttcagacattatggactttgtactaaagaatactccatccatgcaggctttgggtgagagcccagagtcatcttcatcagaactcctgaatcttggtgaaggattgggtcttgacagtaatcgtgaaaaagacatgggtctttttgaagtattttctcagcagctgcctacaacagaacctgtggatagtagtgtctcttcctctatctcagcagaggaacagtttgagttgcctctagagctaccatctgatctgtctgtcttgaccacccggagtcccactgtccccagccagaatcccagtagactagctgttatctcagactcaggggagaagagagtaaccatcacagaaaaatctgtagcctcctctgaaagtgacccagcactgctgagcccaggagtagatccaactcctgaaggccacatgactcctgatcattttatccaaggacacatggatgcagaccacatctctagccctccttgtggttcagtagagcaaggtcatggcaacaatcaggatttaactaggaacagtagcacccctggccttcaggtacctgtttccccaactgttcccatccagaaccagaagtatgtgcccaattctactgatagtcctggcccgtctcagatttccaatgcagctgtccagaccactccaccccacctgaagccagccactgagaaactcatagttgttaaccagaacatgcagccactttatgttctccaaactcttccaaatggagtgacccaaaaaatccaattgacctcttctgttagttctacacccagtgtgatggagacaaatacttcagtattgggacccatgggaggtggtctcacccttaccacaggactaaatccaagcttgccaacttctcaatctttgttcccttctgctagcaaaggattgctacccatgtctcatcaccagcacttacattccttccctgcagctactcaaagtagtttcccaccaaacatcagcaatcctccttcaggcctgcttattggggttcagcctcctccggatccccaacttttggtttcagaatccagccagaggacagacctcagtaccacagtagccactccatcctctggactcaagaaaagacccatatctcgtctacagacccgaaagaataaaaaacttgctccctctagtaccccttcaaacattgccccttctgatgtggtttctaatatgacattgattaacttcacaccctcccagcttcctaatcatccaagtctgttagatttggggtcacttaatacttcatctcaccgaactgtccccaacatcataaaaagatctaaatctagcatcatgtattttgaaccggcacccctgttaccacagagtgtgggaggaactgctgccacagcggcaggcacatcaacaataagccaggatactagccacctcacatcagggtctgtgtctggcttggcatccagttcctctgtcttgaatgttgtatccatgcaaactaccacaacccctacaagtagtgcgtcagttccaggacacgtcaccttaaccaacccaaggttgcttggtaccccagatattggctcaataagcaatcttttaatcaaagctagccagcagagcctggggattcaggaccagcctgtggctttaccgccaagttcaggaatgtttccacaactggggacatcacagaccccctctactgctgcaataacagcggcatctagcatctgtgtgctcccctccactcagactacgggcataacagccgcttcaccttctggggaagcagacgaacactatcagcttcagcatgtgaaccagctccttgccagcaaaactgggattcattcttcccagcgtgatcttgattctgcttcagggccccaggtatccaactttacccagacggtagacgctcctaatagcatgggactggagcagaacaaggctttatcctcagctgtgcaagccagccccacctctcctgggggttctccatcctctccatcttctggacagcggtcagcaagcccttcagtgccgggtcccactaaacccaaaccaaaaaccaaacggtttcagctgcctctagacaaagggaatggcaagaagcacaaagtttcccatttgcggaccagttcttctgaagcacacattccagaccaagaaacgacatccctgacctcaggcacagggactccaggagcagaggctgagcagcaggatacagctagcgtggagcagtcctcccagaaggagtgtgggcaacctgcagggcaagtcgctgttcttccggaagttcaggtgacccaaaatccagcaaatgaacaagaaagtgcagaacctaaaacagtggaagaagaggaaagtaatttcagctccccactgatgctttggcttcagcaagaacaaaagcggaaggaaagcattactgagaaaaaacccaagaaaggacttgtttttgaaatttccagtgatgatggctttcagatctgtgcagaaagtattgaagatgcctggaagtcattgacagataaagtccaggaagctcgatcaaatgcccgcctaaagcagctctcatttgcaggtgttaacggtttgaggatgctggggattctccatgatgcagttgtgttcctcattgagcagctgtctggtgccaagcactgtcgaaattacaaattccgtttccacaagccagaggaggccaatgaaccccccttgaaccctcacggctcagccagggctgaagtccacctcaggaagtcagcatttgacatgtttaacttcctggcttctaaacatcgtcagcctcctgaatacaaccccaatgatgaagaagaggaggaggtacagctgaagtcagctcggagggcaactagcatggatctgccaatgcccatgcgcttccggcacttaaaaaagacttctaaggaggcagttggtgtctacaggtctcccatccatggccggggtcttttctgtaagagaaacattgatgcaggtgagatggtgattgagtatgccggcaacgtcatccgctccatccagactgacaagcgggaaaagtattacgacagcaagggcattggttgctatatgttccgaattgatgactcagaggtagtggatgccaccatgcatggaaatgctgcacgcttcatcaatcactcgtgtgagcctaactgctattctcgggtcatcaatattgatgggcagaagcacattgtcatctttgccatgcgtaagatctaccgaggagaggaactcacttacgactataagttccccattgaggatgccagcaacaagctgccctgcaactgtggcgccaagaaatgccggaagttcctaaactaaagctgctcttctcccccagtgttggagtgcaaggaggcggggccatccaaagcaacgctgaaggccttttccagcagctgggagctcccggattgcgtggcacagctgaggggcctctgtgatggctgagctctcttatgtcctatactcacatcagacatgtgatcatagtcccagagacagagttgaggtctcgaagaaaagatccatgatcggctttctcctggggcccctccaattgtttactgttagaaagtgggaatggggtccctagcagacttgcctggaaggagcctattatagagggttggttatgttgggagattgggcctgaatttctccacagaaataagttgccatcctcaggttggccctttcccaagcactgtaagtgagtgggtcaggcaaagccccaaatggagggttggttagattcctgacagtttgccagccaggccccacctacagcgtctgtcgaacaaacagaggtctggtggttttccctactatcctcccactcgagagttcacttctggttgggagacaggattcctagcacctccggtgtcaaaaggctgtcatggggttgtgccaattaattaccaaacattgagcctgcaggctttgagtgggagtgttgcccccaggagccttatctcagccaattacctttcttgacagtaggagcggcttccctctcccattccctcttcactcccttttcttcctttcccctgtcttcatgccactgctttcccatgcttctttcgggttgtaggggagactgactgcctgctcaaggacactccctgctgggcataggatgtgcctgcaaaaagttccctgagcctgtaagcactccaggtggggaagtggacaggagccattggtcataaccagacagaatttggaaacattttcataaagctccatggagagttttaaagaaacatatgtagcatgattttgtaggagaggaaaaagattatttaaataggatttaaatcatgcaacaacgagagtatcacagccaggatgacccttgggtcccattcctaagacatggttactttattttccccttgttaagacataggaagacttaatttttaaacggtcagtgtccagttgaaggcagaacactaatcagatttcaaggcccacaacttggggactagaccaccttatgttgagggaactctgccacctgcgtgcaacccacagctaaagtaaattcaatgacactactgccctgattactccttaggatgtggtcaaaacagcatcaaatgtttcttctcttcctttccccaagacagagtcctgaacctgttaaattaagtcattggattttactctgttctgtttacagtttactatttaaggttttataaatgtaaatatattttgtatatttttctatgagaagcacttcatagggagaagcacttatgacaaggctattttttaaaccgcggtattatcctaatttaaaagaagatcggtttttaataattttttattttcataggatgaagttagagaaaatattcagctgtacacacaaagtctggtttttcctgcccaacttccccctggaaggtgtactttttgttgtttaatgtgtagcttgtttgtgccctgttgacataaatgtttcctgggtttgctctttgacaataaatggagaaggaaggtcacccaactccattgggccactcccctccttcccctattgaagctcctcaaaaggctacagtaatatcttgatacaacagattctcttctttcccgcctctctcctttccggcgcaacttccagagtggtgggagacggcaatctttacatttccctcatctttcttacttcagagttagcaaacaacaagttgaatggcaacttgacatttttgcatcaccatctgcctcataggccactctttcctttccctctgcccaccaagtcctcatatctgcagagaacccattgatcaccttgtgccctcttttggggcagcctgttgaaactgaagcacagtctgaccactcacgataaagcagatttttctctgcctctgccacaaggtttcagagtagtgtagtccaagtagagggtggggcacccttttctcgccgcaagaagcccattcctatggaagtctagcaaagcaatacgactcagcccagcactctctgccccaggactcatggctctgctgtgccttccatcctgggctcccttctctcctgtgaccttaagaactttgtctggtggctttgctggaacattgtcactgttttcactgtcatgcagggagcccagcactgtggccaggatggcagagacttccttgtcatcatggagaagtgccagcaggggactgggaaaagcactctacccagacctcacctcccttcctccttttgcccatgaacaagatgcagtggccctaggggttccactagtgtctgctttcctttattattgcactgtgtgaggtttttttgtaaatccttgtattcctattttttttaaagaaaaaaaaaaaaccttaagctgcatttgttactgaaatgattaatgcactgatgggtcctgaattcaccttgagaaagacccaaaggccagtcagggggtggggggaactcagctaaatagacctagttactgccctgctaggccatgctgtactgtgagcccctcctcactctctaccaaccctaaaccctgaggacaggggaggaacccacagcttccttctcctgccagctgcagatggtttgccttgcctttccaccccctaattgtcaaccacaaaaatgagaaattcctcttctagctcagccttgagtccattgccaaattttcagcacacctgccagcaacttgggggaataagcgaaggtttccctacaagagggaaagaaggcaaaaacggcacagctatctccaaacacatctgagttcatttcaaaagtgaccaagggaatctccgcacaaaagtgcagattgaggaattgtgatgggtcattcccaagaatcccccaaggggcatcccaaatccctgaggagtaacagctgcaaacctggtcagttctcagtgagagccagctcacttatagctttgctgctagaacctgttgtggctgcatttcctggtggccagtgacaactgtgtaaccagaatagctgcatggcgctgaccctttggccggaacttggtctcttggctccctccttggccacccaccacctctcgcacagcccctctgtttttacaccaataacaagaattaagggggaagccctggcagctatacgttttcaaccagactcctttgccgggacccagcccgccaccctgctcgcctccgtcaaacccccggccaatgcagtgagcaccatgtagctcccttgatttaaaaaaaataaaaaataaaaaaaaaaggaaaaaaaaatacaacacacacacaaaaataaaaaaaatattctaatgaatgtatctttctaaaggactgacgttcaatcaaatatctgaaaatactaaaggtcaaaaccttgtcagatgttaacttctaagttcggtttgggattttttttttttaatagaaatcaagttgtttttgtttttaaggaaaagcgggtcattgcaaagggctgggtgtaattttatgtttcatttccttcattttaaagcaatacaaggttatggagcagatggttttgtgccgaatcatgaatactagtcaagtcacacactctggaaacttgcaactttttgtttgttttggttttcaaataaatataaatatgatatatataggaactaatatagtaatgcaccatgtaacaaagcctagttcagtccatggcttttaattctcttaacactatagataaggattgtgttacagttgctagtagcggcaggaagatgtcaggctcactttcctctgattcccgaaatggggggaacctctaaccataaaggaatggtagaacagtccattcctcggatcagagaaaaatgcagacatggtgtcacctggatttttttctgcccatgaatgttgccagtcagtacctgtcctccttgtttctctatttttggttatgaatgttggggttaccacctgcatttaggggaaaattgtgttctgtgctttcctggtatcttgttccgaggtactctagttctgtctttcaaccaagaaaatagaattgtggtgtttcttttattgaacttttaacagtctctttagtaaatacaggtagttgaataattgtttcaagagctcaacagatgacaagcttcttttctagaaataagacattttttgacaactttatcatgtataacagatctgttttttttccttgtgttcttccaagcttctggttagagaaaaagagaaaaaaaaaaaaggaaaatgtgtctaaagtccatcagtgttaactccctgtgacagggatgaaggaaaatactttaatagttcaaaaaataataatgctgaaagctctctacgaaagactgaatgtaaaagtaaaaagtgtacatagttgtaaaaaaaaggagtttttaaacatgtttattttctatgcacttttttttatttaagtgatagtttaattaataaacatgtcaagtttattgctgcacatggttaagcttccttttggctttggttggagagggtggagaaaagcgggaggggcatggcctgtgacctggtcacaaagtaccttccacagtcctttactttaaggtggcatcactaaattattccctgtagcccaccttcaggtccactccacactggctctcttgactattttcttcctttattcatcagtgatgtatgttcaggacctaattaattgtggatatgaggcagggtcaagaggacaaaggaacagggcctttaccttctacatagctcccctgtttcatccaaggaggttaagtattgatttttatcggttttctcaactgtgaatataataaactgaaagcatttcagggagaagctggagaacaccttctctagctgcactccaccttaaggctgaagctggatttgtt

SEQ ID NO: 370665 - DNA, 16985 bp, Homo sapiens
ctgcttcacttcacggggcgaacatggcgcacagctgtcggtggcgcttccccgcccgacccgggaccaccgggggcggcggcggcggggggcgccggggcctagggggcgccccgcggcaacgcgtcccggccctgctgcttccccccgggcccccggtcggcggtggcggccccggggcgcccccctcccccccggctgtggcggccgcggcggcggcggcgggaagcagcggggctggggttccagggggagcggccgccgcctcagcagcctcctcgtcgtccgcctcgtcttcgtcttcgtcatcgtcctcagcctcttcagggccggccctgctccgggtgggcccgggcttcgacgcggcgctgcaggtctcggccgccatcggcaccaacctgcgccggttccgggccgtgtttggggagagcggcgggggaggcggcagcggagaggatgagcaattcttaggttttggctcagatgaagaagtcagagtgcgaagtcccacaaggtctccttcagttaaaactagtcctcgaaaacctcgtgggagacctagaagtggctctgaccgaaattcagctaaataaatcagagaccaaatctggagataagatcaagaagaaagattctaaaagtatagaaaagaagagaggaagacctcccaccttccctggagtaaaaatcaaaataacacatggaaaggacatttcagagttaccaaagggaaacaaagaagatagcctgaaaaaaattaaaaggacaccttctgctacgtttcagcaagccacaaagattaaaaaattaagagcaggtaaactctctcctctcaagtctaagtttaagacagggaagcttcaaataggaaggaagggggtacaaattgtacgacggagaggaaggcctccatcaacagaaaggataaagaccccttcgggtctcctcattaattctgaactggaaaagccccagaaagtccggaaagacaaggaaggaacacctccacttacaaaagaagataagacagttgtcagacaaagccctcgaaggattaagccagttaggattattccttcttcaaaaaggacagatgcaaccattgctaagcaactcttacagagggcaaaaaagggggctcaaaagaaaattgaaaaagaagcagctcagctgcagggaagaaaggtgaagacacaggtcaaaaatattcgacagttcatcatgcctgttgtcagtgctatctcctcgcggatcattaagacccctcggcggtttatagaggatgaggattatgaccctccaattaaaattgcccgattagagtctacaccgaatagtagattcagtgccccgtcctgtggatcttctgaaaaatcaagtgcagcttctcagcactcctctcaaatgtcttcagactcctctcgatctagtagccccagtgttgatacctccacagactctcaggcttctgaggagattcaggtacttcctgaggagcggagcgatacccctgaagttcatcctccactgcccatttcccagtccccagaaaatgagagtaatgataggagaagcagaaggtattcagtgtcggagagaagttttggatctagaacgacgaaaaaattatcaactctacaaagtgccccccagcagcagacctcctcgtctccacctccacctctgctgactccaccgccaccactgcagccagcctccagtatctctgaccacacaccttggcttatgcctccaacaatccccttagcatcaccatttttgcctgcttccactgctcctatgcaagggaagcgaaaatctattttgcgagaaccgacatttaggtggacttctttaaagcattctaggtcagagccacaatacttttcctcagcaaagtatgccaaagaaggtcttattcgcaaaccaatatttgataatttccgaccccctccactaactcccgaggacgttggctttgcatctggtttttctgcatctggtaccgctgcttcagcccgattgttttcgccactccattctggaacaaggtttgatatgcacaaaaggagccctcttctgagagctccaagatttactccaagtgaggctcactctagaatatttgagtctgtaaccttgcctagtaatcgaacttctgctggaacatcttcttcaggagtatccaatagaaaaaggaaaagaaaagtgtttagtcctattcgatctgaaccaagatctccttctcactccatgaggacaagaagtggaaggcttagtagttctgagctctcacctctcacccccccgtcttctgtctcttcctcgttaagcatttctgttagtcctcttgccactagtgccttaaacccaacttttacttttccttctcattccctgactcagtctggggaatctgcagagaaaaatcagagaccaaggaagcagactagtgctccggcagagccattttcatcaagtagtcctactcctctcttcccttggtttaccccaggctctcagactgaaagagggagaaataaagacaaggcccccgaggagctgtccaaagatcgagatgctgacaagagcgtggagaaggacaagagtagagagagagaccgggagagagaaaaggagaataagcgggagtcaaggaaagagaaaaggaaaaagggatcagaaattcagagtagttctgctttgtatcctgtgggtagggtttccaaagagaaggttgttggtgaagatgttgccacttcatcttctgccaaaaaagcaacagggcggaagaagtcttcatcacatgattctgggactgatattacttctgtgactcttggggatacaacagctgtcaaaaccaaaatacttataaagaaagggagaggaaatctggaaaaaaccaacttggacctcggcccaactgccccatccctggagaaggagaaaaccctctgcctttccactccttcatctagcactgttaaacattccacttcctccataggctccatgttggctcaggcagacaagcttccaatgactgacaagagggttgccagcctcctaaaaaaggccaaagctcagctctgcaagattgagaagagtaagagtcttaaacaaaccgaccagcccaaagcacagggtcaagaaagtgactcatcagagacctctgtgcgaggaccccggattaaacatgtctgcagaagagcagctgttgcccttggccgaaaacgagctgtgtttcctgatgacatgcccaccctgagtgccttaccatgggaagaacgagaaaagattttgtcttccatggggaatgatgacaagtcatcaattgctggctcagaagatgctgaacctcttgctccacccatcaaaccaattaaacctgtcactagaaacaaggcaccccaggaacctccagtaaagaaaggacgtcgatcgaggcggtgtgggcagtgtcccggctgccaggtgcctgaggactgtggtgtttgtactaattgcttagataagcccaagtttggtggtcgcaatataaagaagcagtgctgcaagatgagaaaatgtcagaatctacaatggatgccttccaaagcctacctgcagaagcaagctaaagctgtgaaaaagaaagagaaaaagtctaagaccagtgaaaagaaagacagcaaagagagcagtgttgtgaagaacgtggtggactctagtcagaaacctaccccatcagcaagagaggatcctgccccaaagaaaagcagtagtgagcctcctccacgaaagcccgtcgaggaaaagagtgaagaagggaatgtctcggcccctgggcctgaatccaaacaggccaccactccagcttccaggaagtcaagcaagcaggtctcccagccagcagtggtcatcccgcctcagccacctactacaggaccgccaagaaaagaagttcccaaaaccactcctagtgagcccaagaaaaagcagcctccaccaccagaatcaggtccagagcagagcaaacagaaaaaagtggctccccgcccaagtatccctgtaaaacaaaaaccaaaagaaaaggaaaaaccacctccggtcaataagcaggagaatgcaggcactttgaacatcctcagcactctctccaatggcaatagttctaagcaaaaaattccagcagatggagtccacaggatcagagtggactttaaggaggattgtgaagcagaaaatgtgtgggagatgggaggcttaggaatcttgacttctgttcctataacacccagggtggtttgctttctctgtgccagtagtgggcatgtagagtttgtgtattgccaagtctgttgtgagcccttccacaagttttgtttagaggagaacgagcgccctctggaggaccagctggaaaattggtgttgtcgtcgttgcaaattctgtcacgtttgtggaaggcaacatcaggctacaaagcagctgctggagtgtaataagtgccgaaacagctatcaccctgagtgcctgggaccaaactaccccaccaaacccacaaagaagaagaaagtctggatctgtaccaagtgtgttcgctgtaagagctgtggatccacaactccaggcaaagggtgggatgcacagtggtctcatgatttctcactgtgtcatgattgcgccaagctctttgctaaaggaaacttctgccctctctgtgacaaatgttatgatgatgatgactatgagagtaagatgatgcaatgtggaaagtgtgatcgctgggtccattccaaatgtgagaatctttcagatgagatgtatgagattctatctaatctgccagaaagtgtggcctacacttgtgtgaactgtactgagcggcaccctgcagagtggcgactggcccttgaaaaagagctgcagatttctctgaagcaagttctgacagctttgttgaattctcggactaccagccatttgctacgctaccggcaggctgccaagcctccagacttaaatcccgagacagaggagagtataccttcccgcagctcccccgaaggacctgatccaccagttcttactgaggtcagcaaacaggatgatcagcagcctttagatctagaaggagtcaagaggaagatggaccaagggaattacacatctgtgttggagttcagtgatgatattgtgaagatcattcaagcagccattaattcagatggaggacagccagaaattaaaaaagccaacagcatggtcaagtccttcttcattcggcaaatggaacgtgtttttccatggttcagtgtcaaaaagtccaggttttgggagccaaataaagtatcaagcaacagtgggatgttaccaaacgcagtgcttccaccttcacttgaccataattatgctcagtggcaggagcgagaggaaaacagccacactgagcagcctcctttaatgaagaaaatcattccagctcccaaacccaaaggtcctggagaaccagactcaccaactcctctgcatcctcctacaccaccaattttgagtactgataggagtcgagaagacagtccagagctgaacccacccccaggcatagaagacaatagacagtgtgcgttatgtttgacttatggtgatgacagtgctaatgatgctggtcgtttactatatattggccaaaatgagtggacacatgtaaattgtgctttgtggtcagcggaagtgtttgaagatgatgacggatcactaaagaatgtgcatatggctgtgatcaggggcaagcagctgagatgtgaattctgccaaaagccaggagccaccgtgggttgctgtctcacatcctgcaccagcaactatcacttcatgtgttcccgagccaagaactgtgtctttctggatgataaaaaagtatattgccaacgacatcgggatttgatcaaaggcgaagtggttcctgagaatggatttgaagttttcagaagagtgtttgtggactttgaaggaatcagcttgagaaggaagtttctcaatggcttggaaccagaaaatatccacatgatgattgggtctatgacaatcgactgcttaggaattctaaatgatctctccgactgtgaagataagctctttcctattggatatcagtgttccagggtatactggagcaccacagatgctcgcaagcgctgtgtatatacatgcaagatagtggagtgccgtcctccagtcgtagagccggatatcaacagcactgttgaacatgatgaaaacaggaccattgcccatagtccaacatcttttacagaaagttcatcaaaagagagtcaaaacacagctgaaattataagtcctccatcaccagaccgacctcctcattcacaaacctctggctcctgttattatcatgtcatctcaaaggtccccaggattcgaacacccagttattctccaacacagagatcccctggctgtcgaccgttgccttctgcaggaagtcctaccccaaccactcatgaaatagtcacagtaggtgatcctttactctcctctggacttcgaagcattggctccaggcgtcacagtacctcttccttatcaccccagcggtccaaactccggataatgtctccaatgagaactgggaatacttactctaggaataatgtttcctcagtctccaccaccgggaccgctactgatcttgaatcaagtgccaaagtagttgatcatgtcttagggccactgaattcaagtactagtttagggcaaaacacttccacctcttcaaatttgcaaaggacagtggttactgtaggcaataaaaacagtcacttggatggatcttcatcttcagaaatgaagcagtccagtgcttcagacttggtgtccaagagctcctctttaaagggagagaagaccaaagtgctgagttccaagagctcagagggatctgcacataatgtggcttaccctggaattcctaaactggccccacaggttcataacacaacatctagagaactgaatgttagtaaaatcggctcctttgctgaaccctcttcagtgtcgttttcttctaaagaggccctctccttcccacacctccatttgagagggcaaaggaatgatcgagaccaacacacagattctacccaatcagcaaactcctctccagatgaagatactgaagtcaaaaccttgaagctatctggaatgagcaacagatcatccattatcaacgaacatatgggatctagttccagagataggagacagaaagggaaaaaatcctgtaaagaaactttcaaagaaaagcattccagtaaatcttttttggaacctggtcaggtgacaactggtgaggaaggaaacttgaagccagagtttatggatgaggttttgactcctgagtatatgggccaacgaccatgtaacaatgtttcttctgataagattggtgataaaggcctttctatgccaggagtccccaaagctccacccatgcaagtagaaggatctgccaaggaattacaggcaccacggaaacgcacagtcaaagtgacactgacacctctaaaaatggaaaatgagagtcaatccaaaaatgccctgaaagaaagtagtcctgcttcccctttgcaaatagagtcaacatctcccacagaaccaatttcagcctctgaaaatccaggagatggtccagtggcccaaccaagccccaataatacctcatgccaggattctcaaagtaacaactatcagaatcttccagtacaggacagaaacctaatgcttccagatggccccaaacctcaggaggatggctcttttaaaaggaggtatccccgtcgcagtgcccgtgcacgttctaacatgttttttgggcttaccccactctatggagtaagatcctatggtgaagaagacattccattctacagcagctcaactgggaagaagcgaggcaagagatcagctgaaggacaggtggatggggccgatgacttaagcacttcagatgaagacgacttatactattacaacttcactagaacagtgatttcttcaggtggagaggaacgactggcatcccataatttatttcgggaggaggaacagtgtgatcttccaaaaatctcacagttggatggtgttgatgatgggacagagagtgatactagtgtcacagccacaacaaggaaaagcagccagattccaaaaagaaatggtaaagaaaatggaacagagaacttaaagattgatagacctgaagatgctggggagaaagaacatgtcactaagagttctgttggccacaaaaatgagccaaagatggataactgccattctgtaagcagagttaaaacacagggacaagattccttggaagctcagctcagctcattggagtcaagccgcagagtccacacaagtaccccctccgacaaaaatttactggacacctataatactgagctcctgaaatcagattcagacaataacaacagtgatgactgtgggaatatcctgccttcagacattatggactttgtactaaagaatactccatccatgcaggctttgggtgagagcccagagtcatcttcatcagaactcctgaatcttggtgaaggattgggtcttgacagtaatcgtgaaaaagacatgggtctttttgaagtattttctcagcagctgcctacaacagaacctgtggatagtagtgtctcttcctctatctcagcagaggaacagtttgagttgcctctagagctaccatctgatctgtctgtcttgaccacccggagtcccactgtccccagccagaatcccagtagactagctgttatctcagactcaggggagaagagagtaaccatcacagaaaaatctgtagcctcctctgaaagtgacccagcactgctgagcccaggagtagatccaactcctgaaggccacatgactcctgatcattttatccaaggacacatggatgcagaccacatctctagccctccttgtggttcagtagagcaaggtcatggcaacaatcaggatttaactaggaacagtagcacccctggccttcaggtacctgtttccccaactgttcccatccagaaccagaagtatgtgcccaattctactgatagtcctggcccgtctcagatttccaatgcagctgtccagaccactccaccccacctgaagccagccactgagaaactcatagttgttaaccagaacatgcagccactttatgttctccaaactcttccaaatggagtgacccaaaaaatccaattgacctcttctgttagttctacacccagtgtgatggagacaaatacttcagtattgggacccatgggaggtggtctcacccttaccacaggactaaatccaagcttgccaacttctcaatctttgttcccttctgctagcaaaggattgctacccatgtctcatcaccagcacttacattccttccctgcagctactcaaagtagtttcccaccaaacatcagcaatcctccttcaggcctgcttattggggttcagcctcctccggatccccaacttttggtttcagaatccagccagaggacagacctcagtaccacagtagccactccatcctctggactcaagaaaagacccatatctcgtctacagacccgaaagaataaaaaacttgctccctctagtaccccttcaaacattgccccttctgatgtggtttctaatatgacattgattaacttcacaccctcccagcttcctaatcatccaagtctgttagatttggggtcacttaatacttcatctcaccgaactgtccccaacatcataaaaagatctaaatctagcatcatgtattttgaaccggcacccctgttaccacagagtgtgggaggaactgctgccacagcggcaggcacatcaacaataagccaggatactagccacctcacatcagggtctgtgtctggcttggcatccagttcctctgtcttgaatgttgtatccatgcaaactaccacaacccctacaagtagtgcgtcagttccaggacacgtcaccttaaccaacccaaggttgcttggtaccccagatattggctcaataagcaatcttttaatcaaagctagccagcagagcctggggattcaggaccagcctgtggctttaccgccaagttcaggaatgtttccacaactggggacatcacagaccccctctactgctgcaataacagcggcatctagcatctgtgtgctcccctccactcagactacgggcataacagccgcttcaccttctggggaagcagacgaacactatcagcttcagcatgtgaaccagctccttgccagcaaaactgggattcattcttcccagcgtgatcttgattctgcttcagggccccaggtatccaactttacccagacggtagacgctcctaatagcatgggactggagcagaacaaggctttatcctcagctgtgcaagccagccccacctctcctgggggttctccatcctctccatcttctggacagcggtcagcaagcccttcagtgccgggtcccactaaacccaaaccaaaaaccaaacggtttcagctgcctctagacaaagggaatggcaagaagcacaaagtttcccatttgcggaccagttcttctgaagcacacattccagaccaagaaacgacatccctgacctcaggcacagggactccaggagcagaggctgagcagcaggatacagctagcgtggagcagtcctcccagaaggagtgtgggcaacctgcagggcaagtcgctgttcttccggaagttcaggtgacccaaaatccagcaaatgaacaagaaagtgcagaacctaaaacagtggaagaagaggaaagtaatttcagctccccactgatgctttggcttcagcaagaacaaaagcggaaggaaagcattactgagaaaaaacccaagaaaggacttgtttttgaaatttccagtgatgatggctttcagatctgtgcagaaagtattgaagatgcctggaagtcattgacagataaagtccaggaagctcgatcaaatgcccgcctaaagcagctctcatttgcaggtgttaacggtttgaggatgctggggattctccatgatgcagttgtgttcctcattgagcagctgtctggtgccaagcactgtcgaaattacaaattccgtttccacaagccagaggaggccaatgaaccccccttgaaccctcacggctcagccagggctgaagtccacctcaggaagtcagcatttgacatgtttaacttcctggcttctaaacatcgtcagcctcctgaatacaaccccaatgatgaagaagaggaggaggtacagctgaagtcagctcggagggcaactagcatggatctgccaatgcccatgcgcttccggcacttaaaaaagacttctaaggaggcagttggtgtctacaggtctcccatccatggccggggtcttttctgtaagagaaacattgatgcaggtgagatggtgattgagtatgccggcaacgtcatccgctccatccagactgacaagcgggaaaagtattacgacagcaagggcattggttgctatatgttccgaattgatgactcagaggtagtggatgccaccatgcatggaaatgctgcacgcttcatcaatcactcgtgtgagcctaactgctattctcgggtcatcaatattgatgggcagaagcacattgtcatctttgccatgcgtaagatctaccgaggagaggaactcacttacgactataagttccccattgaggatgccagcaacaagctgccctgcaactgtggcgccaagaaatgccggaagttcctaaactaaagctgctcttctcccccagtgttggagtgcaaggaggcggggccatccaaagcaacgctgaaggccttttccagcagctgggagctcccggattgcgtggcacagctgaggggcctctgtgatggctgagctctcttatgtcctatactcacatcagacatgtgatcatagtcccagagacagagttgaggtctcgaagaaaagatccatgatcggctttctcctggggcccctccaattgtttactgttagaaagtgggaatggggtccctagcagacttgcctggaaggagcctattatagagggttggttatgttgggagattgggcctgaatttctccacagaaataagttgccatcctcaggttggccctttcccaagcactgtaagtgagtgggtcaggcaaagccccaaatggagggttggttagattcctgacagtttgccagccaggccccacctacagcgtctgtcgaacaaacagaggtctggtggttttccctactatcctcccactcgagagttcacttctggttgggagacaggattcctagcacctccggtgtcaaaaggctgtcatggggttgtgccaattaattaccaaacattgagcctgcaggctttgagtgggagtgttgcccccaggagccttatctcagccaattacctttcttgacagtaggagcggcttccctctcccattccctcttcactcccttttcttcctttcccctgtcttcatgccactgctttcccatgcttctttcgggttgtaggggagactgactgcctgctcaaggacactccctgctgggcataggatgtgcctgcaaaaagttccctgagcctgtaagcactccaggtggggaagtggacaggagccattggtcataaccagacagaatttggaaacattttcataaagctccatggagagttttaaagaaacatatgtagcatgattttgtaggagaggaaaaagattatttaaataggatttaaatcatgcaacaacgagagtatcacagccaggatgacccttgggtcccattcctaagacatggttactttattttccccttgttaagacataggaagacttaatttttaaacggtcagtgtccagttgaaggcagaacactaatcagatttcaaggcccacaacttggggactagaccaccttatgttgagggaactctgccacctgcgtgcaacccacagctaaagtaaattcaatgacactactgccctgattactccttaggatgtggtcaaaacagcatcaaatgtttcttctcttcctttccccaagacagagtcctgaacctgttaaattaagtcattggattttactctgttctgtttacagtttactatttaaggttttataaatgtaaatatattttgtatatttttctatgagaagcacttcatagggagaagcacttatgacaaggctattttttaaaccgcggtattatcctaatttaaaagaagatcggtttttaataattttttattttcataggatgaagttagagaaaatattcagctgtacacacaaagtctggtttttcctgcccaacttccccctggaaggtgtactttttgttgtttaatgtgtagcttgtttgtgccctgttgacataaatgtttcctgggtttgctctttgacaataaatggagaaggaaggtcacccaactccattgggccactcccctccttcccctattgaagctcctcaaaaggctacagtaatatcttgatacaacagattctcttctttcccgcctctctcctttccggcgcaacttccagagtggtgggagacggcaatctttacatttccctcatctttcttacttcagagttagcaaacaacaagttgaatggcaacttgacatttttgcatcaccatctgcctcataggccactctttcctttccctctgcccaccaagtcctcatatctgcagagaacccattgatcaccttgtgccctcttttggggcagcctgttgaaactgaagcacagtctgaccactcacgataaagcagatttttctctgcctctgccacaaggtttcagagtagtgtagtccaagtagagggtggggcacccttttctcgccgcaagaagcccattcctatggaagtctagcaaagcaatacgactcagcccagcactctctgccccaggactcatggctctgctgtgccttccatcctgggctcccttctctcctgtgaccttaagaactttgtctggtggctttgctggaacattgtcactgttttcactgtcatgcagggagcccagcactgtggccaggatggcagagacttccttgtcatcatggagaagtgccagcaggggactgggaaaagcactctacccagacctcacctcccttcctccttttgcccatgaacaagatgcagtggccctaggggttccactagtgtctgctttcctttattattgcactgtgtgaggtttttttgtaaatccttgtattcctattttttttaaagaaaaaaaaaaaaccttaagctgcatttgttactgaaatgattaatgcactgatgggtcctgaattcaccttgagaaagacccaaaggccagtcagggggtggggggaactcagctaaatagacctagttactgccctgctaggccatgctgtactgtgagcccctcctcactctctaccaaccctaaaccctgaggacaggggaggaacccacagcttccttctcctgccagctgcagatggtttgccttgcctttccaccccctaattgtcaaccacaaaaatgagaaattcctcttctagctcagccttgagtccattgccaaattttcagcacacctgccagcaacttgggggaataagcgaaggtttccctacaagagggaaagaaggcaaaaacggcacagctatctccaaacacatctgagttcatttcaaaagtgaccaagggaatctccgcacaaaagtgcagattgaggaattgtgatgggtcattcccaagaatcccccaaggggcatcccaaatccctgaggagtaacagctgcaaacctggtcagttctcagtgagagccagctcacttatagctttgctgctagaacctgttgtggctgcatttcctggtggccagtgacaactgtgtaaccagaatagctgcatggcgctgaccctttggccggaacttggtctcttggctccctccttggccacccaccacctctcgcacagcccctctgtttttacaccaataacaagaattaagggggaagccctggcagctatacgttttcaaccagactcctttgccgggacccagcccgccaccctgctcgcctccgtcaaacccccggccaatgcagtgagcaccatgtagctcccttgatttaaaaaaaataaaaaataaaaaaaaaaggaaaaaaaaatacaacacacacacaaaaataaaaaaaatattctaatgaatgtatctttctaaaggactgacgttcaatcaaatatctgaaaatactaaaggtcaaaaccttgtcagatgttaacttctaagttcggtttgggattttttttttttaatagaaatcaagttgtttttgtttttaaggaaaagcgggtcattgcaaagggctgggtgtaattttatgtttcatttccttcattttaaagcaatacaaggttatggagcagatggttttgtgccgaatcatgaatactagtcaagtcacacactctggaaacttgcaactttttgtttgttttggttttcaaataaatataaatatgatatatataggaactaatatagtaatgcaccatgtaacaaagcctagttcagtccatggcttttaattctcttaacactatagataaggattgtgttacagttgctagtagcggcaggaagatgtcaggctcactttcctctgattcccgaaatggggggaacctctaaccataaaggaatggtagaacagtccattcctcggatcagagaaaaatgcagacatggtgtcacctggatttttttctgcccatgaatgttgccagtcagtacctgtcctccttgtttctctatttttggttatgaatgttggggttaccacctgcatttaggggaaaattgtgttctgtgctttcctggtatcttgttccgaggtactctagttctgtctttcaaccaagaaaatagaattgtggtgtttcttttattgaacttttaacagtctctttagtaaatacaggtagttgaataattgtttcaagagctcaacagatgacaagcttcttttctagaaataagacattttttgacaactttatcatgtataacagatctgttttttttccttgtgttcttccaagcttctggttagagaaaaagagaaaaaaaaaaaaggaaaatgtgtctaaagtccatcagtgttaactccctgtgacagggatgaaggaaaatactttaatagttcaaaaaataataatgctgaaagctctctacgaaagactgaatgtaaaagtaaaaagtgtacatagttgtaaaaaaaaggagtttttaaacatgtttattttctatgcacttttttttatttaagtgatagtttaattaataaacatgtcaagtttattgctgcacatggttaagcttccttttggctttggttggagagggtggagaaaagcgggaggggcatggcctgtgacctggtcacaaagtaccttccacagtcctttactttaaggtggcatcactaaattattccctgtagcccaccttcaggtccactccacactggctctcttgactattttcttcctttattcatcagtgatgtatgttcaggacctaattaattgtggatatgaggcagggtcaagaggacaaaggaacagggcctttaccttctacatagctcccctgtttcatccaaggaggttaagtattgatttttatcggttttctcaactgtgaatataataaactgaaagcatttcagggagaagctggagaacaccttctctagctgcactccaccttaaggctgaagctggatttgtt

SEQ ID NO: 370666 - DNA, 16636 bp, Homo sapiens
gtccagagcagagcaaacagaaaaaagtggctccccgcccaagtatccctgtaaaacaaaaaccaaaagaaaaggatgagcaattcttaggttttggctcagatgaagaagtcagagtgcgaagtcccacaaggtctccttcagttaaaactagtcctcgaaaacctcgtgggagacctagaagtggctctgaccgaaattcagctatcctctcagatccatctgtgttttcccctctaaataaatcagagaccaaatctggagataagatcaagaagaaagattctaaaagtatagaaaagaagagaggaagacctcccaccttccctggagtaaaaatcaaaataacacatggaaaggacatttcagagttaccaaagggaaacaaagaagatagcctgaaaaaaattaaaaggacaccttctgctacgtttcagcaagccacaaagattaaaaaattaagagcaggtaaactctctcctctcaagtctaagtttaagacagggaagcttcaaataggaaggaagggggtacaaattgtacgacggagaggaaggcctccatcaacagaaaggataaagaccccttcgggtctcctcattaattctgaactggaaaagccccagaaagtccggaaagacaaggaaggaacacctccacttacaaaagaagataagacagttgtcagacaaagccctcgaaggattaagccagttaggattattccttcttcaaaaaggacagatgcaaccattgctaagcaactcttacagagggcaaaaaagggggctcaaaagaaaattgaaaaagaagcagctcagctgcagggaagaaaggtgaagacacaggtcaaaaatattcgacagttcatcatgcctgttgtcagtgctatctcctcgcggatcattaagacccctcggcggtttatagaggatgaggattatgaccctccaattaaaattgcccgattagagtctacaccgaatagtagattcagtgccccgtcctgtggatcttctgaaaaatcaagtgcagcttctcagcactcctctcaaatgtcttcagactcctctcgatctagtagccccagtgttgatacctccacagactctcaggcttctgaggagattcaggtacttcctgaggagcggagcgatacccctgaagttcatcctccactgcccatttcccagtccccagaaaatgagagtaatgataggagaagcagaaggtattcagtgtcggagagaagttttggatctagaacgacgaaaaaattatcaactctacaaagtgccccccagcagcagacctcctcgtctccacctccacctctgctgactccaccgccaccactgcagccagcctccagtatctctgaccacacaccttggcttatgcctccaacaatccccttagcatcaccatttttgcctgcttccactgctcctatgcaagggaagcgaaaatctattttgcgagaaccgacatttaggtggacttctttaaagcattctaggtcagagccacaatacttttcctcagcaaagtatgccaaagaaggtcttattcgcaaaccaatatttgataatttccgaccccctccactaactcccgaggacgttggctttgcatctggtttttctgcatctggtaccgctgcttcagcccgattgttttcgccactccattctggaacaaggtttgatatgcacaaaaggagccctcttctgagagctccaagatttactccaagtgaggctcactctagaatatttgagtctgtaaccttgcctagtaatcgaacttctgctggaacatcttcttcaggagtatccaatagaaaaaggaaaagaaaagtgtttagtcctattcgatctgaaccaagatctccttctcactccatgaggacaagaagtggaaggcttagtagttctgagctctcacctctcacccccccgtcttctgtctcttcctcgttaagcatttctgttagtcctcttgccactagtgccttaaacccaacttttacttttccttctcattccctgactcagtctggggaatctgcagagaaaaatcagagaccaaggaagcagactagtgctccggcagagccattttcatcaagtagtcctactcctctcttcccttggtttaccccaggctctcagactgaaagagggagaaataaagacaaggcccccgaggagctgtccaaagatcgagatgctgacaagagcgtggagaaggacaagagtagagagagagaccgggagagagaaaaggagaataagcgggagtcaaggaaagagaaaaggaaaaagggatcagaaattcagagtagttctgctttgtatcctgtgggtagggtttccaaagagaaggttgttggtgaagatgttgccacttcatcttctgccaaaaaagcaacagggcggaagaagtcttcatcacatgattctgggactgatattacttctgtgactcttggggatacaacagctgtcaaaaccaaaatacttataaagaaagggagaggaaatctggaaaaaaccaacttggacctcggcccaactgccccatccctggagaaggagaaaaccctctgcctttccactccttcatctagcactgttaaacattccacttcctccataggctccatgttggctcaggcagacaagcttccaatgactgacaagagggttgccagcctcctaaaaaaggccaaagctcagctctgcaagattgagaagagtaagagtcttaaacaaaccgaccagcccaaagcacagggtcaagaaagtgactcatcagagacctctgtgcgaggaccccggattaaacatgtctgcagaagagcagctgttgcccttggccgaaaacgagctgtgtttcctgatgacatgcccaccctgagtgccttaccatgggaagaacgagaaaagattttgtcttccatggggaatgatgacaagtcatcaattgctggctcagaagatgctgaacctcttgctccacccatcaaaccaattaaacctgtcactagaaacaaggcaccccaggaacctccagtaaagaaaggacgtcgatcgaggcggtgtgggcagtgtcccggctgccaggtgcctgaggactgtggtgtttgtactaattgcttagataagcccaagtttggtggtcgcaatataaagaagcagtgctgcaagatgagaaaatgtcagaatctacaatggatgccttccaaagcctacctgcagaagcaagctaaagctgtgaaaaagaaagagaaaaagtctaagaccagtgaaaagaaagacagcaaagagagcagtgttgtgaagaacgtggtggactctagtcagaaacctaccccatcagcaagagaggatcctgccccaaagaaaagcagtagtgagcctcctccacgaaagcccgtcgaggaaaagagtgaagaagggaatgtctcggcccctgggcctgaatccaaacaggccaccactccagcttccaggaagtcaagcaagcaggtctcccagccagcagtggtcatcccgcctcagccacctactacaggaccgccaagaaaagaagttcccaaaaccactcctagtgagcccaagaaaaagcagcctccaccaccagaatcaggtccagagcagagcaaacagaaaaaagtggctccccgcccaagtatccctgtaaaacaaaaaccaaaagaaaaggaaaaaccacctccggtcaataagcaggagaatgcaggcactttgaacatcctcagcactctctccaatggcaatagttctaagcaaaaaattccagcagatggagtccacaggatcagagtggactttaaggaggattgtgaagcagaaaatgtgtgggagatgggaggcttaggaatcttgacttctgttcctataacacccagggtggtttgctttctctgtgccagtagtgggcatgtagagtttgtgtattgccaagtctgttgtgagcccttccacaagttttgtttagaggagaacgagcgccctctggaggaccagctggaaaattggtgttgtcgtcgttgcaaattctgtcacgtttgtggaaggcaacatcaggctacaaagcagctgctggagtgtaataagtgccgaaacagctatcaccctgagtgcctgggaccaaactaccccaccaaacccacaaagaagaagaaagtctggatctgtaccaagtgtgttcgctgtaagagctgtggatccacaactccaggcaaagggtgggatgcacagtggtctcatgatttctcactgtgtcatgattgcgccaagctctttgctaaaggaaacttctgccctctctgtgacaaatgttatgatgatgatgactatgagagtaagatgatgcaatgtggaaagtgtgatcgctgggtccattccaaatgtgagaatctttcagatgagatgtatgagattctatctaatctgccagaaagtgtggcctacacttgtgtgaactgtactgagcggcaccctgcagagtggcgactggcccttgaaaaagagctgcagatttctctgaagcaagttctgacagctttgttgaattctcggactaccagccatttgctacgctaccggcaggctgccaagcctccagacttaaatcccgagacagaggagagtataccttcccgcagctcccccgaaggacctgatccaccagttcttactgaggtcagcaaacaggatgatcagcagcctttagatctagaaggagtcaagaggaagatggaccaagggaattacacatctgtgttggagttcagtgatgatattgtgaagatcattcaagcagccattaattcagatggaggacagccagaaattaaaaaagccaacagcatggtcaagtccttcttcattcggcaaatggaacgtgtttttccatggttcagtgtcaaaaagtccaggttttgggagccaaataaagtatcaagcaacagtgggatgttaccaaacgcagtgcttccaccttcacttgaccataattatgctcagtggcaggagcgagaggaaaacagccacactgagcagcctcctttaatgaagaaaatcattccagctcccaaacccaaaggtcctggagaaccagactcaccaactcctctgcatcctcctacaccaccaattttgagtactgataggagtcgagaagacagtccagagctgaacccacccccaggcatagaagacaatagacagtgtgcgttatgtttgacttatggtgatgacagtgctaatgatgctggtcgtttactatatattggccaaaatgagtggacacatgtaaattgtgctttgtggtcagcggaagtgtttgaagatgatgacggatcactaaagaatgtgcatatggctgtgatcaggggcaagcagctgagatgtgaattctgccaaaagccaggagccaccgtgggttgctgtctcacatcctgcaccagcaactatcacttcatgtgttcccgagccaagaactgtgtctttctggatgataaaaaagtatattgccaacgacatcgggatttgatcaaaggcgaagtggttcctgagaatggatttgaagttttcagaagagtgtttgtggactttgaaggaatcagcttgagaaggaagtttctcaatggcttggaaccagaaaatatccacatgatgattgggtctatgacaatcgactgcttaggaattctaaatgatctctccgactgtgaagataagctctttcctattggatatcagtgttccagggtatactggagcaccacagatgctcgcaagcgctgtgtatatacatgcaagatagtggagtgccgtcctccagtcgtagagccggatatcaacagcactgttgaacatgatgaaaacaggaccattgcccatagtccaacatcttttacagaaagttcatcaaaagagagtcaaaacacagctgaaattataagtcctccatcaccagaccgacctcctcattcacaaacctctggctcctgttattatcatgtcatctcaaaggtccccaggattcgaacacccagttattctccaacacagagatcccctggctgtcgaccgttgccttctgcaggaagtcctaccccaaccactcatgaaatagtcacagtaggtgatcctttactctcctctggacttcgaagcattggctccaggcgtcacagtacctcttccttatcaccccagcggtccaaactccggataatgtctccaatgagaactgggaatacttactctaggaataatgtttcctcagtctccaccaccgggaccgctactgatcttgaatcaagtgccaaagtagttgatcatgtcttagggccactgaattcaagtactagtttagggcaaaacacttccacctcttcaaatttgcaaaggacagtggttactgtaggcaataaaaacagtcacttggatggatcttcatcttcagaaatgaagcagtccagtgcttcagacttggtgtccaagagctcctctttaaagggagagaagaccaaagtgctgagttccaagagctcagagggatctgcacataatgtggcttaccctggaattcctaaactggccccacaggttcataacacaacatctagagaactgaatgttagtaaaatcggctcctttgctgaaccctcttcagtgtcgttttcttctaaagaggccctctccttcccacacctccatttgagagggcaaaggaatgatcgagaccaacacacagattctacccaatcagcaaactcctctccagatgaagatactgaagtcaaaaccttgaagctatctggaatgagcaacagatcatccattatcaacgaacatatgggatctagttccagagataggagacagaaagggaaaaaatcctgtaaagaaactttcaaagaaaagcattccagtaaatcttttttggaacctggtcaggtgacaactggtgaggaaggaaacttgaagccagagtttatggatgaggttttgactcctgagtatatgggccaacgaccatgtaacaatgtttcttctgataagattggtgataaaggcctttctatgccaggagtccccaaagctccacccatgcaagtagaaggatctgccaaggaattacaggcaccacggaaacgcacagtcaaagtgacactgacacctctaaaaatggaaaatgagagtcaatccaaaaatgccctgaaagaaagtagtcctgcttcccctttgcaaatagagtcaacatctcccacagaaccaatttcagcctctgaaaatccaggagatggtccagtggcccaaccaagccccaataatacctcatgccaggattctcaaagtaacaactatcagaatcttccagtacaggacagaaacctaatgcttccagatggccccaaacctcaggaggatggctcttttaaaaggaggtatccccgtcgcagtgcccgtgcacgttctaacatgttttttgggcttaccccactctatggagtaagatcctatggtgaagaagacattccattctacagcagctcaactgggaagaagcgaggcaagagatcagctgaaggacaggtggatggggccgatgacttaagcacttcagatgaagacgacttatactattacaacttcactagaacagtgatttcttcaggtggagaggaacgactggcatcccataatttatttcgggaggaggaacagtgtgatcttccaaaaatctcacagttggatggtgttgatgatgggacagagagtgatactagtgtcacagccacaacaaggaaaagcagccagattccaaaaagaaatggtaaagaaaatggaacagagaacttaaagattgatagacctgaagatgctggggagaaagaacatgtcactaagagttctgttggccacaaaaatgagccaaagatggataactgccattctgtaagcagagttaaaacacagggacaagattccttggaagctcagctcagctcattggagtcaagccgcagagtccacacaagtaccccctccgacaaaaatttactggacacctataatactgagctcctgaaatcagattcagacaataacaacagtgatgactgtgggaatatcctgccttcagacattatggactttgtactaaagaatactccatccatgcaggctttgggtgagagcccagagtcatcttcatcagaactcctgaatcttggtgaaggattgggtcttgacagtaatcgtgaaaaagacatgggtctttttgaagtattttctcagcagctgcctacaacagaacctgtggatagtagtgtctcttcctctatctcagcagaggaacagtttgagttgcctctagagctaccatctgatctgtctgtcttgaccacccggagtcccactgtccccagccagaatcccagtagactagctgttatctcagactcaggggagaagagagtaaccatcacagaaaaatctgtagcctcctctgaaagtgacccagcactgctgagcccaggagtagatccaactcctgaaggccacatgactcctgatcattttatccaaggacacatggatgcagaccacatctctagccctccttgtggttcagtagagcaaggtcatggcaacaatcaggatttaactaggaacagtagcacccctggccttcaggtacctgtttccccaactgttcccatccagaaccagaagtatgtgcccaattctactgatagtcctggcccgtctcagatttccaatgcagctgtccagaccactccaccccacctgaagccagccactgagaaactcatagttgttaaccagaacatgcagccactttatgttctccaaactcttccaaatggagtgacccaaaaaatccaattgacctcttctgttagttctacacccagtgtgatggagacaaatacttcagtattgggacccatgggaggtggtctcacccttaccacaggactaaatccaagcttgccaacttctcaatctttgttcccttctgctagcaaaggattgctacccatgtctcatcaccagcacttacattccttccctgcagctactcaaagtagtttcccaccaaacatcagcaatcctccttcaggcctgcttattggggttcagcctcctccggatccccaacttttggtttcagaatccagccagaggacagacctcagtaccacagtagccactccatcctctggactcaagaaaagacccatatctcgtctacagacccgaaagaataaaaaacttgctccctctagtaccccttcaaacattgccccttctgatgtggtttctaatatgacattgattaacttcacaccctcccagcttcctaatcatccaagtctgttagatttggggtcacttaatacttcatctcaccgaactgtccccaacatcataaaaagatctaaatctagcatcatgtattttgaaccggcacccctgttaccacagagtgtgggaggaactgctgccacagcggcaggcacatcaacaataagccaggatactagccacctcacatcagggtctgtgtctggcttggcatccagttcctctgtcttgaatgttgtatccatgcaaactaccacaacccctacaagtagtgcgtcagttccaggacacgtcaccttaaccaacccaaggttgcttggtaccccagatattggctcaataagcaatcttttaatcaaagctagccagcagagcctggggattcaggaccagcctgtggctttaccgccaagttcaggaatgtttccacaactggggacatcacagaccccctctactgctgcaataacagcggcatctagcatctgtgtgctcccctccactcagactacgggcataacagccgcttcaccttctggggaagcagacgaacactatcagcttcagcatgtgaaccagctccttgccagcaaaactgggattcattcttcccagcgtgatcttgattctgcttcagggccccaggtatccaactttacccagacggtagacgctcctaatagcatgggactggagcagaacaaggctttatcctcagctgtgcaagccagccccacctctcctgggggttctccatcctctccatcttctggacagcggtcagcaagcccttcagtgccgggtcccactaaacccaaaccaaaaaccaaacggtttcagctgcctctagacaaagggaatggcaagaagcacaaagtttcccatttgcggaccagttcttctgaagcacacattccagaccaagaaacgacatccctgacctcaggcacagggactccaggagcagaggctgagcagcaggatacagctagcgtggagcagtcctcccagaaggagtgtgggcaacctgcagggcaagtcgctgttcttccggaagttcaggtgacccaaaatccagcaaatgaacaagaaagtgcagaacctaaaacagtggaagaagaggaaagtaatttcagctccccactgatgctttggcttcagcaagaacaaaagcggaaggaaagcattactgagaaaaaacccaagaaaggacttgtttttgaaatttccagtgatgatggctttcagatctgtgcagaaagtattgaagatgcctggaagtcattgacagataaagtccaggaagctcgatcaaatgcccgcctaaagcagctctcatttgcaggtgttaacggtttgaggatgctggggattctccatgatgcagttgtgttcctcattgagcagctgtctggtgccaagcactgtcgaaattacaaattccgtttccacaagccagaggaggccaatgaaccccccttgaaccctcacggctcagccagggctgaagtccacctcaggaagtcagcatttgacatgtttaacttcctggcttctaaacatcgtcagcctcctgaatacaaccccaatgatgaagaagaggaggaggtacagctgaagtcagctcggagggcaactagcatggatctgccaatgcccatgcgcttccggcacttaaaaaagacttctaaggaggcagttggtgtctacaggtctcccatccatggccggggtcttttctgtaagagaaacattgatgcaggtgagatggtgattgagtatgccggcaacgtcatccgctccatccagactgacaagcgggaaaagtattacgacagcaagggcattggttgctatatgttccgaattgatgactcagaggtagtggatgccaccatgcatggaaatgctgcacgcttcatcaatcactcgtgtgagcctaactgctattctcgggtcatcaatattgatgggcagaagcacattgtcatctttgccatgcgtaagatctaccgaggagaggaactcacttacgactataagttccccattgaggatgccagcaacaagctgccctgcaactgtggcgccaagaaatgccggaagttcctaaactaaagctgctcttctcccccagtgttggagtgcaaggaggcggggccatccaaagcaacgctgaaggccttttccagcagctgggagctcccggattgcgtggcacagctgaggggcctctgtgatggctgagctctcttatgtcctatactcacatcagacatgtgatcatagtcccagagacagagttgaggtctcgaagaaaagatccatgatcggctttctcctggggcccctccaattgtttactgttagaaagtgggaatggggtccctagcagacttgcctggaaggagcctattatagagggttggttatgttgggagattgggcctgaatttctccacagaaataagttgccatcctcaggttggccctttcccaagcactgtaagtgagtgggtcaggcaaagccccaaatggagggttggttagattcctgacagtttgccagccaggccccacctacagcgtctgtcgaacaaacagaggtctggtggttttccctactatcctcccactcgagagttcacttctggttgggagacaggattcctagcacctccggtgtcaaaaggctgtcatggggttgtgccaattaattaccaaacattgagcctgcaggctttgagtgggagtgttgcccccaggagccttatctcagccaattacctttcttgacagtaggagcggcttccctctcccattccctcttcactcccttttcttcctttcccctgtcttcatgccactgctttcccatgcttctttcgggttgtaggggagactgactgcctgctcaaggacactccctgctgggcataggatgtgcctgcaaaaagttccctgagcctgtaagcactccaggtggggaagtggacaggagccattggtcataaccagacagaatttggaaacattttcataaagctccatggagagttttaaagaaacatatgtagcatgattttgtaggagaggaaaaagattatttaaataggatttaaatcatgcaacaacgagagtatcacagccaggatgacccttgggtcccattcctaagacatggttactttattttccccttgttaagacataggaagacttaatttttaaacggtcagtgtccagttgaaggcagaacactaatcagatttcaaggcccacaacttggggactagaccaccttatgttgagggaactctgccacctgcgtgcaacccacagctaaagtaaattcaatgacactactgccctgattactccttaggatgtggtcaaaacagcatcaaatgtttcttctcttcctttccccaagacagagtcctgaacctgttaaattaagtcattggattttactctgttctgtttacagtttactatttaaggttttataaatgtaaatatattttgtatatttttctatgagaagcacttcatagggagaagcacttatgacaaggctattttttaaaccgcggtattatcctaatttaaaagaagatcggtttttaataattttttattttcataggatgaagttagagaaaatattcagctgtacacacaaagtctggtttttcctgcccaacttccccctggaaggtgtactttttgttgtttaatgtgtagcttgtttgtgccctgttgacataaatgtttcctgggtttgctctttgacaataaatggagaaggaaggtcacccaactccattgggccactcccctccttcccctattgaagctcctcaaaaggctacagtaatatcttgatacaacagattctcttctttcccgcctctctcctttccggcgcaacttccagagtggtgggagacggcaatctttacatttccctcatctttcttacttcagagttagcaaacaacaagttgaatggcaacttgacatttttgcatcaccatctgcctcataggccactctttcctttccctctgcccaccaagtcctcatatctgcagagaacccattgatcaccttgtgccctcttttggggcagcctgttgaaactgaagcacagtctgaccactcacgataaagcagatttttctctgcctctgccacaaggtttcagagtagtgtagtccaagtagagggtggggcacccttttctcgccgcaagaagcccattcctatggaagtctagcaaagcaatacgactcagcccagcactctctgccccaggactcatggctctgctgtgccttccatcctgggctcccttctctcctgtgaccttaagaactttgtctggtggctttgctggaacattgtcactgttttcactgtcatgcagggagcccagcactgtggccaggatggcagagacttccttgtcatcatggagaagtgccagcaggggactgggaaaagcactctacccagacctcacctcccttcctccttttgcccatgaacaagatgcagtggccctaggggttccactagtgtctgctttcctttattattgcactgtgtgaggtttttttgtaaatccttgtattcctattttttttaaagaaaaaaaaaaaaccttaagctgcatttgttactgaaatgattaatgcactgatgggtcctgaattcaccttgagaaagacccaaaggccagtcagggggtggggggaactcagctaaatagacctagttactgccctgctaggccatgctgtactgtgagcccctcctcactctctaccaaccctaaaccctgaggacaggggaggaacccacagcttccttctcctgccagctgcagatggtttgccttgcctttccaccccctaattgtcaaccacaaaaatgagaaattcctcttctagctcagccttgagtccattgccaaattttcagcacacctgccagcaacttgggggaataagcgaaggtttccctacaagagggaaagaaggcaaaaacggcacagctatctccaaacacatctgagttcatttcaaaagtgaccaagggaatctccgcacaaaagtgcagattgaggaattgtgatgggtcattcccaagaatcccccaaggggcatcccaaatccctgaggagtaacagctgcaaacctggtcagttctcagtgagagccagctcacttatagctttgctgctagaacctgttgtggctgcatttcctggtggccagtgacaactgtgtaaccagaatagctgcatggcgctgaccctttggccggaacttggtctcttggctccctccttggccacccaccacctctcgcacagcccctctgtttttacaccaataacaagaattaagggggaagccctggcagctatacgttttcaaccagactcctttgccgggacccagcccgccaccctgctcgcctccgtcaaacccccggccaatgcagtgagcaccatgtagctcccttgatttaaaaaaaataaaaaataaaaaaaaaaggaaaaaaaaatacaacacacacacaaaaataaaaaaaatattctaatgaatgtatctttctaaaggactgacgttcaatcaaatatctgaaaatactaaaggtcaaaaccttgtcagatgttaacttctaagttcggtttgggattttttttttttaatagaaatcaagttgtttttgtttttaaggaaaagcgggtcattgcaaagggctgggtgtaattttatgtttcatttccttcattttaaagcaatacaaggttatggagcagatggttttgtgccgaatcatgaatactagtcaagtcacacactctggaaacttgcaactttttgtttgttttggttttcaaataaatataaatatgatatatataggaactaatatagtaatgcaccatgtaacaaagcctagttcagtccatggcttttaattctcttaacactatagataaggattgtgttacagttgctagtagcggcaggaagatgtcaggctcactttcctctgattcccgaaatggggggaacctctaaccataaaggaatggtagaacagtccattcctcggatcagagaaaaatgcagacatggtgtcacctggatttttttctgcccatgaatgttgccagtcagtacctgtcctccttgtttctctatttttggttatgaatgttggggttaccacctgcatttaggggaaaattgtgttctgtgctttcctggtatcttgttccgaggtactctagttctgtctttcaaccaagaaaatagaattgtggtgtttcttttattgaacttttaacagtctctttagtaaatacaggtagttgaataattgtttcaagagctcaacagatgacaagcttcttttctagaaataagacattttttgacaactttatcatgtataacagatctgttttttttccttgtgttcttccaagcttctggttagagaaaaagagaaaaaaaaaaaaggaaaatgtgtctaaagtccatcagtgttaactccctgtgacagggatgaaggaaaatactttaatagttcaaaaaataataatgctgaaagctctctacgaaagactgaatgtaaaagtaaaaagtgtacatagttgtaaaaaaaaggagtttttaaacatgtttattttctatgcacttttttttatttaagtgatagtttaattaataaacatgtcaagtttattgctgcacatggttaagcttccttttggctttggttggagagggtggagaaaagcgggaggggcatggcctgtgacctggtcacaaagtaccttccacagtcctttactttaaggtggcatcactaaattattccctgtagcccaccttcaggtccactccacactggctctcttgactattttcttcctttattcatcagtgatgtatgttcaggacctaattaattgtggatatgaggcagggtcaagaggacaaaggaacagggcctttaccttctacatagctcccctgtttcatccaaggaggttaagtattgatttttatcggttttctcaactgtgaatataataaactgaaagcatttcagggagaagctggagaacaccttctctagctgcactccaccttaaggctgaagctggatttgtt

SEQ ID NO: 370667 - DNA, 14500 bp, Homo sapiens
ctgcttcacttcacggggcgaacatggcgcacagctgtcggtggcgcttccccgcccgacccgggaccaccgggggcggcggcggcggggggcgccggggcctagggggcgccccgcggcaacgcgtcccggccctgctgcttccccccgggcccccggtcggcggtggcggccccggggcgcccccctcccccccggctgtggcggccgcggcggcggcggcgggaagcagcggggctggggttccagggggagcggccgccgcctcagcagcctcctcgtcgtccgcctcgtcttcgtcttcgtcatcgtcctcagcctcttcagggccggccctgctccgggtgggcccgggcttcgacgcggcgctgcaggtctcggccgccatcggcaccaacctgcgccggttccgggccgtgtttggggagagcggcgggggaggcggcagcggagaggatgagcaattcttaggttttggctcagatgaagaagtcagagtgcgaagtcccacaaggtctccttcaggctccatgttggctcaggcagacaagcttccaatgactgacaagagggttgccagcctcctaaaaaaggccaaagctcagctctgcaagattgagaagagtaagagtcttaaacaaaccgaccagcccaaagcacagggtcaagaaagtgactcatcagagacctctgtgcgaggaccccggattaaacatgtctgcagaagagcagctgttgcccttggccgaaaacgagctgtgtttcctgatgacatgcccaccctgagtgccttaccatgggaagaacgagaaaagattttgtcttccatggggaatgatgacaagtcatcaattgctggctcagaagatgctgaacctcttgctccacccatcaaaccaattaaacctgtcactagaaacaaggcaccccaggaacctccagtaaagaaaggacgtcgatcgaggcggtgtgggcagtgtcccggctgccaggtgcctgaggactgtggtgtttgtactaattgcttagataagcccaagtttggtggtcgcaatataaagaagcagtgctgcaagatgagaaaatgtcagaatctacaatggatgccttccaaagcctacctgcagaagcaagctaaagctgtgaaaaagaaagagaaaaagtctaagaccagtgaaaagaaagacagcaaagagagcagtgttgtgaagaacgtggtggactctagtcagaaacctaccccatcagcaagagaggatcctgccccaaagaaaagcagtagtgagcctcctccacgaaagcccgtcgaggaaaagagtgaagaagggaatgtctcggcccctgggcctgaatccaaacaggccaccactccagcttccaggaagtcaagcaagcaggtctcccagccagcagtggtcatcccgcctcagccacctactacaggaccgccaagaaaagaagttcccaaaaccactcctagtgagcccaagaaaaagcagcctccaccaccagaatcaggtccagagcagagcaaacagaaaaaagtggctccccgcccaagtatccctgtaaaacaaaaaccaaaagaaaaggaaaaaccacctccggtcaataagcaggagaatgcaggcactttgaacatcctcagcactctctccaatggcaatagttctaagcaaaaaattccagcagatggagtccacaggatcagagtggactttaaggaggattgtgaagcagaaaatgtgtgggagatgggaggcttaggaatcttgacttctgttcctataacacccagggtggtttgctttctctgtgccagtagtgggcatgtagagtttgtgtattgccaagtctgttgtgagcccttccacaagttttgtttagaggagaacgagcgccctctggaggaccagctggaaaattggtgttgtcgtcgttgcaaattctgtcacgtttgtggaaggcaacatcaggctacaaagcagctgctggagtgtaataagtgccgaaacagctatcaccctgagtgcctgggaccaaactaccccaccaaacccacaaagaagaagaaagtctggatctgtaccaagtgtgttcgctgtaagagctgtggatccacaactccaggcaaagggtgggatgcacagtggtctcatgatttctcactgtgtcatgattgcgccaagctctttgctaaaggaaacttctgccctctctgtgacaaatgttatgatgatgatgactatgagagtaagatgatgcaatgtggaaagtgtgatcgctgggtccattccaaatgtgagaatctttcagatgagatgtatgagattctatctaatctgccagaaagtgtggcctacacttgtgtgaactgtactgagcggcaccctgcagagtggcgactggcccttgaaaaagagctgcagatttctctgaagcaagttctgacagctttgttgaattctcggactaccagccatttgctacgctaccggcaggctgccaagcctccagacttaaatcccgagacagaggagagtataccttcccgcagctcccccgaaggacctgatccaccagttcttactgaggtcagcaaacaggatgatcagcagcctttagatctagaaggagtcaagaggaagatggaccaagggaattacacatctgtgttggagttcagtgatgatattgtgaagatcattcaagcagccattaattcagatggaggacagccagaaattaaaaaagccaacagcatggtcaagtccttcttcattcggcaaatggaacgtgtttttccatggttcagtgtcaaaaagtccaggttttgggagccaaataaagtatcaagcaacagtgggatgttaccaaacgcagtgcttccaccttcacttgaccataattatgctcagtggcaggagcgagaggaaaacagccacactgagcagcctcctttaatgaagaaaatcattccagctcccaaacccaaaggtcctggagaaccagactcaccaactcctctgcatcctcctacaccaccaattttgagtactgataggagtcgagaagacagtccagagctgaacccacccccaggcatagaagacaatagacagtgtgcgttatgtttgacttatggtgatgacagtgctaatgatgctggtcgtttactatatattggccaaaatgagtggacacatgtaaattgtgctttgtggtcagcggaagtgtttgaagatgatgacggatcactaaagaatgtgcatatggctgtgatcaggggcaagcagctgagatgtgaattctgccaaaagccaggagccaccgtgggttgctgtctcacatcctgcaccagcaactatcacttcatgtgttcccgagccaagaactgtgtctttctggatgataaaaaagtatattgccaacgacatcgggatttgatcaaaggcgaagtggttcctgagaatggatttgaagttttcagaagagtgtttgtggactttgaaggaatcagcttgagaaggaagtttctcaatggcttggaaccagaaaatatccacatgatgattgggtctatgacaatcgactgcttaggaattctaaatgatctctccgactgtgaagataagctctttcctattggatatcagtgttccagggtatactggagcaccacagatgctcgcaagcgctgtgtatatacatgcaagatagtggagtgccgtcctccagtcgtagagccggatatcaacagcactgttgaacatgatgaaaacaggaccattgcccatagtccaacatcttttacagaaagttcatcaaaagagagtcaaaacacagctgaaattataagtcctccatcaccagaccgacctcctcattcacaaacctctggctcctgttattatcatgtcatctcaaaggtccccaggattcgaacacccagttattctccaacacagagatcccctggctgtcgaccgttgccttctgcaggaagtcctaccccaaccactcatgaaatagtcacagtaggtgatcctttactctcctctggacttcgaagcattggctccaggcgtcacagtacctcttccttatcaccccagcggtccaaactccggataatgtctccaatgagaactgggaatacttactctaggaataatgtttcctcagtctccaccaccgggaccgctactgatcttgaatcaagtgccaaagtagttgatcatgtcttagggccactgaattcaagtactagtttagggcaaaacacttccacctcttcaaatttgcaaaggacagtggttactgtaggcaataaaaacagtcacttggatggatcttcatcttcagaaatgaagcagtccagtgcttcagacttggtgtccaagagctcctctttaaagggagagaagaccaaagtgctgagttccaagagctcagagggatctgcacataatgtggcttaccctggaattcctaaactggccccacaggttcataacacaacatctagagaactgaatgttagtaaaatcggctcctttgctgaaccctcttcagtgtcgttttcttctaaagaggccctctccttcccacacctccatttgagagggcaaaggaatgatcgagaccaacacacagattctacccaatcagcaaactcctctccagatgaagatactgaagtcaaaaccttgaagctatctggaatgagcaacagatcatccattatcaacgaacatatgggatctagttccagagataggagacagaaagggaaaaaatcctgtaaagaaactttcaaagaaaagcattccagtaaatcttttttggaacctggtcaggtgacaactggtgaggaaggaaacttgaagccagagtttatggatgaggttttgactcctgagtatatgggccaacgaccatgtaacaatgtttcttctgataagattggtgataaaggcctttctatgccaggagtccccaaagctccacccatgcaagtagaaggatctgccaaggaattacaggcaccacggaaacgcacagtcaaagtgacactgacacctctaaaaatggaaaatgagagtcaatccaaaaatgccctgaaagaaagtagtcctgcttcccctttgcaaatagagtcaacatctcccacagaaccaatttcagcctctgaaaatccaggagatggtccagtggcccaaccaagccccaataatacctcatgccaggattctcaaagtaacaactatcagaatcttccagtacaggacagaaacctaatgcttccagatggccccaaacctcaggaggatggctcttttaaaaggaggtatccccgtcgcagtgcccgtgcacgttctaacatgttttttgggcttaccccactctatggagtaagatcctatggtgaagaagacattccattctacagcagctcaactgggaagaagcgaggcaagagatcagctgaaggacaggtggatggggccgatgacttaagcacttcagatgaagacgacttatactattacaacttcactagaacagtgatttcttcaggtggagaggaacgactggcatcccataatttatttcgggaggaggaacagtgtgatcttccaaaaatctcacagttggatggtgttgatgatgggacagagagtgatactagtgtcacagccacaacaaggaaaagcagccagattccaaaaagaaatggtaaagaaaatggaacagagaacttaaagattgatagacctgaagatgctggggagaaagaacatgtcactaagagttctgttggccacaaaaatgagccaaagatggataactgccattctgtaagcagagttaaaacacagggacaagattccttggaagctcagctcagctcattggagtcaagccgcagagtccacacaagtaccccctccgacaaaaatttactggacacctataatactgagctcctgaaatcagattcagacaataacaacagtgatgactgtgggaatatcctgccttcagacattatggactttgtactaaagaatactccatccatgcaggctttgggtgagagcccagagtcatcttcatcagaactcctgaatcttggtgaaggattgggtcttgacagtaatcgtgaaaaagacatgggtctttttgaagtattttctcagcagctgcctacaacagaacctgtggatagtagtgtctcttcctctatctcagcagaggaacagtttgagttgcctctagagctaccatctgatctgtctgtcttgaccacccggagtcccactgtccccagccagaatcccagtagactagctgttatctcagactcaggggagaagagagtaaccatcacagaaaaatctgtagcctcctctgaaagtgacccagcactgctgagcccaggagtagatccaactcctgaaggccacatgactcctgatcattttatccaaggacacatggatgcagaccacatctctagccctccttgtggttcagtagagcaaggtcatggcaacaatcaggatttaactaggaacagtagcacccctggccttcaggtacctgtttccccaactgttcccatccagaaccagaagtatgtgcccaattctactgatagtcctggcccgtctcagatttccaatgcagctgtccagaccactccaccccacctgaagccagccactgagaaactcatagttgttaaccagaacatgcagccactttatgttctccaaactcttccaaatggagtgacccaaaaaatccaattgacctcttctgttagttctacacccagtgtgatggagacaaatacttcagtattgggacccatgggaggtggtctcacccttaccacaggactaaatccaagcttgccaacttctcaatctttgttcccttctgctagcaaaggattgctacccatgtctcatcaccagcacttacattccttccctgcagctactcaaagtagtttcccaccaaacatcagcaatcctccttcaggcctgcttattggggttcagcctcctccggatccccaacttttggtttcagaatccagccagaggacagacctcagtaccacagtagccactccatcctctggactcaagaaaagacccatatctcgtctacagacccgaaagaataaaaaacttgctccctctagtaccccttcaaacattgccccttctgatgtggtttctaatatgacattgattaacttcacaccctcccagcttcctaatcatccaagtctgttagatttggggtcacttaatacttcatctcaccgaactgtccccaacatcataaaaagatctaaatctagcatcatgtattttgaaccggcacccctgttaccacagagtgtgggaggaactgctgccacagcggcaggcacatcaacaataagccaggatactagccacctcacatcagggtctgtgtctggcttggcatccagttcctctgtcttgaatgttgtatccatgcaaactaccacaacccctacaagtagtgcgtcagttccaggacacgtcaccttaaccaacccaaggttgcttggtaccccagatattggctcaataagcaatcttttaatcaaagctagccagcagagcctggggattcaggaccagcctgtggctttaccgccaagttcaggaatgtttccacaactggggacatcacagaccccctctactgctgcaataacagcggcatctagcatctgtgtgctcccctccactcagactacgggcataacagccgcttcaccttctggggaagcagacgaacactatcagcttcagcatgtgaaccagctccttgccagcaaaactgggattcattcttcccagcgtgatcttgattctgcttcagggccccaggtatccaactttacccagacggtagacgctcctaatagcatgggactggagcagaacaaggctttatcctcagctgtgcaagccagccccacctctcctgggggttctccatcctctccatcttctggacagcggtcagcaagcccttcagtgccgggtcccactaaacccaaaccaaaaaccaaacggtttcagctgcctctagacaaagggaatggcaagaagcacaaagtttcccatttgcggaccagttcttctgaagcacacattccagaccaagaaacgacatccctgacctcaggcacagggactccaggagcagaggctgagcagcaggatacagctagcgtggagcagtcctcccagaaggagtgtgggcaacctgcagggcaagtcgctgttcttccggaagttcaggtgacccaaaatccagcaaatgaacaagaaagtgcagaacctaaaacagtggaagaagaggaaagtaatttcagctccccactgatgctttggcttcagcaagaacaaaagcggaaggaaagcattactgagaaaaaacccaagaaaggacttgtttttgaaatttccagtgatgatggctttcagatctgtgcagaaagtattgaagatgcctggaagtcattgacagataaagtccaggaagctcgatcaaatgcccgcctaaagcagctctcatttgcaggtgttaacggtttgaggatgctggggattctccatgatgcagttgtgttcctcattgagcagctgtctggtgccaagcactgtcgaaattacaaattccgtttccacaagccagaggaggccaatgaaccccccttgaaccctcacggctcagccagggctgaagtccacctcaggaagtcagcatttgacatgtttaacttcctggcttctaaacatcgtcagcctcctgaatacaaccccaatgatgaagaagaggaggaggtacagctgaagtcagctcggagggcaactagcatggatctgccaatgcccatgcgcttccggcacttaaaaaagacttctaaggaggcagttggtgtctacaggtctcccatccatggccggggtcttttctgtaagagaaacattgatgcaggtgagatggtgattgagtatgccggcaacgtcatccgctccatccagactgacaagcgggaaaagtattacgacagcaagggcattggttgctatatgttccgaattgatgactcagaggtagtggatgccaccatgcatggaaatgctgcacgcttcatcaatcactcgtgtgagcctaactgctattctcgggtcatcaatattgatgggcagaagcacattgtcatctttgccatgcgtaagatctaccgaggagaggaactcacttacgactataagttccccattgaggatgccagcaacaagctgccctgcaactgtggcgccaagaaatgccggaagttcctaaactaaagctgctcttctcccccagtgttggagtgcaaggaggcggggccatccaaagcaacgctgaaggccttttccagcagctgggagctcccggattgcgtggcacagctgaggggcctctgtgatggctgagctctcttatgtcctatactcacatcagacatgtgatcatagtcccagagacagagttgaggtctcgaagaaaagatccatgatcggctttctcctggggcccctccaattgtttactgttagaaagtgggaatggggtccctagcagacttgcctggaaggagcctattatagagggttggttatgttgggagattgggcctgaatttctccacagaaataagttgccatcctcaggttggccctttcccaagcactgtaagtgagtgggtcaggcaaagccccaaatggagggttggttagattcctgacagtttgccagccaggccccacctacagcgtctgtcgaacaaacagaggtctggtggttttccctactatcctcccactcgagagttcacttctggttgggagacaggattcctagcacctccggtgtcaaaaggctgtcatggggttgtgccaattaattaccaaacattgagcctgcaggctttgagtgggagtgttgcccccaggagccttatctcagccaattacctttcttgacagtaggagcggcttccctctcccattccctcttcactcccttttcttcctttcccctgtcttcatgccactgctttcccatgcttctttcgggttgtaggggagactgactgcctgctcaaggacactccctgctgggcataggatgtgcctgcaaaaagttccctgagcctgtaagcactccaggtggggaagtggacaggagccattggtcataaccagacagaatttggaaacattttcataaagctccatggagagttttaaagaaacatatgtagcatgattttgtaggagaggaaaaagattatttaaataggatttaaatcatgcaacaacgagagtatcacagccaggatgacccttgggtcccattcctaagacatggttactttattttccccttgttaagacataggaagacttaatttttaaacggtcagtgtccagttgaaggcagaacactaatcagatttcaaggcccacaacttggggactagaccaccttatgttgagggaactctgccacctgcgtgcaacccacagctaaagtaaattcaatgacactactgccctgattactccttaggatgtggtcaaaacagcatcaaatgtttcttctcttcctttccccaagacagagtcctgaacctgttaaattaagtcattggattttactctgttctgtttacagtttactatttaaggttttataaatgtaaatatattttgtatatttttctatgagaagcacttcatagggagaagcacttatgacaaggctattttttaaaccgcggtattatcctaatttaaaagaagatcggtttttaataattttttattttcataggatgaagttagagaaaatattcagctgtacacacaaagtctggtttttcctgcccaacttccccctggaaggtgtactttttgttgtttaatgtgtagcttgtttgtgccctgttgacataaatgtttcctgggtttgctctttgacaataaatggagaaggaaggtcacccaactccattgggccactcccctccttcccctattgaagctcctcaaaaggctacagtaatatcttgatacaacagattctcttctttcccgcctctctcctttccggcgcaacttccagagtggtgggagacggcaatctttacatttccctcatctttcttacttcagagttagcaaacaacaagttgaatggcaacttgacatttttgcatcaccatctgcctcataggccactctttcctttccctctgcccaccaagtcctcatatctgcagagaacccattgatcaccttgtgccctcttttggggcagcctgttgaaactgaagcacagtctgaccactcacgataaagcagatttttctctgcctctgccacaaggtttcagagtagtgtagtccaagtagagggtggggcacccttttctcgccgcaagaagcccattcctatggaagtctagcaaagcaatacgactcagcccagcactctctgccccaggactcatggctctgctgtgccttccatcctgggctcccttctctcctgtgaccttaagaactttgtctggtggctttgctggaacattgtcactgttttcactgtcatgcagggagcccagcactgtggccaggatggcagagacttccttgtcatcatggagaagtgccagcaggggactgggaaaagcactctacccagacctcacctcccttcctccttttgcccatgaacaagatgcagtggccctaggggttccactagtgtctgctttcctttattattgcactgtgtgaggtttttttgtaaatccttgtattcctattttttttaaagaaaaaaaaaaaaccttaagctgcatttgttactgaaatgattaatgcactgatgggtcctgaattcaccttgagaaagacccaaaggccagtcagggggtggggggaactcagctaaatagacctagttactgccctgctaggccatgctgtactgtgagcccctcctcactctctaccaaccctaaaccctgaggacaggggaggaacccacagcttccttctcctgccagctgcagatggtttgccttgcctttccaccccctaattgtcaaccacaaaaatgagaaattcctcttctagctcagccttgagtccattgccaaattttcagcacacctgccagcaacttgggggaataagcgaaggtttccctacaagagggaaagaaggcaaaaacggcacagctatctccaaacacatctgagttcatttcaaaagtgaccaagggaatctccgcacaaaagtgcagattgaggaattgtgatgggtcattcccaagaatcccccaaggggcatcccaaatccctgaggagtaacagctgcaaacctggtcagttctcagtgagagccagctcacttatagctttgctgctagaacctgttgtggctgcatttcctggtggccagtgacaactgtgtaaccagaatagctgcatggcgctgaccctttggccggaacttggtctcttggctccctccttggccacccaccacctctcgcacagcccctctgtttttacaccaataacaagaattaagggggaagccctggcagctatacgttttcaaccagactcctttgccgggacccagcccgccaccctgctcgcctccgtcaaacccccggccaatgcagtgagcaccatgtagctcccttgatttaaaaaaaataaaaaataaaaaaaaaaggaaaaaaaaatacaacacacacacaaaaataaaaaaaatattctaatgaatgtatctttctaaaggactgacgttcaatcaaatatctgaaaatactaaaggtcaaaaccttgtcagatgttaacttctaagttcggtttgggattttttttttttaatagaaatcaagttgtttttgtttttaaggaaaagcgggtcattgcaaagggctgggtgtaattttatgtttcatttccttcattttaaagcaatacaaggttatggagcagatggttttgtgccgaatcatgaatactagtcaagtcacacactctggaaacttgcaactttttgtttgttttggttttcaaataaatataaatatgatatatataggaactaatatagtaatgcaccatgtaacaaagcctagttcagtccatggcttttaattctcttaacactatagataaggattgtgttacagttgctagtagcggcaggaagatgtcaggctcactttcctctgattcccgaaatggggggaacctctaaccataaaggaatggtagaacagtccattcctcggatcagagaaaaatgcagacatggtgtcacctggatttttttctgcccatgaatgttgccagtcagtacctgtcctccttgtttctctatttttggttatgaatgttggggttaccacctgcatttaggggaaaattgtgttctgtgctttcctggtatcttgttccgaggtactctagttctgtctttcaaccaagaaaatagaattgtggtgtttcttttattgaacttttaacagtctctttagtaaatacaggtagttgaataattgtttcaagagctcaacagatgacaagcttcttttctagaaataagacattttttgacaactttatcatgtataacagatctgttttttttccttgtgttcttccaagcttctggttagagaaaaagagaaaaaaaaaaaaggaaaatgtgtctaaagtccatcagtgttaactccctgtgacagggatgaaggaaaatactttaatagttcaaaaaataataatgctgaaagctctctacgaaagactgaatgtaaaagtaaaaagtgtacatagttgtaaaaaaaaggagtttttaaacatgtttattttctatgcacttttttttatttaagtgatagtttaattaataaacatgtcaagtttattgctgcacatggttaagcttccttttggctttggttggagagggtggagaaaagcgggaggggcatggcctgtgacctggtcacaaagtaccttccacagtcctttactttaaggtggcatcactaaattattccctgtagcccaccttcaggtccactccacactggctctcttgactattttcttcctttattcatcagtgatgtatgttcaggacctaattaattgtggatatgaggcagggtcaagaggacaaaggaacagggcctttaccttctacatagctcccctgtttcatccaaggaggttaagtattgatttttatcggttttctcaactgtgaatataataaactgaaagcatttcagggagaagctggagaacaccttctctagctgcactccaccttaaggctgaagctggatttgtt

SEQ ID NO: 370668 - DNA, 12263 bp, Homo sapiens
ctgcttcacttcacggggcgaacatggcgcacagctgtcggtggcgcttccccgcccgacccgggaccaccgggggcggcggcggcggggggcgccggggcctagggggcgccccgcggcaacgcgtcccggccctgctgcttccccccgggcccccggtcggcggtggcggccccggggcgcccccctcccccccggctgtggcggccgcggcggcggcggcgggaagcagcggggctggggttccagggggagcggccgccgcctcagcagcctcctcgtcgtccgcctcgtcttcgtcttcgtcatcgtcctcagcctcttcagggccggccctgctccgggtgggcccgggcttcgacgcggcgctgcaggtctcggccgccatcggcaccaacctgcgccggttccgggccgtgtttggggagagcggcgggggaggcggcagcggagaggatgagcaattcttaggttttggctcagatgaagaagtcagagtgcgaagtcccacaaggtctccttcagttaaaactagtcctcgaaaacctcgtgggagacctagaagtggctctgaccgaaattcagctatcctctcagatccatctgtgttttcccctctaaataaatcagagaccaaatctggagataagatcaagaagaaagattctaaaagtatagaaaagaagagaggaagacctcccaccttccctggagtaaaaatcaaaataacacatggaaaggacatttcagagttaccaaagggaaacaaagaagatagcctgaaaaaaattaaaaggacaccttctgctacgtttcagcaagccacaaagattaaaaaattaagagcaggtaaactctctcctctcaagtctaagtttaagacagggaagcttcaaataggaaggaagggggtacaaattgtacgacggagaggaaggcctccatcaacagaaaggataaagaccccttcgggtctcctcattaattctgaactggaaaagccccagaaagtccggaaagacaaggaaggaacacctccacttacaaaagaagataagacagttgtcagacaaagccctcgaaggattaagccagttaggattattccttcttcaaaaaggacagatgcaaccattgctaagcaactcttacagagggcaaaaaagggggctcaaaagaaaattgaaaaagaagcagctcagctgcagggaagaaaggtgaagacacaggtcaaaaatattcgacagttcatcatgcctgttgtcagtgctatctcctcgcggatcattaagacccctcggcggtttatagaggatgaggattatgaccctccaattaaaattgcccgattagagtctacaccgaatagtagattcagtgccccgtcctgtggatcttctgaaaaatcaagtgcagcttctcagcactcctctcaaatgtcttcagactcctctcgatctagtagccccagtgttgatacctccacagactctcaggcttctgaggagattcaggtacttcctgaggagcggagcgatacccctgaagttcatcctccactgcccatttcccagtccccagaaaatgagagtaatgataggagaagcagaaggtattcagtgtcggagagaagttttggatctagaacgacgaaaaaattatcaactctacaaagtgccccccagcagcagacctcctcgtctccacctccacctctgctgactccaccgccaccactgcagccagcctccagtatctctgaccacacaccttggcttatgcctccaacaatccccttagcatcaccatttttgcctgcttccactgctcctatgcaagggaagcgaaaatctattttgcgagaaccgacatttaggtggacttctttaaagcattctaggtcagagccacaatacttttcctcagcaaagtatgccaaagaaggtcttattcgcaaaccaatatttgataatttccgaccccctccactaactcccgaggacgttggctttgcatctggtttttctgcatctggtaccgctgcttcagcccgattgttttcgccactccattctggaacaaggtttgatatgcacaaaaggagccctcttctgagagctccaagatttactccaagtgaggctcactctagaatatttgagtctgtaaccttgcctagtaatcgaacttctgctggaacatcttcttcaggagtatccaatagaaaaaggaaaagaaaagtgtttagtcctattcgatctgaaccaagatctccttctcactccatgaggacaagaagtggaaggcttagtagttctgagctctcacctctcacccccccgtcttctgtctcttcctcgttaagcatttctgttagtcctcttgccactagtgccttaaacccaacttttacttttccttctcattccctgactcagtctggggaatctgcagagaaaaatcagagaccaaggaagcagactagtgctccggcagagccattttcatcaagtagtcctactcctctcttcccttggtttaccccaggctctcagactgaaagagggagaaataaagacaaggcccccgaggagctgtccaaagatcgagatgctgacaagagcgtggagaaggacaagagtagagagagagaccgggagagagaaaaggagaataagcgggagtcaaggaaagagaaaaggaaaaagggatcagaaattcagagtagttctgctttgtatcctgtgggtagggtttccaaagagaaggttgttggtgaagatgttgccacttcatcttctgccaaaaaagcaacagggcggaagaagtcttcatcacatgattctgggactgatattacttctgtgactcttggggatacaacagctgtcaaaaccaaaatacttataaagaaagggagaggaaatctggaaaaaaccaacttggacctcggcccaactgccccatccctggagaaggagaaaaccctctgcctttccactccttcatctagcactgttaaacattccacttcctccataggctccatgttggctcaggcagacaagcttccaatgactgacaagagggttgccagcctcctaaaaaaggccaaagctcagctctgcaagattgagaagagtaagagtcttaaacaaaccgaccagcccaaagcacagggtcaagaaagtgactcatcagagacctctgtgcgaggaccccggattaaacatgtctgcagaagagcagctgttgcccttggccgaaaacgagctgtgtttcctgatgacatgcccaccctgagtgccttaccatgggaagaacgagaaaagattttgtcttccatggggaatgatgacaagtcatcaattgctggctcagaagatgctgaacctcttgctccacccatcaaaccaattaaacctgtcactagaaacaaggcaccccaggaacctccagtaaagaaaggacgtcgatcgaggcggtgtgggcagtgtcccggctgccaggtgcctgaggactgtggtgtttgtactaattgcttagataagcccaagtttggtggtcgcaatataaagaagcagtgctgcaagatgagaaaatgtcagaatctacaatggatgccttccaaagcctacctgcagaagcaagctaaagctgtgaaaaagaaagagaaaaagtctaagaccagtgaaaagaaagacagcaaagagagcagtgttgtgaagaacgtggtggactctagtcagaaacctaccccatcagcaagagaggatcctgccccaaagaaaagcagtagtgagcctcctccacgaaagcccgtcgaggaaaagagtgaagaagggaatgtctcggcccctgggcctgaatccaaacaggccaccactccagcttccaggaagtcaagcaagcaggtctcccagccagcagtggtcatcccgcctcagccacctactacaggaccgccaagaaaagaagttcccaaaaccactcctagtgagcccaagaaaaagcagcctccaccaccagaatcaggtccagagcagagcaaacagaaaaaagtggctccccgcccaagtatccctgtaaaacaaaaaccaaaagaaaaggaaaaaccacctccggtcaataagcaggagaatgcaggcactttgaacatcctcagcactctctccaatggcaatagttctaagcaaaaaattccagcagatggagtccacaggatcagagtggactttaaggaggattgtgaagcagaaaatgtgtgggagatgggaggcttaggaatcttgacttctgttcctataacacccagggtggtttgctttctctgtgccagtagtgggcatgtagagtttgtgtattgccaagtctgttgtgagcccttccacaagttttgtttagaggagaacgagcgccctctggaggaccagctggaaaattggtgttgtcgtcgttgcaaattctgtcacgtttgtggaaggcaacatcaggctacaaagcagctgctggagtgtaataagtgccgaaacagctatcaccctgagtgcctgggaccaaactaccccaccaaacccacaaagaagaagaaagtctggatctgtaccaagtgtgttcgctgtaagagctgtggatccacaactccaggcaaagggtgggatgcacagtggtctcatgatttctcactgtgtcatgattgcgccaagctctttgctaaaggaaacttctgccctctctgtgacaaatgttatgatgatgatgactatgagagtaagatgatgcaatgtggaaagtgtgatcgctgggtccattccaaatgtgagaatctttcagatgagatgtatgagattctatctaatctgccagaaagtgtggcctacacttgtgtgaactgtactgagcggcaccctgcagagtggcgactggcccttgaaaaagagctgcagatttctctgaagcaagttctgacagctttgttgaattctcggactaccagccatttgctacgctaccggcaggctgccaagcctccagacttaaatcccgagacagaggagagtataccttcccgcagctcccccgaaggacctgatccaccagttcttactgaggtcagcaaacaggatgatcagcagcctttagatctagaaggagtcaagaggaagatggaccaagggaattacacatctgtgttggagttcagtgatgatattgtgaagatcattcaagcagccattaattcagatggaggacagccagaaattaaaaaagccaacagcatggtcaagtccttcttcattcggcaaatggaacgtgtttttccatggttcagtgtcaaaaagtccaggttttgggagccaaataaagtatcaagcaacagtgggatgttaccaaacgcagtgcttccaccttcacttgaccataattatgctcagtggcaggagcgagaggaaaacagccacactgagcagcctcctttaatgaagaaaatcattccagctcccaaacccaaaggtcctggagaaccagactcaccaactcctctgcatcctcctacaccaccaattttgagtactgataggagtcgagaagacagtccagagctgaacccacccccaggcatagaagacaatagacagtgtgcgttatgtttgacttatggtgatgacagtgctaatgatgctggtcgtttactatatattggccaaaatgagtggacacatgtaaattgtgctttgtggtcagcggaagtgtttgaagatgatgacggatcactaaagaatgtgcatatggctgtgatcaggggcaagcagctgagatgtgaattctgccaaaagccaggagccaccgtgggttgctgtctcacatcctgcaccagcaactatcacttcatgtgttcccgagccaagaactgtgtctttctggatgataaaaaagtatattgccaacgacatcgggatttgatcaaaggcgaagtggttcctgagaatggatttgaagttttcagaagagtgtttgtggactttgaaggaatcagcttgagaaggaagtttctcaatggcttggaaccagaaaatatccacatgatgattgggtctatgacaatcgactgcttaggaattctaaatgatctctccgactgtgaagataagctctttcctattggatatcagtgttccagggtatactggagcaccacagatgctcgcaagcgctgtgtatatacatgcaagatagtggagtgccgtcctccagtcgtagagccggatatcaacagcactgttgaacatgatgaaaacaggaccattgcccatagtccaacatcttttacagaaagttcatcaaaagagagtcaaaacacagctgaaattataagtcctccatcaccagaccgacctcctcattcacaaacctctggctcctgttattatcatgtcatctcaaaggtccccaggattcgaacacccagttattctccaacacagagatcccctggctgtcgaccgttgccttctgcaggaagtcctaccccaaccactcatgaaatagtcacagtaggtgatcctttactctcctctggacttcgaagcattggctccaggcgtcacagtacctcttccttatcaccccagcggtccaaactccggataatgtctccaatgagaactgggaatacttactctaggaataatgtttcctcagtctccaccaccgggaccgctactgatcttgaatcaagtgccaaagtagttgatcatgtcttagggccactgaattcaagtactagtttagggcaaaacacttccacctcttcaaatttgcaaaggacagtggttactgtaggcaataaaaacagtcacttggatggatcttcatcttcagaaatgaagcagtccagtgcttcagacttggtgtccaagagctcctctttaaagggagagaagaccaaagtgctgagttccaagagctcagagggatctgcacataatgtggcttaccctggaattcctaaactggccccacaggttcataacacaacatctagagaactgaatgttagtaaaatcggctcctttgctgaaccctcttcagtgtcgttttcttctaaagaggccctctccttcccacacctccatttgagagggcaaaggaatgatcgagaccaacacacagattctacccaatcagcaaactcctctccagatgaagatactgaagtcaaaaccttgaagctatctggaatgagcaacagatcatccattatcaacgaacatatgggatctagttccagagataggagacagaaagggaaaaaatcctgtaaagaaactttcaaagaaaagcattccagtaaatcttttttggaacctggtcaggtgacaactggtgaggaaggaaacttgaagccagagtttatggatgaggttttgactcctgagtatatgggccaacgaccatgtaacaatgtttcttctgataagattggtgataaaggcctttctatgccaggagtccccaaagctccacccatgcaagtagaaggatctgccaaggaattacaggcaccacggaaacgcacagtcaaagtgacactgacacctctaaaaatggaaaatgagagtcaatccaaaaatgccctgaaagaaagtagtcctgcttcccctttgcaaatagagtcaacatctcccacagaaccaatttcagcctctgaaaatccaggagatggtccagtggcccaaccaagccccaataatacctcatgccaggattctcaaagtaacaactatcagaatcttccagtacaggacagaaacctaatgcttccagatggccccaaacctcaggaggatggctcttttaaaaggaggtatccccgtcgcagtgcccgtgcacgttctaacatgttttttgggcttaccccactctatggagtaagatcctatggtgaagaagacattccattctacagcagctcaactgggaagaagcgaggcaagagatcagctgaaggacaggtggatggggccgatgacttaagcacttcagatgaagacgacttatactattacaacttcactagaacagtgatttcttcaggtggagaggaacgactggcatcccataatttatttcgggaggaggaacagtgtgatcttccaaaaatctcacagttggatggtgttgatgatgggacagagagtgatactagtgtcacagccacaacaaggaaaagcagccagattccaaaaagaaatggtaaagaaaatggaacagagaacttaaagattgatagacctgaagatgctggggagaaagaacatgtcactaagagttctgttggccacaaaaatgagccaaagatggataactgccattctgtaagcagagttaaaacacagggacaagattccttggaagctcagctcagctcattggagtcaagccgcagagtccacacaagtaccccctccgacaaaaatttactggacacctataatactgagctcctgaaatcagattcagacaataacaacagtgatgactgtgggaatatcctgccttcagacattatggactttgtactaaagaatactccatccatgcaggctttgggtgagagcccagagtcatcttcatcagaactcctgaatcttggtgaaggattgggtcttgacagtaatcgtgaaaaagacatgggtctttttgaagtattttctcagcagctgcctacaacagaacctgtggatagtagtgtctcttcctctatctcagcagaggaacagtttgagttgcctctagagctaccatctgatctgtctgtcttgaccacccggagtcccactgtccccagccagaatcccagtagactagctgttatctcagactcaggggagaagagagtaaccatcacagaaaaatctgtagcctcctctgaaagtgacccagcactgctgagcccaggagtagatccaactcctgaaggccacatgactcctgatcattttatccaaggacacatggatgcagaccacatctctagccctccttgtggttcagtagagcaaggtcatggcaacaatcaggatttaactaggaacagtagcacccctggccttcaggtacctgtttccccaactgttcccatccagaaccagaagtatgtgcccaattctactgatagtcctggcccgtctcagatttccaatgcagctgtccagaccactccaccccacctgaagccagccactgagaaactcatagttgttaaccagaacatgcagccactttatgttctccaaactcttccaaatggagtgacccaaaaaatccaattgacctcttctgttagttctacacccagtgtgatggagacaaatacttcagtattgggacccatgggaggtggtctcacccttaccacaggactaaatccaagcttgccaacttctcaatctttgttcccttctgctagcaaaggattgctacccatgtctcatcaccagcacttacattccttccctgcagctactcaaagtagtttcccaccaaacatcagcaatcctccttcaggcctgcttattggggttcagcctcctccggatccccaacttttggtttcagaatccagccagaggacagacctcagtaccacagtagccactccatcctctggactcaagaaaagacccatatctcgtctacagacccgaaagaataaaaaacttgctccctctagtaccccttcaaacattgccccttctgatgtggtttctaatatgacattgattaacttcacaccctcccagcttcctaatcatccaagtctgttagatttggggtcacttaatacttcatctcaccgaactgtccccaacatcataaaaagatctaaatctagcatcatgtattttgaaccggcacccctgttaccacagagtgtgggaggaactgctgccacagcggcaggcacatcaacaataagccaggatactagccacctcacatcagggtctgtgtctggcttggcatccagttcctctgtcttgaatgttgtatccatgcaaactaccacaacccctacaagtagtgcgtcagttccaggacacgtcaccttaaccaacccaaggttgcttggtaccccagatattggctcaataagcaatcttttaatcaaagctagccagcagagcctggggattcaggaccagcctgtggctttaccgccaagttcaggaatgtttccacaactggggacatcacagaccccctctactgctgcaataacagcggcatctagcatctgtgtgctcccctccactcagactacgggcataacagccgcttcaccttctggggaagcagacgaacactatcagcttcagcatgtgaaccagctccttgccagcaaaactgggattcattcttcccagcgtgatcttgattctgcttcagggccccaggtatccaactttacccagacggtagacgctcctaatagcatgggactggagcagaacaaggctttatcctcagctgtgcaagccagccccacctctcctgggggttctccatcctctccatcttctggacagcggtcagcaagcccttcagtgccgggtcccactaaacccaaaccaaaaaccaaacggtttcagctgcctctagacaaagggaatggcaagaagcacaaagtttcccatttgcggaccagttcttctgaagcacacattccagaccaagaaacgacatccctgacctcaggcacagggactccaggagcagaggctgagcagcaggatacagctagcgtggagcagtcctcccagaaggagtgtgggcaacctgcagggcaagtcgctgttcttccggaagttcaggtgacccaaaatccagcaaatgaacaagaaagtgcaggtatgtgggtgggtaaaaggttagaatcagagaatatcaatgctaaaaggattatgagaatcacccactttacctacttattttctacatttaaaaaaaaaaatctaagctccaaagaagttaagtgatttggcccacattggactgaaacttggcgcacctgtctctcggtgcagtgttcttccagtacatattgtgtgatcacctgtcagctaaggactcaagaccatacccatactcttctgctgtactggttttaccagcactgaggcttaaatagctagtaataacctgacttcactttttagttgttactaaagaaaactaagaaccatttttattagatagtcagattttggttacaataccagatacatctccatggcattttccatcagttctaatgaatttgattaggaaacaaatggtcacttcaagattagagagttctgggtataactctattgaggacagttgcttattgaaaaactatcagatcgtcatactagaaattctaccacagagagcataacttcatgtaaaaaaaaatctggttttagtcaccactttctagcaatgacctaggcaagctctttgagtcttgggtttgttatctataaatgggaataataaaccaactgtggaatgttgttaggcttagagatcatttatgtaaagtactctacatgtagtcagtgctcagtgagcatttgttactgcaaccactatctattttctccctattagaacctaaaacagtggaagaagaggaaagtaatttcagctccccactgatgctttggcttcagcaagaacaaaagcggaaggaaagcattactgagaaaaaacccaagaaaggacttgtttttgaaatttccagtgatgatggctttcagatctgtgcagaaagtattgaagatgcctggaagtcattgacagataaagtccaggaagctcgatcaaatgcccgcctaaagcagctctcatttgcaggtaatggctggaggtgttattccactcctgtctcagaatattatggtaaattgttcgcctaaggcagagttgattctgtgaaaaaaaaatcagttaaaaatttttttcacagctttattgagatttaattcatataccatacagttcacccatctaaagcatacaattcagtggtttttaatatattcagagttgtataaccaccactactctataattctagaacattctcatcatccctaaaagaaaccccctattcattagcagtcattcctcagcccctggccaccacaaatctactttctgtctctatgtatttgattattctggacatttcatataaatgaaatcagaca

SEQ ID NO: 370669 - DNA, 11005 bp, Homo sapiens
ctgcttcacttcacggggcgaacatggcgcacagctgtcggtggcgcttccccgcccgacccgggaccaccgggggcggcggcggcggggggcgccggggcctagggggcgccccgcggcaacgcgtcccggccctgctgcttccccccgggcccccggtcggcggtggcggccccggggcgcccccctcccccccggctgtggcggccgcggcggcggcggcgggaagcagcggggctggggttccagggggagcggccgccgcctcagcagcctcctcgtcgtccgcctcgtcttcgtcttcgtcatcgtcctcagcctcttcagggccggccctgctccgggtgggcccgggcttcgacgcggcgctgcaggtctcggccgccatcggcaccaacctgcgccggttccgggccgtgtttggggagagcggcgggggaggcggcagcggagaggatgagcaattcttaggttttggctcagatgaagaagtcagagtgcgaagtcccacaaggtctccttcagttaaaactagtcctcgaaaacctcgtgggagacctagaagtggctctgaccgaaattcagctatcctctcagatccatctgtgttttcccctctaaataaatcagagaccaaatctggagataagatcaagaagaaagattctaaaagtatagaaaagaagagaggaagacctcccaccttccctggagtaaaaatcaaaataacacatggaaaggacatttcagagttaccaaagggaaacaaagaagatagcctgaaaaaaattaaaaggacaccttctgctacgtttcagcaagccacaaagattaaaaaattaagagcaggtaaactctctcctctcaagtctaagtttaagacagggaagcttcaaataggaaggaagggggtacaaattgtacgacggagaggaaggcctccatcaacagaaaggataaagaccccttcgggtctcctcattaattctgaactggaaaagccccagaaagtccggaaagacaaggaaggaacacctccacttacaaaagaagataagacagttgtcagacaaagccctcgaaggattaagccagttaggattattccttcttcaaaaaggacagatgcaaccattgctaagcaactcttacagagggcaaaaaagggggctcaaaagaaaattgaaaaagaagcagctcagctgcagggaagaaaggtgaagacacaggtcaaaaatattcgacagttcatcatgcctgttgtcagtgctatctcctcgcggatcattaagacccctcggcggtttatagaggatgaggattatgaccctccaattaaaattgcccgattagagtctacaccgaatagtagattcagtgccccgtcctgtggatcttctgaaaaatcaagtgcagcttctcagcactcctctcaaatgtcttcagactcctctcgatctagtagccccagtgttgatacctccacagactctcaggcttctgaggagattcaggtacttcctgaggagcggagcgatacccctgaagttcatcctccactgcccatttcccagtccccagaaaatgagagtaatgataggagaagcagaaggtattcagtgtcggagagaagttttggatctagaacgacgaaaaaattatcaactctacaaagtgccccccagcagcagacctcctcgtctccacctccacctctgctgactccaccgccaccactgcagccagcctccagtatctctgaccacacaccttggcttatgcctccaacaatccccttagcatcaccatttttgcctgcttccactgctcctatgcaagggaagcgaaaatctattttgcgagaaccgacatttaggtggacttctttaaagcattctaggtcagagccacaatacttttcctcagcaaagtatgccaaagaaggtcttattcgcaaaccaatatttgataatttccgaccccctccactaactcccgaggacgttggctttgcatctggtttttctgcatctggtaccgctgcttcagcccgattgttttcgccactccattctggaacaaggtttgatatgcacaaaaggagccctcttctgagagctccaagatttactccaagtgaggctcactctagaatatttgagtctgtaaccttgcctagtaatcgaacttctgctggaacatcttcttcaggagtatccaatagaaaaaggaaaagaaaagtgtttagtcctattcgatctgaaccaagatctccttctcactccatgaggacaagaagtggaaggcttagtagttctgagctctcacctctcacccccccgtcttctgtctcttcctcgttaagcatttctgttagtcctcttgccactagtgccttaaacccaacttttacttttccttctcattccctgactcagtctggggaatctgcagagaaaaatcagagaccaaggaagcagactagtgctccggcagagccattttcatcaagtagtcctactcctctcttcccttggtttaccccaggctctcagactgaaagagggagaaataaagacaaggcccccgaggagctgtccaaagatcgagatgctgacaagagcgtggagaaggacaagagtagagagagagaccgggagagagaaaaggagaataagcgggagtcaaggaaagagaaaaggaaaaagggatcagaaattcagagtagttctgctttgtatcctgtgggtagggtttccaaagagaaggttgttggtgaagatgttgccacttcatcttctgccaaaaaagcaacagggcggaagaagtcttcatcacatgattctgggactgatattacttctgtgactcttggggatacaacagctgtcaaaaccaaaatacttataaagaaagggagaggaaatctggaaaaaaccaacttggacctcggcccaactgccccatccctggagaaggagaaaaccctctgcctttccactccttcatctagcactgttaaacattccacttcctccataggctccatgttggctcaggcagacaagcttccaatgactgacaagagggttgccagcctcctaaaaaaggccaaagctcagctctgcaagattgagaagagtaagagtcttaaacaaaccgaccagcccaaagcacagggtcaagaaagtgactcatcagagacctctgtgcgaggaccccggattaaacatgtctgcagaagagcagctgttgcccttggccgaaaacgagctgtgtttcctgatgacatgcccaccctgagtgccttaccatgggaagaacgagaaaagattttgtcttccatggggaatgatgacaagtcatcaattgctggctcagaagatgctgaacctcttgctccacccatcaaaccaattaaacctgtcactagaaacaaggcaccccaggaacctccagtaaagaaaggacgtcgatcgaggcggtgtgggcagtgtcccggctgccaggtgcctgaggactgtggtgtttgtactaattgcttagataagcccaagtttggtggtcgcaatataaagaagcagtgctgcaagatgagaaaatgtcagaatctacaatggatgccttccaaagcctacctgcagaagcaagctaaagctgtgaaaaagaaagagaaaaagtctaagaccagtgaaaagaaagacagcaaagagagcagtgttgtgaagaacgtggtggactctagtcagaaacctaccccatcagcaagagaggatcctgccccaaagaaaagcagtagtgagcctcctccacgaaagcccgtcgaggaaaagagtgaagaagggaatgtctcggcccctgggcctgaatccaaacaggccaccactccagcttccaggaagtcaagcaagcaggtctcccagccagcagtggtcatcccgcctcagccacctactacaggaccgccaagaaaagaagttcccaaaaccactcctagtgagcccaagaaaaagcagcctccaccaccagaatcaggtccagagcagagcaaacagaaaaaagtggctccccgcccaagtatccctgtaaaacaaaaaccaaaagaaaaggaaaaaccacctccggtcaataagcaggagaatgcaggcactttgaacatcctcagcactctctccaatggcaatagttctaagcaaaaaattccagcagatggagtccacaggatcagagtggactttaaggaggattgtgaagcagaaaatgtgtgggagatgggaggcttaggaatcttgacttctgttcctataacacccagggtggtttgctttctctgtgccagtagtgggcatgtagagtttgtgtattgccaagtctgttgtgagcccttccacaagttttgtttagaggagaacgagcgccctctggaggaccagctggaaaattggtgttgtcgtcgttgcaaattctgtcacgtttgtggaaggcaacatcaggctacaaagcagctgctggagtgtaataagtgccgaaacagctatcaccctgagtgcctgggaccaaactaccccaccaaacccacaaagaagaagaaagtctggatctgtaccaagtgtgttcgctgtaagagctgtggatccacaactccaggcaaagggtgggatgcacagtggtctcatgatttctcactgtgtcatgattgcgccaagctctttgctaaaggaaacttctgccctctctgtgacaaatgttatgatgatgatgactatgagagtaagatgatgcaatgtggaaagtgtgatcgctgggtccattccaaatgtgagaatctttcagatgagatgtatgagattctatctaatctgccagaaagtgtggcctacacttgtgtgaactgtactgagcggcaccctgcagagtggcgactggcccttgaaaaagagctgcagatttctctgaagcaagttctgacagctttgttgaattctcggactaccagccatttgctacgctaccggcaggctgccaagcctccagacttaaatcccgagacagaggagagtataccttcccgcagctcccccgaaggacctgatccaccagttcttactgaggtcagcaaacaggatgatcagcagcctttagatctagaaggagtcaagaggaagatggaccaagggaattacacatctgtgttggagttcagtgatgatattgtgaagatcattcaagcagccattaattcagatggaggacagccagaaattaaaaaagccaacagcatggtcaagtccttcttcattcggcaaatggaacgtgtttttccatggttcagtgtcaaaaagtccaggttttgggagccaaataaagtatcaagcaacagtgggatgttaccaaacgcagtgcttccaccttcacttgaccataattatgctcagtggcaggagcgagaggaaaacagccacactgagcagcctcctttaatgaagaaaatcattccagctcccaaacccaaaggtcctggagaaccagactcaccaactcctctgcatcctcctacaccaccaattttgagtactgataggagtcgagaagacagtccagagctgaacccacccccaggcatagaagacaatagacagtgtgcgttatgtttgacttatggtgatgacagtgctaatgatgctggtcgtttactatatattggccaaaatgagtggacacatgtaaattgtgctttgtggtcagcggaagtgtttgaagatgatgacggatcactaaagaatgtgcatatggctgtgatcaggggcaagcagctgagatgtgaattctgccaaaagccaggagccaccgtgggttgctgtctcacatcctgcaccagcaactatcacttcatgtgttcccgagccaagaactgtgtctttctggatgataaaaaagtatattgccaacgacatcgggatttgatcaaaggcgaagtggttcctgagaatggatttgaagttttcagaagagtgtttgtggactttgaaggaatcagcttgagaaggaagtttctcaatggcttggaaccagaaaatatccacatgatgattgggtctatgacaatcgactgcttaggaattctaaatgatctctccgactgtgaagataagctctttcctattggatatcagtgttccagggtatactggagcaccacagatgctcgcaagcgctgtgtatatacatgcaagatagtggagtgccgtcctccagtcgtagagccggatatcaacagcactgttgaacatgatgaaaacaggaccattgcccatagtccaacatcttttacagaaagttcatcaaaagagagtcaaaacacagctgaaattataagtcctccatcaccagaccgacctcctcattcacaaacctctggctcctgttattatcatgtcatctcaaaggtccccaggattcgaacacccagttattctccaacacagagatcccctggctgtcgaccgttgccttctgcaggaagtcctaccccaaccactcatgaaatagtcacagtaggtgatcctttactctcctctggacttcgaagcattggctccaggcgtcacagtacctcttccttatcaccccagcggtccaaactccggataatgtctccaatgagaactgggaatacttactctaggaataatgtttcctcagtctccaccaccgggaccgctactgatcttgaatcaagtgccaaagtagttgatcatgtcttagggccactgaattcaagtactagtttagggcaaaacacttccacctcttcaaatttgcaaaggacagtggttactgtaggcaataaaaacagtcacttggatggatcttcatcttcagaaatgaagcagtccagtgcttcagacttggtgtccaagagctcctctttaaagggagagaagaccaaagtgctgagttccaagagctcagagggatctgcacataatgtggcttaccctggaattcctaaactggccccacaggttcataacacaacatctagagaactgaatgttagtaaaatcggctcctttgctgaaccctcttcagtgtcgttttcttctaaagaggccctctccttcccacacctccatttgagagggcaaaggaatgatcgagaccaacacacagattctacccaatcagcaaactcctctccagatgaagatactgaagtcaaaaccttgaagctatctggaatgagcaacagatcatccattatcaacgaacatatgggatctagttccagagataggagacagaaagggaaaaaatcctgtaaagaaactttcaaagaaaagcattccagtaaatcttttttggaacctggtcaggtgacaactggtgaggaaggaaacttgaagccagagtttatggatgaggttttgactcctgagtatatgggccaacgaccatgtaacaatgtttcttctgataagattggtgataaaggcctttctatgccaggagtccccaaagctccacccatgcaagtagaaggatctgccaaggaattacaggcaccacggaaacgcacagtcaaagtgacactgacacctctaaaaatggaaaatgagagtcaatccaaaaatgccctgaaagaaagtagtcctgcttcccctttgcaaatagagtcaacatctcccacagaaccaatttcagcctctgaaaatccaggagatggtccagtggcccaaccaagccccaataatacctcatgccaggattctcaaagtaacaactatcagaatcttccagtacaggacagaaacctaatgcttccagatggccccaaacctcaggaggatggctcttttaaaaggaggtatccccgtcgcagtgcccgtgcacgttctaacatgttttttgggcttaccccactctatggagtaagatcctatggtgaagaagacattccattctacagcagctcaactgggaagaagcgaggcaagagatcagctgaaggacaggtggatggggccgatgacttaagcacttcagatgaagacgacttatactattacaacttcactagaacagtgatttcttcaggtggagaggaacgactggcatcccataatttatttcgggaggaggaacagtgtgatcttccaaaaatctcacagttggatggtgttgatgatgggacagagagtgatactagtgtcacagccacaacaaggaaaagcagccagattccaaaaagaaatggtaaagaaaatggaacagagaacttaaagattgatagacctgaagatgctggggagaaagaacatgtcactaagagttctgttggccacaaaaatgagccaaagatggataactgccattctgtaagcagagttaaaacacagggacaagattccttggaagctcagctcagctcattggagtcaagccgcagagtccacacaagtaccccctccgacaaaaatttactggacacctataatactgagctcctgaaatcagattcagacaataacaacagtgatgactgtgggaatatcctgccttcagacattatggactttgtactaaagaatactccatccatgcaggctttgggtgagagcccagagtcatcttcatcagaactcctgaatcttggtgaaggattgggtcttgacagtaatcgtgaaaaagacatgggtctttttgaagtattttctcagcagctgcctacaacagaacctgtggatagtagtgtctcttcctctatctcagcagaggaacagtttgagttgcctctagagctaccatctgatctgtctgtcttgaccacccggagtcccactgtccccagccagaatcccagtagactagctgttatctcagactcaggggagaagagagtaaccatcacagaaaaatctgtagcctcctctgaaagtgacccagcactgctgagcccaggagtagatccaactcctgaaggccacatgactcctgatcattttatccaaggacacatggatgcagaccacatctctagccctccttgtggttcagtagagcaaggtcatggcaacaatcaggatttaactaggaacagtagcacccctggccttcaggtacctgtttccccaactgttcccatccagaaccagaagtatgtgcccaattctactgatagtcctggcccgtctcagatttccaatgcagctgtccagaccactccaccccacctgaagccagccactgagaaactcatagttgttaaccagaacatgcagccactttatgttctccaaactcttccaaatggagtgacccaaaaaatccaattgacctcttctgttagttctacacccagtgtgatggagacaaatacttcagtattgggacccatgggaggtggtctcacccttaccacaggactaaatccaagcttgccaacttctcaatctttgttcccttctgctagcaaaggattgctacccatgtctcatcaccagcacttacattccttccctgcagctactcaaagtagtttcccaccaaacatcagcaatcctccttcaggcctgcttattggggttcagcctcctccggatccccaacttttggtttcagaatccagccagaggacagacctcagtaccacagtagccactccatcctctggactcaagaaaagacccatatctcgtctacagacccgaaagaataaaaaacttgctccctctagtaccccttcaaacattgccccttctgatgtggtttctaatatgacattgattaacttcacaccctcccagcttcctaatcatccaagtctgttagatttggggtcacttaatacttcatctcaccgaactgtccccaacatcataaaaagatctaaatctagcatcatgtattttgaaccggcacccctgttaccacagagtgtgggaggaactgctgccacagcggcaggcacatcaacaataagccaggatactagccacctcacatcagggtctgtgtctggcttggcatccagttcctctgtcttgaatgttgtatccatgcaaactaccacaacccctacaagtagtgcgtcagttccaggacacgtcaccttaaccaacccaaggttgcttggtaccccagatattggctcaataagcaatcttttaatcaaagctagccagcagagcctggggattcaggaccagcctgtggctttaccgccaagttcaggaatgtttccacaactggggacatcacagaccccctctactgctgcaataacagcggcatctagcatctgtgtgctcccctccactcagactacgggcataacagccgcttcaccttctggggaagcagacgaacactatcagcttcagcatgtgaaccagctccttgccagcaaaactgggattcattcttcccagcgtgatcttgattctgcttcagggccccaggtatccaactttacccagacggtagacgctcctaatagcatgggactggagcagaacaaggctttatcctcagctgtgcaagccagccccacctctcctgggggttctccatcctctccatcttctggacagcggtcagcaagcccttcagtgccgggtcccactaaacccaaaccaaaaaccaaacggtttcagctgcctctagacaaagggaatggcaagaagcacaaagtttcccatttgcggaccagttcttctgaagcacacattccagaccaagaaacgacatccctgacctcaggcacagggactccaggagcagaggctgagcagcaggatacagctagcgtggagcagtcctcccagaaggagtgtgggcaacctgcagggtaagctgaagaattcgtcttttaagactaagctctcagttttgtccacctcatttaaaaaatagttcttccaggccgggcgcagtggctcacgcctgtaatcctagtagtctgggaggccgaggcaggtggatcacgaggttagatcgagaccat

SEQ ID NO: 370670 - DNA, 4293 bp, Homo sapiens
acccaactccagtgggccactcccctccttcccctattgaagctccacattaaacaacaaaaagtacaccttcgtggggaagtggacaggagccattggtcataaccagacagaatttggaaacattttcataaagctccatggagagttttaaagaaacatatgtagcatgattttgtaggagaggaaaaagattatttaaataggatttaaatcatgcaacaacgagagtatcacagccaggatgacccttgggtcccattcctaagacatggttactttattttccccttgttaagacataggaagacttaatttttaaacggtcagtgtccagttgaaggcagaacactaatcagatttcaaggcccacaacttggggactagaccaccttatgttgagggaactctgccacctgcgtgcaacccacagctaaagtaaattcaatgacactactgccctgattactccttaggatgtggtcaaaacagcatcaaatgtttcttctcttcctttccccaagacagagtcctgaacctgttaaattaagtcattggattttactctgttctgtttacagtttactatttaaggttttataaatgtaaatatattttgtatatttttctatgagaagcacttcatagggagaagcacttatgacaaggctattttttaaaccgcggtattatcctaatttaaaagaagatcggtttttaataattttttattttcataggatgaagttagagaaaatattcagctgtacacacaaagtctggtttttcctgcccaacttccccctggaaggtgtactttttgttgtttaatgtgtagcttgtttgtgccctgttgacataaatgtttcctgggtttgctctttgacaataaatggagaaggaaggtcacccaactccattgggccactcccctccttcccctattgaagctcctcaaaaggctacagtaatatcttgatacaacagattctcttctttcccgcctctctcctttccggcgcaacttccagagtggtgggagacggcaatctttacatttccctcatctttcttacttcagagttagcaaacaacaagttgaatggcaacttgacatttttgcatcaccatctgcctcataggccactctttcctttccctctgcccaccaagtcctcatatctgcagagaacccattgatcaccttgtgccctcttttggggcagcctgttgaaactgaagcacagtctgaccactcacgataaagcagatttttctctgcctctgccacaaggtttcagagtagtgtagtccaagtagagggtggggcacccttttctcgccgcaagaagcccattcctatggaagtctagcaaagcaatacgactcagcccagcactctctgccccaggactcatggctctgctgtgccttccatcctgggctcccttctctcctgtgaccttaagaactttgtctggtggctttgctggaacattgtcactgttttcactgtcatgcagggagcccagcactgtggccaggatggcagagacttccttgtcatcatggagaagtgccagcaggggactgggaaaagcactctacccagacctcacctcccttcctccttttgcccatgaacaagatgcagtggccctaggggttccactagtgtctgctttcctttattattgcactgtgtgaggtttttttgtaaatccttgtattcctattttttttaaagaaaaaaaaaaaaccttaagctgcatttgttactgaaatgattaatgcactgatgggtcctgaattcaccttgagaaagacccaaaggccagtcagggggtggggggaactcagctaaatagacctagttactgccctgctaggccatgctgtactgtgagcccctcctcactctctaccaaccctaaaccctgaggacaggggaggaacccacagcttccttctcctgccagctgcagatggtttgccttgcctttccaccccctaattgtcaaccacaaaaatgagaaattcctcttctagctcagccttgagtccattgccaaattttcagcacacctgccagcaacttgggggaataagcgaaggtttccctacaagagggaaagaaggcaaaaacggcacagctatctccaaacacatctgagttcatttcaaaagtgaccaagggaatctccgcacaaaagtgcagattgaggaattgtgatgggtcattcccaagaatcccccaaggggcatcccaaatccctgaggagtaacagctgcaaacctggtcagttctcagtgagagccagctcacttatagctttgctgctagaacctgttgtggctgcatttcctggtggccagtgacaactgtgtaaccagaatagctgcatggcgctgaccctttggccggaacttggtctcttggctccctccttggccacccaccacctctcgcacagcccctctgtttttacaccaataacaagaattaagggggaagccctggcagctatacgttttcaaccagactcctttgccgggacccagcccgccaccctgctcgcctccgtcaaacccccggccaatgcagtgagcaccatgtagctcccttgatttaaaaaaaataaaaaataaaaaaaaaaggaaaaaaaaatacaacacacacacaaaaataaaaaaaatattctaatgaatgtatctttctaaaggactgacgttcaatcaaatatctgaaaatactaaaggtcaaaaccttgtcagatgttaacttctaagttcggtttgggattttttttttttaatagaaatcaagttgtttttgtttttaaggaaaagcgggtcattgcaaagggctgggtgtaattttatgtttcatttccttcattttaaagcaatacaaggttatggagcagatggttttgtgccgaatcatgaatactagtcaagtcacacactctggaaacttgcaactttttgtttgttttggttttcaaataaatataaatatgatatatataggaactaatatagtaatgcaccatgtaacaaagcctagttcagtccatggcttttaattctcttaacactatagataaggattgtgttacagttgctagtagcggcaggaagatgtcaggctcactttcctctgattcccgaaatggggggaacctctaaccataaaggaatggtagaacagtccattcctcggatcagagaaaaatgcagacatggtgtcacctggatttttttctgcccatgaatgttgccagtcagtacctgtcctccttgtttctctatttttggttatgaatgttggggttaccacctgcatttaggggaaaattgtgttctgtgctttcctggtatcttgttccgaggtactctagttctgtctttcaaccaagaaaatagaattgtggtgtttcttttattgaacttttaacagtctctttagtaaatacaggtagttgaataattgtttcaagagctcaacagatgacaagcttcttttctagaaataagacattttttgacaactttatcatgtataacagatctgttttttttccttgtgttcttccaagcttctggttagagaaaaagagaaaaaaaaaaaaggaaaatgtgtctaaagtccatcagtgttaactccctgtgacagggatgaaggaaaatactttaatagttcaaaaaataataatgctgaaagctctctacgaaagactgaatgtaaaagtaaaaagtgtacatagttgtaaaaaaaaggagtttttaaacatgtttattttctatgcacttttttttatttaagtgatagtttaattaataaacatgtcaagtttattgctgcacatggttaagcttccttttggctttggttggagagggtggagaaaagcgggaggggcatggcctgtgacctggtcacaaagtaccttccacagtcctttactttaaggtggcatcactaaattattccctgtagcccaccttcaggtccactccacactggctctcttgactattttcttcctttattcatcagtgatgtatgttcaggacctaattaattgtggatatgaggcagggtcaagaggacaaaggaacagggcctttaccttctacatagctcccctgtttcatccaaggaggttaagtattgatttttatcggttttctcaactgtgaatataataaactgaaagcatttcagggagaagctggagaacaccttctctagctgcactccaccttaaggctgaagctggatttgtt

SEQ ID NO: 370671 - DNA, 5582 bp, Homo sapiens
  misc_feature (4696)..(4696): n is a, c, g, or t
  misc_feature (4705)..(4705): n is a, c, g, or t
ctgcttcacttcacggggcgaacatggcgcacagctgtcggtggcgcttccccgcccgacccgggaccaccgggggcggcggcggcggggggcgccggggcctagggggcgccccgcggcaacgcgtcccggccctgctgcttccccccgggcccccggtcggcggtggcggccccggggcgcccccctcccccccggctgtggcggccgcggcggcggcggcgggaagcagcggggctggggttccagggggagcggccgccgcctcagcagcctcctcgtcgtccgcctcgtcttcgtcttcgtcatcgtcctcagcctcttcagggccggccctgctccgggtgggcccgggcttcgacgcggcgctgcaggtctcggccgccatcggcaccaacctgcgccggttccgggccgtgtttggggagagcggcgggggaggcggcagcggagaggatgagcaattcttaggttttggctcagatgaagaagtcagagtgcgaagtcccacaaggtctccttcagttaaaactagtcctcgaaaacctcgtgggagacctagaagtggctctgaccgaaattcagctatcctctcagatccatctgtgttttcccctctaaataaatcagagaccaaatctggagataagatcaagaagaaagattctaaaagtatagaaaagaagagaggaagacctcccaccttccctggagtaaaaatcaaaataacacatggaaaggacatttcagagttaccaaagggaaacaaagaagatagcctgaaaaaaattaaaaggacaccttctgctacgtttcagcaagccacaaagattaaaaaattaagagcaggtaaactctctcctctcaagtctaagtttaagacagggaagcttcaaataggaaggaagggggtacaaattgtacgacggagaggaaggcctccatcaacagaaaggataaagaccccttcgggtctcctcattaattctgaactggaaaagccccagaaagtccggaaagacaaggaaggaacacctccacttacaaaagaagataagacagttgtcagacaaagccctcgaaggattaagccagttaggattattccttcttcaaaaaggacagatgcaaccattgctaagcaactcttacagagggcaaaaaagggggctcaaaagaaaattgaaaaagaagcagctcagctgcagggaagaaaggtgaagacacaggtcaaaaatattcgacagttcatcatgcctgttgtcagtgctatctcctcgcggatcattaagacccctcggcggtttatagaggatgaggattatgaccctccaattaaaattgcccgattagagtctacaccgaatagtagattcagtgccccgtcctgtggatcttctgaaaaatcaagtgcagcttctcagcactcctctcaaatgtcttcagactcctctcgatctagtagccccagtgttgatacctccacagactctcaggcttctgaggagattcaggtacttcctgaggagcggagcgatacccctgaagttcatcctccactgcccatttcccagtccccagaaaatgagagtaatgataggagaagcagaaggtattcagtgtcggagagaagttttggatctagaacgacgaaaaaattatcaactctacaaagtgccccccagcagcagacctcctcgtctccacctccacctctgctgactccaccgccaccactgcagccagcctccagtatctctgaccacacaccttggcttatgcctccaacaatccccttagcatcaccatttttgcctgcttccactgctcctatgcaagggaagcgaaaatctattttgcgagaaccgacatttaggtggacttctttaaagcattctaggtcagagccacaatacttttcctcagcaaagtatgccaaagaaggtcttattcgcaaaccaatatttgataatttccgaccccctccactaactcccgaggacgttggctttgcatctggtttttctgcatctggtaccgctgcttcagcccgattgttttcgccactccattctggaacaaggtttgatatgcacaaaaggagccctcttctgagagctccaagatttactccaagtgaggctcactctagaatatttgagtctgtaaccttgcctagtaatcgaacttctgctggaacatcttcttcaggagtatccaatagaaaaaggaaaagaaaagtgtttagtcctattcgatctgaaccaagatctccttctcactccatgaggacaagaagtggaaggcttagtagttctgagctctcacctctcacccccccgtcttctgtctcttcctcgttaagcatttctgttagtcctcttgccactagtgccttaaacccaacttttacttttccttctcattccctgactcagtctggggaatctgcagagaaaaatcagagaccaaggaagcagactagtgctccggcagagccattttcatcaagtagtcctactcctctcttcccttggtttaccccaggctctcagactgaaagagggagaaataaagacaaggcccccgaggagctgtccaaagatcgagatgctgacaagagcgtggagaaggacaagagtagagagagagaccgggagagagaaaaggagaataagcgggagtcaaggaaagagaaaaggaaaaagggatcagaaattcagagtagttctgctttgtatcctgtgggtagggtttccaaagagaaggttgttggtgaagatgttgccacttcatcttctgccaaaaaagcaacagggcggaagaagtcttcatcacatgattctgggactgatattacttctgtgactcttggggatacaacagctgtcaaaaccaaaatacttataaagaaagggagaggaaatctggaaaaaaccaacttggacctcggcccaactgccccatccctggagaaggagaaaaccctctgcctttccactccttcatctagcactgttaaacattccacttcctccataggctccatgttggctcaggcagacaagcttccaatgactgacaagagggttgccagcctcctaaaaaaggccaaagctcagctctgcaagattgagaagagtaagagtcttaaacaaaccgaccagcccaaagcacagggtcaagaaagtgactcatcagagacctctgtgcgaggaccccggattaaacatgtctgcagaagagcagctgttgcccttggccgaaaacgagctgtgtttcctgatgacatgcccaccctgagtgccttaccatgggaagaacgagaaaagattttgtcttccatggggaatgatgacaagtcatcaattgctggctcagaagatgctgaacctcttgctccacccatcaaaccaattaaacctgtcactagaaacaaggcaccccaggaacctccagtaaagaaaggacgtcgatcgaggcggtgtgggcagtgtcccggctgccaggtgcctgaggactgtggtgtttgtactaattgcttagataagcccaagtttggtggtcgcaatataaagaagcagtgctgcaagatgagaaaatgtcagaatctacaatggatgccttccaaagcctacctgcagaagcaagctaaagctgtgaaaaagaaagagaaaaagtctaagaccagtgaaaagaaagacagcaaagagagcagtgttgtgaagaacgtggtggactctagtcagaaacctaccccatcagcaagagaggatcctgccccaaagaaaagcagtagtgagcctcctccacgaaagcccgtcgaggaaaagagtgaagaagggaatgtctcggcccctgggcctgaatccaaacaggccaccactccagcttccaggaagtcaagcaagcaggtctcccagccagcagtggtcatcccgcctcagccacctactacaggaccgccaagaaaagaagttcccaaaaccactcctagtgagcccaagaaaaagcagcctccaccaccagaatcaggtccagagcagagcaaacagaaaaaagtggctccccgcccaagtatccctgtaaaacaaaaaccaaaagaaaaggaaaaaccacctccggtcaataagcaggagaatgcaggcactttgaacatcctcagcactctctccaatggcaatagttctaagcaaaaaattccagcagatggagtccacaggatcagagtggactttaaggaggattgtgaagcagaaaatgtgtgggagatgggaggcttaggaatcttgacttctgttcctataacacccagggtggtttgctttctctgtgccagtagtgggcatgtagagctggagaatgctggaggagaccttaaggatggccaccaccactatgaaggagctgttgtcattctggatgctggtgctcagtacgggaaagtcatagaccgaagagtgagggaactgttcgtgcagtctgaaattttccccttggaaacaccagcatttgctataaaggaacaaggattccgtgctattatcatctctggaggacctaattctgtgtatgctgaagatgctccctggtttgatccagcaatattcactattggcaagcctgttcttggaatttgctatggtatgcagatgatgaataaggtatttggaggtactgtgcacaaaaaaagtgncagagaagntggagttttcaacattagtgtggataatacatgttcattattcaggggccttcagaaggaagaagttgttttgcttacacatggagatagtgtagacaaagtagctgatggattcaaggttgtggcacgttctggaaacatagtagcaggcatagcaaatgaatctaaaaagttatatggagcacagttccaccctgaagttggccttacagaaaatggaaaagtaatactgaagaatttcctttatgatatagctggatgcagtggaaccttcaccgtgcagaacagagaacttgagtgtattcgagagatcaaagagagagtaggcacgtcaaaagttttggttttactcagtggtggagtagactcaacagtttgtacagctttgctaaatcgtgctttgaaccaagaacaagtcattgctgtgcacattgataatggctttatgagaaaacgagaaagccagtctgttgaagaggccctcaaaaagcttggaattcaggtcaaagtgataaatgctgctcattctttctacaatggaacaacaaccctaccaatatcagatgaagatagaaccccacggaaaagaattagcaaaacgttaaatatgaccacaagtcctgaagagaaaagaaaaatcattggggatacttttgttaagattgccaatgaagtaattggagaaatgaacttgaaaccagaggaggttttccttgcccaaggtactttacggcctgatctaattgaaagtgcatcccttgttgcaagtggcaaagctgaactcatcaaaacccatcacaatgacacagaagctggagtggtggcctgtttggattcaggcccaggggccgagacattcccttcttcactcttttcc

SEQ ID NO: 370672 - DNA, 6947 bp, Homo sapiens
ctgcttcacttcacggggcgaacatggcgcacagctgtcggtggcgcttccccgcccgacccgggaccaccgggggcggcggcggcggggggcgccggggcctagggggcgccccgcggcaacgcgtcccggccctgctgcttccccccgggcccccggtcggcggtggcggccccggggcgcccccctcccccccggctgtggcggccgcggcggcggcggcgggaagcagcggggctggggttccagggggagcggccgccgcctcagcagcctcctcgtcgtccgcctcgtcttcgtcttcgtcatcgtcctcagcctcttcagggccggccctgctccgggtgggcccgggcttcgacgcggcgctgcaggtctcggccgccatcggcaccaacctgcgccggttccgggccgtgtttggggagagcggcgggggaggcggcagcggagaggatgagcaattcttaggttttggctcagatgaagaagtcagagtgcgaagtcccacaaggtctccttcagttaaaactagtcctcgaaaacctcgtgggagacctagaagtggctctgaccgaaattcagctatcctctcagatccatctgtgttttcccctctaaataaatcagagaccaaatctggagataagatcaagaagaaagattctaaaagtatagaaaagaagagaggaagacctcccaccttccctggagtaaaaatcaaaataacacatggaaaggacatttcagagttaccaaagggaaacaaagaagatagcctgaaaaaaattaaaaggacaccttctgctacgtttcagcaagccacaaagattaaaaaattaagagcaggtaaactctctcctctcaagtctaagtttaagacagggaagcttcaaataggaaggaagggggtacaaattgtacgacggagaggaaggcctccatcaacagaaaggataaagaccccttcgggtctcctcattaattctgaactggaaaagccccagaaagtccggaaagacaaggaaggaacacctccacttacaaaagaagataagacagttgtcagacaaagccctcgaaggattaagccagttaggattattccttcttcaaaaaggacagatgcaaccattgctaagcaactcttacagagggcaaaaaagggggctcaaaagaaaattgaaaaagaagcagctcagctgcagggaagaaaggtgaagacacaggtcaaaaatattcgacagttcatcatgcctgttgtcagtgctatctcctcgcggatcattaagacccctcggcggtttatagaggatgaggattatgaccctccaattaaaattgcccgattagagtctacaccgaatagtagattcagtgccccgtcctgtggatcttctgaaaaatcaagtgcagcttctcagcactcctctcaaatgtcttcagactcctctcgatctagtagccccagtgttgatacctccacagactctcaggcttctgaggagattcaggtacttcctgaggagcggagcgatacccctgaagttcatcctccactgcccatttcccagtccccagaaaatgagagtaatgataggagaagcagaaggtattcagtgtcggagagaagttttggatctagaacgacgaaaaaattatcaactctacaaagtgccccccagcagcagacctcctcgtctccacctccacctctgctgactccaccgccaccactgcagccagcctccagtatctctgaccacacaccttggcttatgcctccaacaatccccttagcatcaccatttttgcctgcttccactgctcctatgcaagggaagcgaaaatctattttgcgagaaccgacatttaggtggacttctttaaagcattctaggtcagagccacaatacttttcctcagcaaagtatgccaaagaaggtcttattcgcaaaccaatatttgataatttccgaccccctccactaactcccgaggacgttggctttgcatctggtttttctgcatctggtaccgctgcttcagcccgattgttttcgccactccattctggaacaaggtttgatatgcacaaaaggagccctcttctgagagctccaagatttactccaagtgaggctcactctagaatatttgagtctgtaaccttgcctagtaatcgaacttctgctggaacatcttcttcaggagtatccaatagaaaaaggaaaagaaaagtgtttagtcctattcgatctgaaccaagatctccttctcactccatgaggacaagaagtggaaggcttagtagttctgagctctcacctctcacccccccgtcttctgtctcttcctcgttaagcatttctgttagtcctcttgccactagtgccttaaacccaacttttacttttccttctcattccctgactcagtctggggaatctgcagagaaaaatcagagaccaaggaagcagactagtgctccggcagagccattttcatcaagtagtcctactcctctcttcccttggtttaccccaggctctcagactgaaagagggagaaataaagacaaggcccccgaggagctgtccaaagatcgagatgctgacaagagcgtggagaaggacaagagtagagagagagaccgggagagagaaaaggagaataagcgggagtcaaggaaagagaaaaggaaaaagggatcagaaattcagagtagttctgctttgtatcctgtgggtagggtttccaaagagaaggttgttggtgaagatgttgccacttcatcttctgccaaaaaagcaacagggcggaagaagtcttcatcacatgattctgggactgatattacttctgtgactcttggggatacaacagctgtcaaaaccaaaatacttataaagaaagggagaggaaatctggaaaaaaccaacttggacctcggcccaactgccccatccctggagaaggagaaaaccctctgcctttccactccttcatctagcactgttaaacattccacttcctccataggctccatgttggctcaggcagacaagcttccaatgactgacaagagggttgccagcctcctaaaaaaggccaaagctcagctctgcaagattgagaagagtaagagtcttaaacaaaccgaccagcccaaagcacagggtcaagaaagtgactcatcagagacctctgtgcgaggaccccggattaaacatgtctgcagaagagcagctgttgcccttggccgaaaacgagctgtgtttcctgatgacatgcccaccctgagtgccttaccatgggaagaacgagaaaagattttgtcttccatggggaatgatgacaagtcatcaattgctggctcagaagatgctgaacctcttgctccacccatcaaaccaattaaacctgtcactagaaacaaggcaccccaggaacctccagtaaagaaaggacgtcgatcgaggcggtgtgggcagtgtcccggctgccaggtgcctgaggactgtggtgtttgtactaattgcttagataagcccaagtttggtggtcgcaatataaagaagcagtgctgcaagatgagaaaatgtcagaatctacaatggatgccttccaaagcctacctgcagaagcaagctaaagctgtgaaaaagaaagagaaaaagtctaagaccagtgaaaagaaagacagcaaagagagcagtgttgtgaagaacgtggtggactctagtcagaaacctaccccatcagcaagagaggatcctgccccaaagaaaagcagtagtgagcctcctccacgaaagcccgtcgaggaaaagagtgaagaagggaatgtctcggcccctgggcctgaatccaaacaggccaccactccagcttccaggaagtcaagcaagcaggtctcccagccagcagtggtcatcccgcctcagccacctactacaggaccgccaagaaaagaagttcccaaaaccactcctagtgagcccaagaaaaagcagcctccaccaccagaatcaggtccagagcagagcaaacagaaaaaagtggctccccgcccaagtatccctgtaaaacaaaaaccaaaagaaaaggaaaaaccacctccggtcaataagcaggagaatgcaggcactttgaacatcctcagcactctctccaatggcaatagttctaagcaaaaaattccagcagatggagtccacaggatcagagtggactttaaggaggattgtgaagcagaaaatgtgtgggagatgggaggcttaggaatcttgacttctgttcctataacacccagggtggtttgctttctctgtgccagtagtgggcatgtagagacctactccaatgaagtccattgtgttgaagagattctgaaggaaatgacccattcatggccgcctcctttgacagcaatacatacgcctagtacagctgagccatccaagtttcctttccctacaaaggactctcagcatgtcagttctgtaacccaaaaccaaaaacaatatgatacatcttcaaaaactcactcaaattctcagcaaggaacgtcatccatgctcgaagacgaccttcagctcagtgacagtgaggacagtgacagtgaacaaaccccagagaagcctccctcctcatctgcacctccaagtgctccacagtcccttccagaaccagtggcatcagcacattccagcagtgcagagtcagaaagcaccagtgactcagacagttcctcagactcagagagcgagagcagttcaagtgacagcgaagaaaatgagcccctagaaaccccagctccggagcctgagcctccaacaacaaacaaatggcagctggacaactggctgaccaaagtcagcagccagctgcgccaccagagggccccaggagcacagagcccccacggcggcacccagagagtaagggcagcagcgacagtgccacgagtcaggagcattctgaatccaaagatcctccccctaaaagctccagcaaagcccccgcgcccacccgaagccccccaccccggaaagaggagctgtcagaagtctccggcacagcaggagcccccacaaaggcaaaccgttggaaccaaacaacccaaaaaacctgtcaaggcctctgcccgggcaggttcacggaccagcctgcagggggaaagggagccagggcttcttccctatggctcccgagaccagacttccaaagacaagcccaaggtgaagacgaaaggacggccccgggccgcagcaagcaacgaacccaagccagcagtgcccccctccagtgagaagaagaagcacaagagctccctccctgccccctctaaggctctctcaggcccagaacccgcgaaggacaatgtggaggacaggacccctgagcactttgctcttgttcccctgactgagagccagggcccaccccacagtggcagcagcagcaggactagtggctgccgccaagccgtggtggtccaggaggacagccgcaaagacagactcccattgcctttgagagacaccaagctgctctcaccgctcagggacactcctcccccacaaagcttgatggtgaagatcaccctagacctgctctctcggataccccagcctcccgggaaggggagccgccagaggaaagcagaagataaacagccgcccgcagggaagaagcacagctctgagaagaggagctcagacagctcaagcaagttggccaaaaagagaaagggtgaagcagaaagagactgtgataacaagaaaatcagactggagaaggaaatcaaatcacagtcatcttcatcttcatcctcccacaaagaatcttctaaaacaaagccctccaggccctcctcacagtcctcaaagaaggaaatgctccccccgccacccgtgtcctcgtcctcccagaagccagccaagcctgcacttaagaggtcaaggcgggaagcagacacctgtggccaggaccctcccaaaagtgccagcagtaccaagagcaaccacaaagactcttccattcccaagcagagaagagtagaggggaagggctccagaagctcctcggagcacaagggttcttccggagatactgcaaatccttttccagtgccttctttgccaaatggtaactctaaaccagggaagcctcaagtgaagtttgacaaacaacaagcagaccttcacatgagggaggaaaaaaagatgaagcagaaagcagagttaatgacggacagggttggaaaggcttttaagtacctggaagccgtcttgtccttcattgagtgcggaattgccacagagtctgaaagccagtcatccaagtcagcttactctgtctactcagaaactgtagatctcattaaattcataatgtcattaaaatccttctcagatgccacagcgccaacacaagagaaaatatttgctgttttatgcatgcgttgccagtccattttgaacatggcgatgtttcgttgtaaaaaagacatagcaataaagtattctcgtactcttaataaacacttcgagagttcttccaaagtcgcccaggcaccttctccatgcattgcaagaagcacaggcacaccatcccctctttccccaatgccttctcctgccagctccgtagggtcccagtcaagtgctggcagtgtggggagcagtggggtggctgccactatcagcaccccagtcaccatccagaatatgacatcttcctatgtcaccatcacatcccatgttcttaccgcctttgacctttgggaacaggccgaggccctcacgaggaagaataaagaattctttgctcggctcagcacaaatgtgtgcaccttggccctcaacagcagtttggtggacctggtgcactatacacgacagggttttcagcagctacaagaattaaccaaaacaccttaa

SEQ ID NO: 370673 - DNA, 4831 bp, Homo sapiens
  misc_feature (4551)..(4551): n is a, c, g, or t
  misc_feature (4582)..(4582): n is a, c, g, or t
  misc_feature (4627)..(4627): n is a, c, g, or t
  misc_feature (4680)..(4680): n is a, c, g, or t
ctgcttcacttcacggggcgaacatggcgcacagctgtcggtggcgcttccccgcccgacccgggaccaccgggggcggcggcggcggggggcgccggggcctagggggcgccccgcggcaacgcgtcccggccctgctgcttccccccgggcccccggtcggcggtggcggccccggggcgcccccctcccccccggctgtggcggccgcggcggcggcggcgggaagcagcggggctggggttccagggggagcggccgccgcctcagcagcctcctcgtcgtccgcctcgtcttcgtcttcgtcatcgtcctcagcctcttcagggccggccctgctccgggtgggcccgggcttcgacgcggcgctgcaggtctcggccgccatcggcaccaacctgcgccggttccgggccgtgtttggggagagcggcgggggaggcggcagcggagaggatgagcaattcttaggttttggctcagatgaagaagtcagagtgcgaagtcccacaaggtctccttcagttaaaactagtcctcgaaaacctcgtgggagacctagaagtggctctgaccgaaattcagctatcctctcagatccatctgtgttttcccctctaaataaatcagagaccaaatctggagataagatcaagaagaaagattctaaaagtatagaaaagaagagaggaagacctcccaccttccctggagtaaaaatcaaaataacacatggaaaggacatttcagagttaccaaagggaaacaaagaagatagcctgaaaaaaattaaaaggacaccttctgctacgtttcagcaagccacaaagattaaaaaattaagagcaggtaaactctctcctctcaagtctaagtttaagacagggaagcttcaaataggaaggaagggggtacaaattgtacgacggagaggaaggcctccatcaacagaaaggataaagaccccttcgggtctcctcattaattctgaactggaaaagccccagaaagtccggaaagacaaggaaggaacacctccacttacaaaagaagataagacagttgtcagacaaagccctcgaaggattaagccagttaggattattccttcttcaaaaaggacagatgcaaccattgctaagcaactcttacagagggcaaaaaagggggctcaaaagaaaattgaaaaagaagcagctcagctgcagggaagaaaggtgaagacacaggtcaaaaatattcgacagttcatcatgcctgttgtcagtgctatctcctcgcggatcattaagacccctcggcggtttatagaggatgaggattatgaccctccaattaaaattgcccgattagagtctacaccgaatagtagattcagtgccccgtcctgtggatcttctgaaaaatcaagtgcagcttctcagcactcctctcaaatgtcttcagactcctctcgatctagtagccccagtgttgatacctccacagactctcaggcttctgaggagattcaggtacttcctgaggagcggagcgatacccctgaagttcatcctccactgcccatttcccagtccccagaaaatgagagtaatgataggagaagcagaaggtattcagtgtcggagagaagttttggatctagaacgacgaaaaaattatcaactctacaaagtgccccccagcagcagacctcctcgtctccacctccacctctgctgactccaccgccaccactgcagccagcctccagtatctctgaccacacaccttggcttatgcctccaacaatccccttagcatcaccatttttgcctgcttccactgctcctatgcaagggaagcgaaaatctattttgcgagaaccgacatttaggtggacttctttaaagcattctaggtcagagccacaatacttttcctcagcaaagtatgccaaagaaggtcttattcgcaaaccaatatttgataatttccgaccccctccactaactcccgaggacgttggctttgcatctggtttttctgcatctggtaccgctgcttcagcccgattgttttcgccactccattctggaacaaggtttgatatgcacaaaaggagccctcttctgagagctccaagatttactccaagtgaggctcactctagaatatttgagtctgtaaccttgcctagtaatcgaacttctgctggaacatcttcttcaggagtatccaatagaaaaaggaaaagaaaagtgtttagtcctattcgatctgaaccaagatctccttctcactccatgaggacaagaagtggaaggcttagtagttctgagctctcacctctcacccccccgtcttctgtctcttcctcgttaagcatttctgttagtcctcttgccactagtgccttaaacccaacttttacttttccttctcattccctgactcagtctggggaatctgcagagaaaaatcagagaccaaggaagcagactagtgctccggcagagccattttcatcaagtagtcctactcctctcttcccttggtttaccccaggctctcagactgaaagagggagaaataaagacaaggcccccgaggagctgtccaaagatcgagatgctgacaagagcgtggagaaggacaagagtagagagagagaccgggagagagaaaaggagaataagcgggagtcaaggaaagagaaaaggaaaaagggatcagaaattcagagtagttctgctttgtatcctgtgggtagggtttccaaagagaaggttgttggtgaagatgttgccacttcatcttctgccaaaaaagcaacagggcggaagaagtcttcatcacatgattctgggactgatattacttctgtgactcttggggatacaacagctgtcaaaaccaaaatacttataaagaaagggagaggaaatctggaaaaaaccaacttggacctcggcccaactgccccatccctggagaaggagaaaaccctctgcctttccactccttcatctagcactgttaaacattccacttcctccataggctccatgttggctcaggcagacaagcttccaatgactgacaagagggttgccagcctcctaaaaaaggccaaagctcagctctgcaagattgagaagagtaagagtcttaaacaaaccgaccagcccaaagcacagggtcaagaaagtgactcatcagagacctctgtgcgaggaccccggattaaacatgtctgcagaagagcagctgttgcccttggccgaaaacgagctgtgtttcctgatgacatgcccaccctgagtgccttaccatgggaagaacgagaaaagattttgtcttccatggggaatgatgacaagtcatcaattgctggctcagaagatgctgaacctcttgctccacccatcaaaccaattaaacctgtcactagaaacaaggcaccccaggaacctccagtaaagaaaggacgtcgatcgaggcggtgtgggcagtgtcccggctgccaggtgcctgaggactgtggtgtttgtactaattgcttagataagcccaagtttggtggtcgcaatataaagaagcagtgctgcaagatgagaaaatgtcagaatctacaatggatgccttccaaagcctacctgcagaagcaagctaaagctgtgaaaaagaaagagaaaaagtctaagaccagtgaaaagaaagacagcaaagagagcagtgttgtgaagaacgtggtggactctagtcagaaacctaccccatcagcaagagaggatcctgccccaaagaaaagcagtagtgagcctcctccacgaaagcccgtcgaggaaaagagtgaagaagggaatgtctcggcccctgggcctgaatccaaacaggccaccactccagcttccaggaagtcaagcaagcaggtctcccagccagcagtggtcatcccgcctcagccacctactacaggaccgccaagaaaagaagttcccaaaaccactcctagtgagcccaagaaaaagcagcctccaccaccagaatcaggtccagagcagagcaaacagaaaaaagtggctccccgcccaagtatccctgtaaaacaaaaaccaaaagaaaaggaaaaaccacctccggtcaataagcaggagaatgcaggcactttgaacatcctcagcactctctccaatggcaatagttctaagcaaaaaattccagcagatggagtccacaggatcagagtggactttaaggaggattgtgaagcagaaaatgtgtgggagatgggaggcttaggaatcttgacttctgttcctataacacccagggtggtttgctttctctgtgccagtagtgggcatgtagagaagcctggaatggtcccccctccgccgggagaagaaagccagacggtcatccttccacctggctggcagagctacctgtcgcctcagggccggcggtactatgtcaacacgaccaccaatgagaccacctgggaacgtcccagcagttctcctgggattccagccagccctggctctcacaggagctctctgcctncaacagtgaatggataccacgcatcagggancccagcgcaccctccagagactgcccacatgagtgtccgaaaatncaccggtgattcccagaacctgggatcctcatcgccaagcaaaaagcagagcnggaaaacaccatcacaataaactgtgtgacgttccctcacccagacacgatgccggaacagcagctgctgaaaccaaccgacgaagctggagtggtggcctgtttggattcaggcccaggggccgagacattcccttcttcactcttttcc

SEQ ID NO: 370674 - DNA, 4379 bp, Homo sapiens
ctgcttcacttcacggggcgaacatggcgcacagctgtcggtggcgcttccccgcccgacccgggaccaccgggggcggcggcggcggggggcgccggggcctagggggcgccccgcggcaacgcgtcccggccctgctgcttccccccgggcccccggtcggcggtggcggccccggggcgcccccctcccccccggctgtggcggccgcggcggcggcggcgggaagcagcggggctggggttccagggggagcggccgccgcctcagcagcctcctcgtcgtccgcctcgtcttcgtcttcgtcatcgtcctcagcctcttcagggccggccctgctccgggtgggcccgggcttcgacgcggcgctgcaggtctcggccgccatcggcaccaacctgcgccggttccgggccgtgtttggggagagcggcgggggaggcggcagcggagaggatgagcaattcttaggttttggctcagatgaagaagtcagagtgcgaagtcccacaaggtctccttcagttaaaactagtcctcgaaaacctcgtgggagacctagaagtggctctgaccgaaattcagctatcctctcagatccatctgtgttttcccctctaaataaatcagagaccaaatctggagataagatcaagaagaaagattctaaaagtatagaaaagaagagaggaagacctcccaccttccctggagtaaaaatcaaaataacacatggaaaggacatttcagagttaccaaagggaaacaaagaagatagcctgaaaaaaattaaaaggacaccttctgctacgtttcagcaagccacaaagattaaaaaattaagagcaggtaaactctctcctctcaagtctaagtttaagacagggaagcttcaaataggaaggaagggggtacaaattgtacgacggagaggaaggcctccatcaacagaaaggataaagaccccttcgggtctcctcattaattctgaactggaaaagccccagaaagtccggaaagacaaggaaggaacacctccacttacaaaagaagataagacagttgtcagacaaagccctcgaaggattaagccagttaggattattccttcttcaaaaaggacagatgcaaccattgctaagcaactcttacagagggcaaaaaagggggctcaaaagaaaattgaaaaagaagcagctcagctgcagggaagaaaggtgaagacacaggtcaaaaatattcgacagttcatcatgcctgttgtcagtgctatctcctcgcggatcattaagacccctcggcggtttatagaggatgaggattatgaccctccaattaaaattgcccgattagagtctacaccgaatagtagattcagtgccccgtcctgtggatcttctgaaaaatcaagtgcagcttctcagcactcctctcaaatgtcttcagactcctctcgatctagtagccccagtgttgatacctccacagactctcaggcttctgaggagattcaggtacttcctgaggagcggagcgatacccctgaagttcatcctccactgcccatttcccagtccccagaaaatgagagtaatgataggagaagcagaaggtattcagtgtcggagagaagttttggatctagaacgacgaaaaaattatcaactctacaaagtgccccccagcagcagacctcctcgtctccacctccacctctgctgactccaccgccaccactgcagccagcctccagtatctctgaccacacaccttggcttatgcctccaacaatccccttagcatcaccatttttgcctgcttccactgctcctatgcaagggaagcgaaaatctattttgcgagaaccgacatttaggtggacttctttaaagcattctaggtcagagccacaatacttttcctcagcaaagtatgccaaagaaggtcttattcgcaaaccaatatttgataatttccgaccccctccactaactcccgaggacgttggctttgcatctggtttttctgcatctggtaccgctgcttcagcccgattgttttcgccactccattctggaacaaggtttgatatgcacaaaaggagccctcttctgagagctccaagatttactccaagtgaggctcactctagaatatttgagtctgtaaccttgcctagtaatcgaacttctgctggaacatcttcttcaggagtatccaatagaaaaaggaaaagaaaagtgtttagtcctattcgatctgaaccaagatctccttctcactccatgaggacaagaagtggaaggcttagtagttctgagctctcacctctcacccccccgtcttctgtctcttcctcgttaagcatttctgttagtcctcttgccactagtgccttaaacccaacttttacttttccttctcattccctgactcagtctggggaatctgcagagaaaaatcagagaccaaggaagcagactagtgctccggcagagccattttcatcaagtagtcctactcctctcttcccttggtttaccccaggctctcagactgaaagagggagaaataaagacaaggcccccgaggagctgtccaaagatcgagatgctgacaagagcgtggagaaggacaagagtagagagagagaccgggagagagaaaaggagaataagcgggagtcaaggaaagagaaaaggaaaaagggatcagaaattcagagtagttctgctttgtatcctgtgggtagggtttccaaagagaaggttgttggtgaagatgttgccacttcatcttctgccaaaaaagcaacagggcggaagaagtcttcatcacatgattctgggactgatattacttctgtgactcttggggatacaacagctgtcaaaaccaaaatacttataaagaaagggagaggaaatctggaaaaaaccaacttggacctcggcccaactgccccatccctggagaaggagaaaaccctctgcctttccactccttcatctagcactgttaaacattccacttcctccataggctccatgttggctcaggcagacaagcttccaatgactgacaagagggttgccagcctcctaaaaaaggccaaagctcagctctgcaagattgagaagagtaagagtcttaaacaaaccgaccagcccaaagcacagggtcaagaaagtgactcatcagagacctctgtgcgaggaccccggattaaacatgtctgcagaagagcagctgttgcccttggccgaaaacgagctgtgtttcctgatgacatgcccaccctgagtgccttaccatgggaagaacgagaaaagattttgtcttccatggggaatgatgacaagtcatcaattgctggctcagaagatgctgaacctcttgctccacccatcaaaccaattaaacctgtcactagaaacaaggcaccccaggaacctccagtaaagaaaggacgtcgatcgaggcggtgtgggcagtgtcccggctgccaggtgcctgaggactgtggtgtttgtactaattgcttagataagcccaagtttggtggtcgcaatataaagaagcagtgctgcaagatgagaaaatgtcagaatctacaatggatgccttccaaagcctacctgcagaagcaagctaaagctgtgaaaaagaaagagaaaaagtctaagaccagtgaaaagaaagacagcaaagagagcagtgttgtgaagaacgtggtggactctagtcagaaacctaccccatcagcaagagaggatcctgccccaaagaaaagcagtagtgagcctcctccacgaaagcccgtcgaggaaaagagtgaagaagggaatgtctcggcccctgggcctgaatccaaacaggccaccactccagcttccaggaagtcaagcaagcaggtctcccagccagcagtggtcatcccgcctcagccacctactacaggaccgccaagaaaagaagttcccaaaaccactcctagtgagcccaagaaaaagcagcctccaccaccagaatcaggtccagagcagagcaaacagaaaaaagtggctccccgcccaagtatccctgtaaaacaaaaaccaaaagaaaaggaaaaaccacctccggtcaataagcaggagaatgcaggcactttgaacatcctcagcactctctccaatggcaatagttctaagcaaaaaattccagcagatggagtccacaggatcagagtggactttaagtttgtgtattgccaagtctgttgtgagcccttccacaagttttgtttagaggagaacgagcgccctctggaggaccaggtggtggcctgtttggattcaggcccaggggccgagacattcccttcttcactcttttcc

SEQ ID NO: 370675 - DNA, 4743 bp, Homo sapiens
  misc_feature (4551)..(4551): n is a, c, g, or t
  misc_feature (4582)..(4582): n is a, c, g, or t
  misc_feature (4627)..(4627): n is a, c, g, or t
  misc_feature (4680)..(4680): n is a, c, g, or t
ctgcttcacttcacggggcgaacatggcgcacagctgtcggtggcgcttccccgcccgacccgggaccaccgggggcggcggcggcggggggcgccggggcctagggggcgccccgcggcaacgcgtcccggccctgctgcttccccccgggcccccggtcggcggtggcggccccggggcgcccccctcccccccggctgtggcggccgcggcggcggcggcgggaagcagcggggctggggttccagggggagcggccgccgcctcagcagcctcctcgtcgtccgcctcgtcttcgtcttcgtcatcgtcctcagcctcttcagggccggccctgctccgggtgggcccgggcttcgacgcggcgctgcaggtctcggccgccatcggcaccaacctgcgccggttccgggccgtgtttggggagagcggcgggggaggcggcagcggagaggatgagcaattcttaggttttggctcagatgaagaagtcagagtgcgaagtcccacaaggtctccttcagttaaaactagtcctcgaaaacctcgtgggagacctagaagtggctctgaccgaaattcagctatcctctcagatccatctgtgttttcccctctaaataaatcagagaccaaatctggagataagatcaagaagaaagattctaaaagtatagaaaagaagagaggaagacctcccaccttccctggagtaaaaatcaaaataacacatggaaaggacatttcagagttaccaaagggaaacaaagaagatagcctgaaaaaaattaaaaggacaccttctgctacgtttcagcaagccacaaagattaaaaaattaagagcaggtaaactctctcctctcaagtctaagtttaagacagggaagcttcaaataggaaggaagggggtacaaattgtacgacggagaggaaggcctccatcaacagaaaggataaagaccccttcgggtctcctcattaattctgaactggaaaagccccagaaagtccggaaagacaaggaaggaacacctccacttacaaaagaagataagacagttgtcagacaaagccctcgaaggattaagccagttaggattattccttcttcaaaaaggacagatgcaaccattgctaagcaactcttacagagggcaaaaaagggggctcaaaagaaaattgaaaaagaagcagctcagctgcagggaagaaaggtgaagacacaggtcaaaaatattcgacagttcatcatgcctgttgtcagtgctatctcctcgcggatcattaagacccctcggcggtttatagaggatgaggattatgaccctccaattaaaattgcccgattagagtctacaccgaatagtagattcagtgccccgtcctgtggatcttctgaaaaatcaagtgcagcttctcagcactcctctcaaatgtcttcagactcctctcgatctagtagccccagtgttgatacctccacagactctcaggcttctgaggagattcaggtacttcctgaggagcggagcgatacccctgaagttcatcctccactgcccatttcccagtccccagaaaatgagagtaatgataggagaagcagaaggtattcagtgtcggagagaagttttggatctagaacgacgaaaaaattatcaactctacaaagtgccccccagcagcagacctcctcgtctccacctccacctctgctgactccaccgccaccactgcagccagcctccagtatctctgaccacacaccttggcttatgcctccaacaatccccttagcatcaccatttttgcctgcttccactgctcctatgcaagggaagcgaaaatctattttgcgagaaccgacatttaggtggacttctttaaagcattctaggtcagagccacaatacttttcctcagcaaagtatgccaaagaaggtcttattcgcaaaccaatatttgataatttccgaccccctccactaactcccgaggacgttggctttgcatctggtttttctgcatctggtaccgctgcttcagcccgattgttttcgccactccattctggaacaaggtttgatatgcacaaaaggagccctcttctgagagctccaagatttactccaagtgaggctcactctagaatatttgagtctgtaaccttgcctagtaatcgaacttctgctggaacatcttcttcaggagtatccaatagaaaaaggaaaagaaaagtgtttagtcctattcgatctgaaccaagatctccttctcactccatgaggacaagaagtggaaggcttagtagttctgagctctcacctctcacccccccgtcttctgtctcttcctcgttaagcatttctgttagtcctcttgccactagtgccttaaacccaacttttacttttccttctcattccctgactcagtctggggaatctgcagagaaaaatcagagaccaaggaagcagactagtgctccggcagagccattttcatcaagtagtcctactcctctcttcccttggtttaccccaggctctcagactgaaagagggagaaataaagacaaggcccccgaggagctgtccaaagatcgagatgctgacaagagcgtggagaaggacaagagtagagagagagaccgggagagagaaaaggagaataagcgggagtcaaggaaagagaaaaggaaaaagggatcagaaattcagagtagttctgctttgtatcctgtgggtagggtttccaaagagaaggttgttggtgaagatgttgccacttcatcttctgccaaaaaagcaacagggcggaagaagtcttcatcacatgattctgggactgatattacttctgtgactcttggggatacaacagctgtcaaaaccaaaatacttataaagaaagggagaggaaatctggaaaaaaccaacttggacctcggcccaactgccccatccctggagaaggagaaaaccctctgcctttccactccttcatctagcactgttaaacattccacttcctccataggctccatgttggctcaggcagacaagcttccaatgactgacaagagggttgccagcctcctaaaaaaggccaaagctcagctctgcaagattgagaagagtaagagtcttaaacaaaccgaccagcccaaagcacagggtcaagaaagtgactcatcagagacctctgtgcgaggaccccggattaaacatgtctgcagaagagcagctgttgcccttggccgaaaacgagctgtgtttcctgatgacatgcccaccctgagtgccttaccatgggaagaacgagaaaagattttgtcttccatggggaatgatgacaagtcatcaattgctggctcagaagatgctgaacctcttgctccacccatcaaaccaattaaacctgtcactagaaacaaggcaccccaggaacctccagtaaagaaaggacgtcgatcgaggcggtgtgggcagtgtcccggctgccaggtgcctgaggactgtggtgtttgtactaattgcttagataagcccaagtttggtggtcgcaatataaagaagcagtgctgcaagatgagaaaatgtcagaatctacaatggatgccttccaaagcctacctgcagaagcaagctaaagctgtgaaaaagaaagagaaaaagtctaagaccagtgaaaagaaagacagcaaagagagcagtgttgtgaagaacgtggtggactctagtcagaaacctaccccatcagcaagagaggatcctgccccaaagaaaagcagtagtgagcctcctccacgaaagcccgtcgaggaaaagagtgaagaagggaatgtctcggcccctgggcctgaatccaaacaggccaccactccagcttccaggaagtcaagcaagcaggtctcccagccagcagtggtcatcccgcctcagccacctactacaggaccgccaagaaaagaagttcccaaaaccactcctagtgagcccaagaaaaagcagcctccaccaccagaatcaggtccagagcagagcaaacagaaaaaagtggctccccgcccaagtatccctgtaaaacaaaaaccaaaagaaaaggaaaaaccacctccggtcaataagcaggagaatgcaggcactttgaacatcctcagcactctctccaatggcaatagttctaagcaaaaaattccagcagatggagtccacaggatcagagtggactttaaggaggattgtgaagcagaaaatgtgtgggagatgggaggcttaggaatcttgacttctgttcctataacacccagggtggtttgctttctctgtgccagtagtgggcatgtagagaagcctggaatggtcccccctccgccgggagaagaaagccagacggtcatccttccacctggctggcagagctacctgtcgcctcagggccggcggtactatgtcaacacgaccaccaatgagaccacctgggaacgtcccagcagttctcctgggattccagccagccctggctctcacaggagctctctgcctncaacagtgaatggataccacgcatcagggancccagcgcaccctccagagactgcccacatgagtgtccgaaaatncaccggtgattcccagaacctgggatcctcatcgccaagcaaaaagcagagcnggagtggtggcctgtttggattcaggcccaggggccgagacattcccttcttcactcttttcc

SEQ ID NO: 370676 - DNA, 4493 bp, Homo sapiens
ctgcttcacttcacggggcgaacatggcgcacagctgtcggtggcgcttccccgcccgacccgggaccaccgggggcggcggcggcggggggcgccggggcctagggggcgccccgcggcaacgcgtcccggccctgctgcttccccccgggcccccggtcggcggtggcggccccggggcgcccccctcccccccggctgtggcggccgcggcggcggcggcgggaagcagcggggctggggttccagggggagcggccgccgcctcagcagcctcctcgtcgtccgcctcgtcttcgtcttcgtcatcgtcctcagcctcttcagggccggccctgctccgggtgggcccgggcttcgacgcggcgctgcaggtctcggccgccatcggcaccaacctgcgccggttccgggccgtgtttggggagagcggcgggggaggcggcagcggagaggatgagcaattcttaggttttggctcagatgaagaagtcagagtgcgaagtcccacaaggtctccttcagttaaaactagtcctcgaaaacctcgtgggagacctagaagtggctctgaccgaaattcagctatcctctcagatccatctgtgttttcccctctaaataaatcagagaccaaatctggagataagatcaagaagaaagattctaaaagtatagaaaagaagagaggaagacctcccaccttccctggagtaaaaatcaaaataacacatggaaaggacatttcagagttaccaaagggaaacaaagaagatagcctgaaaaaaattaaaaggacaccttctgctacgtttcagcaagccacaaagattaaaaaattaagagcaggtaaactctctcctctcaagtctaagtttaagacagggaagcttcaaataggaaggaagggggtacaaattgtacgacggagaggaaggcctccatcaacagaaaggataaagaccccttcgggtctcctcattaattctgaactggaaaagccccagaaagtccggaaagacaaggaaggaacacctccacttacaaaagaagataagacagttgtcagacaaagccctcgaaggattaagccagttaggattattccttcttcaaaaaggacagatgcaaccattgctaagcaactcttacagagggcaaaaaagggggctcaaaagaaaattgaaaaagaagcagctcagctgcagggaagaaaggtgaagacacaggtcaaaaatattcgacagttcatcatgcctgttgtcagtgctatctcctcgcggatcattaagacccctcggcggtttatagaggatgaggattatgaccctccaattaaaattgcccgattagagtctacaccgaatagtagattcagtgccccgtcctgtggatcttctgaaaaatcaagtgcagcttctcagcactcctctcaaatgtcttcagactcctctcgatctagtagccccagtgttgatacctccacagactctcaggcttctgaggagattcaggtacttcctgaggagcggagcgatacccctgaagttcatcctccactgcccatttcccagtccccagaaaatgagagtaatgataggagaagcagaaggtattcagtgtcggagagaagttttggatctagaacgacgaaaaaattatcaactctacaaagtgccccccagcagcagacctcctcgtctccacctccacctctgctgactccaccgccaccactgcagccagcctccagtatctctgaccacacaccttggcttatgcctccaacaatccccttagcatcaccatttttgcctgcttccactgctcctatgcaagggaagcgaaaatctattttgcgagaaccgacatttaggtggacttctttaaagcattctaggtcagagccacaatacttttcctcagcaaagtatgccaaagaaggtcttattcgcaaaccaatatttgataatttccgaccccctccactaactcccgaggacgttggctttgcatctggtttttctgcatctggtaccgctgcttcagcccgattgttttcgccactccattctggaacaaggtttgatatgcacaaaaggagccctcttctgagagctccaagatttactccaagtgaggctcactctagaatatttgagtctgtaaccttgcctagtaatcgaacttctgctggaacatcttcttcaggagtatccaatagaaaaaggaaaagaaaagtgtttagtcctattcgatctgaaccaagatctccttctcactccatgaggacaagaagtggaaggcttagtagttctgagctctcacctctcacccccccgtcttctgtctcttcctcgttaagcatttctgttagtcctcttgccactagtgccttaaacccaacttttacttttccttctcattccctgactcagtctggggaatctgcagagaaaaatcagagaccaaggaagcagactagtgctccggcagagccattttcatcaagtagtcctactcctctcttcccttggtttaccccaggctctcagactgaaagagggagaaataaagacaaggcccccgaggagctgtccaaagatcgagatgctgacaagagcgtggagaaggacaagagtagagagagagaccgggagagagaaaaggagaataagcgggagtcaaggaaagagaaaaggaaaaagggatcagaaattcagagtagttctgctttgtatcctgtgggtagggtttccaaagagaaggttgttggtgaagatgttgccacttcatcttctgccaaaaaagcaacagggcggaagaagtcttcatcacatgattctgggactgatattacttctgtgactcttggggatacaacagctgtcaaaaccaaaatacttataaagaaagggagaggaaatctggaaaaaaccaacttggacctcggcccaactgccccatccctggagaaggagaaaaccctctgcctttccactccttcatctagcactgttaaacattccacttcctccataggctccatgttggctcaggcagacaagcttccaatgactgacaagagggttgccagcctcctaaaaaaggccaaagctcagctctgcaagattgagaagagtaagagtcttaaacaaaccgaccagcccaaagcacagggtcaagaaagtgactcatcagagacctctgtgcgaggaccccggattaaacatgtctgcagaagagcagctgttgcccttggccgaaaacgagctgtgtttcctgatgacatgcccaccctgagtgccttaccatgggaagaacgagaaaagattttgtcttccatggggaatgatgacaagtcatcaattgctggctcagaagatgctgaacctcttgctccacccatcaaaccaattaaacctgtcactagaaacaaggcaccccaggaacctccagtaaagaaaggacgtcgatcgaggcggtgtgggcagtgtcccggctgccaggtgcctgaggactgtggtgtttgtactaattgcttagataagcccaagtttggtggtcgcaatataaagaagcagtgctgcaagatgagaaaatgtcagaatctacaatggatgccttccaaagcctacctgcagaagcaagctaaagctgtgaaaaagaaagagaaaaagtctaagaccagtgaaaagaaagacagcaaagagagcagtgttgtgaagaacgtggtggactctagtcagaaacctaccccatcagcaagagaggatcctgccccaaagaaaagcagtagtgagcctcctccacgaaagcccgtcgaggaaaagagtgaagaagggaatgtctcggcccctgggcctgaatccaaacaggccaccactccagcttccaggaagtcaagcaagcaggtctcccagccagcagtggtcatcccgcctcagccacctactacaggaccgccaagaaaagaagttcccaaaaccactcctagtgagcccaagaaaaagcagcctccaccaccagaatcaggtccagagcagagcaaacagaaaaaagtggctccccgcccaagtatccctgtaaaacaaaaaccaaaagaaaaggaaaaaccacctccggtcaataagcaggagaatgcaggcactttgaacatcctcagcactctctccaatggcaatagttctaagcaaaaaattccagcagatggagtccacaggatcagagtggactttaaggaggattgtgaagcagaaaatgtgtgggagatgggaggcttaggaatcttgacttctgttcctataacacccagggtggtttgctttctctgtgccagtagtgggcatgtagagtttgtgtattgccaagtctgttgtgagcccttccacaagttttgtttagaggagaacgagcgccctctggaggaccaggtggtggcctgtttggattcaggcccaggggccgagacattcccttcttcactcttttcc

SEQ ID NO: 370677 - DNA, 4544 bp, Homo sapiens
ctgcttcacttcacggggcgaacatggcgcacagctgtcggtggcgcttccccgcccgacccgggaccaccgggggcggcggcggcggggggcgccggggcctagggggcgccccgcggcaacgcgtcccggccctgctgcttccccccgggcccccggtcggcggtggcggccccggggcgcccccctcccccccggctgtggcggccgcggcggcggcggcgggaagcagcggggctggggttccagggggagcggccgccgcctcagcagcctcctcgtcgtccgcctcgtcttcgtcttcgtcatcgtcctcagcctcttcagggccggccctgctccgggtgggcccgggcttcgacgcggcgctgcaggtctcggccgccatcggcaccaacctgcgccggttccgggccgtgtttggggagagcggcgggggaggcggcagcggagaggatgagcaattcttaggttttggctcagatgaagaagtcagagtgcgaagtcccacaaggtctccttcagttaaaactagtcctcgaaaacctcgtgggagacctagaagtggctctgaccgaaattcagctatcctctcagatccatctgtgttttcccctctaaataaatcagagaccaaatctggagataagatcaagaagaaagattctaaaagtatagaaaagaagagaggaagacctcccaccttccctggagtaaaaatcaaaataacacatggaaaggacatttcagagttaccaaagggaaacaaagaagatagcctgaaaaaaattaaaaggacaccttctgctacgtttcagcaagccacaaagattaaaaaattaagagcaggtaaactctctcctctcaagtctaagtttaagacagggaagcttcaaataggaaggaagggggtacaaattgtacgacggagaggaaggcctccatcaacagaaaggataaagaccccttcgggtctcctcattaattctgaactggaaaagccccagaaagtccggaaagacaaggaaggaacacctccacttacaaaagaagataagacagttgtcagacaaagccctcgaaggattaagccagttaggattattccttcttcaaaaaggacagatgcaaccattgctaagcaactcttacagagggcaaaaaagggggctcaaaagaaaattgaaaaagaagcagctcagctgcagggaagaaaggtgaagacacaggtcaaaaatattcgacagttcatcatgcctgttgtcagtgctatctcctcgcggatcattaagacccctcggcggtttatagaggatgaggattatgaccctccaattaaaattgcccgattagagtctacaccgaatagtagattcagtgccccgtcctgtggatcttctgaaaaatcaagtgcagcttctcagcactcctctcaaatgtcttcagactcctctcgatctagtagccccagtgttgatacctccacagactctcaggcttctgaggagattcaggtacttcctgaggagcggagcgatacccctgaagttcatcctccactgcccatttcccagtccccagaaaatgagagtaatgataggagaagcagaaggtattcagtgtcggagagaagttttggatctagaacgacgaaaaaattatcaactctacaaagtgccccccagcagcagacctcctcgtctccacctccacctctgctgactccaccgccaccactgcagccagcctccagtatctctgaccacacaccttggcttatgcctccaacaatccccttagcatcaccatttttgcctgcttccactgctcctatgcaagggaagcgaaaatctattttgcgagaaccgacatttaggtggacttctttaaagcattctaggtcagagccacaatacttttcctcagcaaagtatgccaaagaaggtcttattcgcaaaccaatatttgataatttccgaccccctccactaactcccgaggacgttggctttgcatctggtttttctgcatctggtaccgctgcttcagcccgattgttttcgccactccattctggaacaaggtttgatatgcacaaaaggagccctcttctgagagctccaagatttactccaagtgaggctcactctagaatatttgagtctgtaaccttgcctagtaatcgaacttctgctggaacatcttcttcaggagtatccaatagaaaaaggaaaagaaaagtgtttagtcctattcgatctgaaccaagatctccttctcactccatgaggacaagaagtggaaggcttagtagttctgagctctcacctctcacccccccgtcttctgtctcttcctcgttaagcatttctgttagtcctcttgccactagtgccttaaacccaacttttacttttccttctcattccctgactcagtctggggaatctgcagagaaaaatcagagaccaaggaagcagactagtgctccggcagagccattttcatcaagtagtcctactcctctcttcccttggtttaccccaggctctcagactgaaagagggagaaataaagacaaggcccccgaggagctgtccaaagatcgagatgctgacaagagcgtggagaaggacaagagtagagagagagaccgggagagagaaaaggagaataagcgggagtcaaggaaagagaaaaggaaaaagggatcagaaattcagagtagttctgctttgtatcctgtgggtagggtttccaaagagaaggttgttggtgaagatgttgccacttcatcttctgccaaaaaagcaacagggcggaagaagtcttcatcacatgattctgggactgatattacttctgtgactcttggggatacaacagctgtcaaaaccaaaatacttataaagaaagggagaggaaatctggaaaaaaccaacttggacctcggcccaactgccccatccctggagaaggagaaaaccctctgcctttccactccttcatctagcactgttaaacattccacttcctccataggctccatgttggctcaggcagacaagcttccaatgactgacaagagggttgccagcctcctaaaaaaggccaaagctcagctctgcaagattgagaagagtaagagtcttaaacaaaccgaccagcccaaagcacagggtcaagaaagtgactcatcagagacctctgtgcgaggaccccggattaaacatgtctgcagaagagcagctgttgcccttggccgaaaacgagctgtgtttcctgatgacatgcccaccctgagtgccttaccatgggaagaacgagaaaagattttgtcttccatggggaatgatgacaagtcatcaattgctggctcagaagatgctgaacctcttgctccacccatcaaaccaattaaacctgtcactagaaacaaggcaccccaggaacctccagtaaagaaaggacgtcgatcgaggcggtgtgggcagtgtcccggctgccaggtgcctgaggactgtggtgtttgtactaattgcttagataagcccaagtttggtggtcgcaatataaagaagcagtgctgcaagatgagaaaatgtcagaatctacaatggatgccttccaaagcctacctgcagaagcaagctaaagctgtgaaaaagaaagagaaaaagtctaagaccagtgaaaagaaagacagcaaagagagcagtgttgtgaagaacgtggtggactctagtcagaaacctaccccatcagcaagagaggatcctgccccaaagaaaagcagtagtgagcctcctccacgaaagcccgtcgaggaaaagagtgaagaagggaatgtctcggcccctgggcctgaatccaaacaggccaccactccagcttccaggaagtcaagcaagcaggtctcccagccagcagtggtcatcccgcctcagccacctactacaggaccgccaagaaaagaagttcccaaaaccactcctagtgagcccaagaaaaagcagcctccaccaccagaatcaggtccagagcagagcaaacagaaaaaagtggctccccgcccaagtatccctgtaaaacaaaaaccaaaagaaaaggaaaaaccacctccggtcaataagcaggagaatgcaggcactttgaacatcctcagcactctctccaatggcaatagttctaagcaaaaaattccagcagatggagtccacaggatcagagtggactttaagtttgtgtattgccaagtctgttgtgagcccttccacaagttttgtttagaggagaacgagcgccctctggaggaccagctggaaaattggtgttgtcgtcgttgcaaattctgtcacgtttgtggaaggcaacatcaggctacaaagcagctgctggagtgtaataagtgccgaaacagctatcaccctgagtgcctgggaccaaactaccccaccaaacccacaaagaagaagaaagtctgggtggtggcctgtttggattcaggcccaggggccgagacattcccttcttcactcttttcc

SEQ ID NO: 370678 - DNA, 4377 bp, Homo sapiens
ctgcttcacttcacggggcgaacatggcgcacagctgtcggtggcgcttccccgcccgacccgggaccaccgggggcggcggcggcggggggcgccggggcctagggggcgccccgcggcaacgcgtcccggccctgctgcttccccccgggcccccggtcggcggtggcggccccggggcgcccccctcccccccggctgtggcggccgcggcggcggcggcgggaagcagcggggctggggttccagggggagcggccgccgcctcagcagcctcctcgtcgtccgcctcgtcttcgtcttcgtcatcgtcctcagcctcttcagggccggccctgctccgggtgggcccgggcttcgacgcggcgctgcaggtctcggccgccatcggcaccaacctgcgccggttccgggccgtgtttggggagagcggcgggggaggcggcagcggagaggatgagcaattcttaggttttggctcagatgaagaagtcagagtgcgaagtcccacaaggtctccttcagttaaaactagtcctcgaaaacctcgtgggagacctagaagtggctctgaccgaaattcagctatcctctcagatccatctgtgttttcccctctaaataaatcagagaccaaatctggagataagatcaagaagaaagattctaaaagtatagaaaagaagagaggaagacctcccaccttccctggagtaaaaatcaaaataacacatggaaaggacatttcagagttaccaaagggaaacaaagaagatagcctgaaaaaaattaaaaggacaccttctgctacgtttcagcaagccacaaagattaaaaaattaagagcaggtaaactctctcctctcaagtctaagtttaagacagggaagcttcaaataggaaggaagggggtacaaattgtacgacggagaggaaggcctccatcaacagaaaggataaagaccccttcgggtctcctcattaattctgaactggaaaagccccagaaagtccggaaagacaaggaaggaacacctccacttacaaaagaagataagacagttgtcagacaaagccctcgaaggattaagccagttaggattattccttcttcaaaaaggacagatgcaaccattgctaagcaactcttacagagggcaaaaaagggggctcaaaagaaaattgaaaaagaagcagctcagctgcagggaagaaaggtgaagacacaggtcaaaaatattcgacagttcatcatgcctgttgtcagtgctatctcctcgcggatcattaagacccctcggcggtttatagaggatgaggattatgaccctccaattaaaattgcccgattagagtctacaccgaatagtagattcagtgccccgtcctgtggatcttctgaaaaatcaagtgcagcttctcagcactcctctcaaatgtcttcagactcctctcgatctagtagccccagtgttgatacctccacagactctcaggcttctgaggagattcaggtacttcctgaggagcggagcgatacccctgaagttcatcctccactgcccatttcccagtccccagaaaatgagagtaatgataggagaagcagaaggtattcagtgtcggagagaagttttggatctagaacgacgaaaaaattatcaactctacaaagtgccccccagcagcagacctcctcgtctccacctccacctctgctgactccaccgccaccactgcagccagcctccagtatctctgaccacacaccttggcttatgcctccaacaatccccttagcatcaccatttttgcctgcttccactgctcctatgcaagggaagcgaaaatctattttgcgagaaccgacatttaggtggacttctttaaagcattctaggtcagagccacaatacttttcctcagcaaagtatgccaaagaaggtcttattcgcaaaccaatatttgataatttccgaccccctccactaactcccgaggacgttggctttgcatctggtttttctgcatctggtaccgctgcttcagcccgattgttttcgccactccattctggaacaaggtttgatatgcacaaaaggagccctcttctgagagctccaagatttactccaagtgaggctcactctagaatatttgagtctgtaaccttgcctagtaatcgaacttctgctggaacatcttcttcaggagtatccaatagaaaaaggaaaagaaaagtgtttagtcctattcgatctgaaccaagatctccttctcactccatgaggacaagaagtggaaggcttagtagttctgagctctcacctctcacccccccgtcttctgtctcttcctcgttaagcatttctgttagtcctcttgccactagtgccttaaacccaacttttacttttccttctcattccctgactcagtctggggaatctgcagagaaaaatcagagaccaaggaagcagactagtgctccggcagagccattttcatcaagtagtcctactcctctcttcccttggtttaccccaggctctcagactgaaagagggagaaataaagacaaggcccccgaggagctgtccaaagatcgagatgctgacaagagcgtggagaaggacaagagtagagagagagaccgggagagagaaaaggagaataagcgggagtcaaggaaagagaaaaggaaaaagggatcagaaattcagagtagttctgctttgtatcctgtgggtagggtttccaaagagaaggttgttggtgaagatgttgccacttcatcttctgccaaaaaagcaacagggcggaagaagtcttcatcacatgattctgggactgatattacttctgtgactcttggggatacaacagctgtcaaaaccaaaatacttataaagaaagggagaggaaatctggaaaaaaccaacttggacctcggcccaactgccccatccctggagaaggagaaaaccctctgcctttccactccttcatctagcactgttaaacattccacttcctccataggctccatgttggctcaggcagacaagcttccaatgactgacaagagggttgccagcctcctaaaaaaggccaaagctcagctctgcaagattgagaagagtaagagtcttaaacaaaccgaccagcccaaagcacagggtcaagaaagtgactcatcagagacctctgtgcgaggaccccggattaaacatgtctgcagaagagcagctgttgcccttggccgaaaacgagctgtgtttcctgatgacatgcccaccctgagtgccttaccatgggaagaacgagaaaagattttgtcttccatggggaatgatgacaagtcatcaattgctggctcagaagatgctgaacctcttgctccacccatcaaaccaattaaacctgtcactagaaacaaggcaccccaggaacctccagtaaagaaaggacgtcgatcgaggcggtgtgggcagtgtcccggctgccaggtgcctgaggactgtggtgtttgtactaattgcttagataagcccaagtttggtggtcgcaatataaagaagcagtgctgcaagatgagaaaatgtcagaatctacaatggatgccttccaaagcctacctgcagaagcaagctaaagctgtgaaaaagaaagagaaaaagtctaagaccagtgaaaagaaagacagcaaagagagcagtgttgtgaagaacgtggtggactctagtcagaaacctaccccatcagcaagagaggatcctgccccaaagaaaagcagtagtgagcctcctccacgaaagcccgtcgaggaaaagagtgaagaagggaatgtctcggcccctgggcctgaatccaaacaggccaccactccagcttccaggaagtcaagcaagcaggtctcccagccagcagtggtcatcccgcctcagccacctactacaggaccgccaagaaaagaagttcccaaaaccactcctagtgagcccaagaaaaagcagcctccaccaccagaatcaggtccagagcagagcaaacagaaaaaagtggctccccgcccaagtatccctgtaaaacaaaaaccaaaagaaaaggaaaaaccacctccggtcaataagcaggagaatgcaggcactttgaacatcctcagcactctctccaatggcaatagttctaagcaaaaaattccagcagatggagtccacaggatcagagtggactttaaggaggattgtgaagcagaaaatgtgtgggagatgggaggcttaggaatcttgacttctgttcctataacacccaggggtggtggcctgtttggattcaggcccaggggccgagacattcccttcttcactcttttcc

SEQ ID NO: 370679 - DNA, 4304 bp, Homo sapiens
ctgcttcacttcacggggcgaacatggcgcacagctgtcggtggcgcttccccgcccgacccgggaccaccgggggcggcggcggcggggggcgccggggcctagggggcgccccgcggcaacgcgtcccggccctgctgcttccccccgggcccccggtcggcggtggcggccccggggcgcccccctcccccccggctgtggcggccgcggcggcggcggcgggaagcagcggggctggggttccagggggagcggccgccgcctcagcagcctcctcgtcgtccgcctcgtcttcgtcttcgtcatcgtcctcagcctcttcagggccggccctgctccgggtgggcccgggcttcgacgcggcgctgcaggtctcggccgccatcggcaccaacctgcgccggttccgggccgtgtttggggagagcggcgggggaggcggcagcggagaggatgagcaattcttaggttttggctcagatgaagaagtcagagtgcgaagtcccacaaggtctccttcagttaaaactagtcctcgaaaacctcgtgggagacctagaagtggctctgaccgaaattcagctatcctctcagatccatctgtgttttcccctctaaataaatcagagaccaaatctggagataagatcaagaagaaagattctaaaagtatagaaaagaagagaggaagacctcccaccttccctggagtaaaaatcaaaataacacatggaaaggacatttcagagttaccaaagggaaacaaagaagatagcctgaaaaaaattaaaaggacaccttctgctacgtttcagcaagccacaaagattaaaaaattaagagcaggtaaactctctcctctcaagtctaagtttaagacagggaagcttcaaataggaaggaagggggtacaaattgtacgacggagaggaaggcctccatcaacagaaaggataaagaccccttcgggtctcctcattaattctgaactggaaaagccccagaaagtccggaaagacaaggaaggaacacctccacttacaaaagaagataagacagttgtcagacaaagccctcgaaggattaagccagttaggattattccttcttcaaaaaggacagatgcaaccattgctaagcaactcttacagagggcaaaaaagggggctcaaaagaaaattgaaaaagaagcagctcagctgcagggaagaaaggtgaagacacaggtcaaaaatattcgacagttcatcatgcctgttgtcagtgctatctcctcgcggatcattaagacccctcggcggtttatagaggatgaggattatgaccctccaattaaaattgcccgattagagtctacaccgaatagtagattcagtgccccgtcctgtggatcttctgaaaaatcaagtgcagcttctcagcactcctctcaaatgtcttcagactcctctcgatctagtagccccagtgttgatacctccacagactctcaggcttctgaggagattcaggtacttcctgaggagcggagcgatacccctgaagttcatcctccactgcccatttcccagtccccagaaaatgagagtaatgataggagaagcagaaggtattcagtgtcggagagaagttttggatctagaacgacgaaaaaattatcaactctacaaagtgccccccagcagcagacctcctcgtctccacctccacctctgctgactccaccgccaccactgcagccagcctccagtatctctgaccacacaccttggcttatgcctccaacaatccccttagcatcaccatttttgcctgcttccactgctcctatgcaagggaagcgaaaatctattttgcgagaaccgacatttaggtggacttctttaaagcattctaggtcagagccacaatacttttcctcagcaaagtatgccaaagaaggtcttattcgcaaaccaatatttgataatttccgaccccctccactaactcccgaggacgttggctttgcatctggtttttctgcatctggtaccgctgcttcagcccgattgttttcgccactccattctggaacaaggtttgatatgcacaaaaggagccctcttctgagagctccaagatttactccaagtgaggctcactctagaatatttgagtctgtaaccttgcctagtaatcgaacttctgctggaacatcttcttcaggagtatccaatagaaaaaggaaaagaaaagtgtttagtcctattcgatctgaaccaagatctccttctcactccatgaggacaagaagtggaaggcttagtagttctgagctctcacctctcacccccccgtcttctgtctcttcctcgttaagcatttctgttagtcctcttgccactagtgccttaaacccaacttttacttttccttctcattccctgactcagtctggggaatctgcagagaaaaatcagagaccaaggaagcagactagtgctccggcagagccattttcatcaagtagtcctactcctctcttcccttggtttaccccaggctctcagactgaaagagggagaaataaagacaaggcccccgaggagctgtccaaagatcgagatgctgacaagagcgtggagaaggacaagagtagagagagagaccgggagagagaaaaggagaataagcgggagtcaaggaaagagaaaaggaaaaagggatcagaaattcagagtagttctgctttgtatcctgtgggtagggtttccaaagagaaggttgttggtgaagatgttgccacttcatcttctgccaaaaaagcaacagggcggaagaagtcttcatcacatgattctgggactgatattacttctgtgactcttggggatacaacagctgtcaaaaccaaaatacttataaagaaagggagaggaaatctggaaaaaaccaacttggacctcggcccaactgccccatccctggagaaggagaaaaccctctgcctttccactccttcatctagcactgttaaacattccacttcctccataggctccatgttggctcaggcagacaagcttccaatgactgacaagagggttgccagcctcctaaaaaaggccaaagctcagctctgcaagattgagaagagtaagagtcttaaacaaaccgaccagcccaaagcacagggtcaagaaagtgactcatcagagacctctgtgcgaggaccccggattaaacatgtctgcagaagagcagctgttgcccttggccgaaaacgagctgtgtttcctgatgacatgcccaccctgagtgccttaccatgggaagaacgagaaaagattttgtcttccatggggaatgatgacaagtcatcaattgctggctcagaagatgctgaacctcttgctccacccatcaaaccaattaaacctgtcactagaaacaaggcaccccaggaacctccagtaaagaaaggacgtcgatcgaggcggtgtgggcagtgtcccggctgccaggtgcctgaggactgtggtgtttgtactaattgcttagataagcccaagtttggtggtcgcaatataaagaagcagtgctgcaagatgagaaaatgtcagaatctacaatggatgccttccaaagcctacctgcagaagcaagctaaagctgtgaaaaagaaagagaaaaagtctaagaccagtgaaaagaaagacagcaaagagagcagtgttgtgaagaacgtggtggactctagtcagaaacctaccccatcagcaagagaggatcctgccccaaagaaaagcagtagtgagcctcctccacgaaagcccgtcgaggaaaagagtgaagaagggaatgtctcggcccctgggcctgaatccaaacaggccaccactccagcttccaggaagtcaagcaagcaggtctcccagccagcagtggtcatcccgcctcagccacctactacaggaccgccaagaaaagaagttcccaaaaccactcctagtgagcccaagaaaaagcagcctccaccaccagaatcaggtccagagcagagcaaacagaaaaaagtggctccccgcccaagtatccctgtaaaacaaaaaccaaaagaaaagctgtgaaaaagaaagagaaaaagtctaagaccagtgaaaagaaagacagcaaagagagcagtgttgtgaagaacgtggtggactctagtcagaaacctaccccatcagcaagagaggatcctgcccgaagctggagtggtggcctgtttggattcaggcccaggggccgagacattcccttcttcactcttttcc

SEQ ID NO: 370680 - DNA, 4316 bp, Homo sapiens
ctgcttcacttcacggggcgaacatggcgcacagctgtcggtggcgcttccccgcccgacccgggaccaccgggggcggcggcggcggggggcgccggggcctagggggcgccccgcggcaacgcgtcccggccctgctgcttccccccgggcccccggtcggcggtggcggccccggggcgcccccctcccccccggctgtggcggccgcggcggcggcggcgggaagcagcggggctggggttccagggggagcggccgccgcctcagcagcctcctcgtcgtccgcctcgtcttcgtcttcgtcatcgtcctcagcctcttcagggccggccctgctccgggtgggcccgggcttcgacgcggcgctgcaggtctcggccgccatcggcaccaacctgcgccggttccgggccgtgtttggggagagcggcgggggaggcggcagcggagaggatgagcaattcttaggttttggctcagatgaagaagtcagagtgcgaagtcccacaaggtctccttcagttaaaactagtcctcgaaaacctcgtgggagacctagaagtggctctgaccgaaattcagctatcctctcagatccatctgtgttttcccctctaaataaatcagagaccaaatctggagataagatcaagaagaaagattctaaaagtatagaaaagaagagaggaagacctcccaccttccctggagtaaaaatcaaaataacacatggaaaggacatttcagagttaccaaagggaaacaaagaagatagcctgaaaaaaattaaaaggacaccttctgctacgtttcagcaagccacaaagattaaaaaattaagagcaggtaaactctctcctctcaagtctaagtttaagacagggaagcttcaaataggaaggaagggggtacaaattgtacgacggagaggaaggcctccatcaacagaaaggataaagaccccttcgggtctcctcattaattctgaactggaaaagccccagaaagtccggaaagacaaggaaggaacacctccacttacaaaagaagataagacagttgtcagacaaagccctcgaaggattaagccagttaggattattccttcttcaaaaaggacagatgcaaccattgctaagcaactcttacagagggcaaaaaagggggctcaaaagaaaattgaaaaagaagcagctcagctgcagggaagaaaggtgaagacacaggtcaaaaatattcgacagttcatcatgcctgttgtcagtgctatctcctcgcggatcattaagacccctcggcggtttatagaggatgaggattatgaccctccaattaaaattgcccgattagagtctacaccgaatagtagattcagtgccccgtcctgtggatcttctgaaaaatcaagtgcagcttctcagcactcctctcaaatgtcttcagactcctctcgatctagtagccccagtgttgatacctccacagactctcaggcttctgaggagattcaggtacttcctgaggagcggagcgatacccctgaagttcatcctccactgcccatttcccagtccccagaaaatgagagtaatgataggagaagcagaaggtattcagtgtcggagagaagttttggatctagaacgacgaaaaaattatcaactctacaaagtgccccccagcagcagacctcctcgtctccacctccacctctgctgactccaccgccaccactgcagccagcctccagtatctctgaccacacaccttggcttatgcctccaacaatccccttagcatcaccatttttgcctgcttccactgctcctatgcaagggaagcgaaaatctattttgcgagaaccgacatttaggtggacttctttaaagcattctaggtcagagccacaatacttttcctcagcaaagtatgccaaagaaggtcttattcgcaaaccaatatttgataatttccgaccccctccactaactcccgaggacgttggctttgcatctggtttttctgcatctggtaccgctgcttcagcccgattgttttcgccactccattctggaacaaggtttgatatgcacaaaaggagccctcttctgagagctccaagatttactccaagtgaggctcactctagaatatttgagtctgtaaccttgcctagtaatcgaacttctgctggaacatcttcttcaggagtatccaatagaaaaaggaaaagaaaagtgtttagtcctattcgatctgaaccaagatctccttctcactccatgaggacaagaagtggaaggcttagtagttctgagctctcacctctcacccccccgtcttctgtctcttcctcgttaagcatttctgttagtcctcttgccactagtgccttaaacccaacttttacttttccttctcattccctgactcagtctggggaatctgcagagaaaaatcagagaccaaggaagcagactagtgctccggcagagccattttcatcaagtagtcctactcctctcttcccttggtttaccccaggctctcagactgaaagagggagaaataaagacaaggcccccgaggagctgtccaaagatcgagatgctgacaagagcgtggagaaggacaagagtagagagagagaccgggagagagaaaaggagaataagcgggagtcaaggaaagagaaaaggaaaaagggatcagaaattcagagtagttctgctttgtatcctgtgggtagggtttccaaagagaaggttgttggtgaagatgttgccacttcatcttctgccaaaaaagcaacagggcggaagaagtcttcatcacatgattctgggactgatattacttctgtgactcttggggatacaacagctgtcaaaaccaaaatacttataaagaaagggagaggaaatctggaaaaaaccaacttggacctcggcccaactgccccatccctggagaaggagaaaaccctctgcctttccactccttcatctagcactgttaaacattccacttcctccataggctccatgttggctcaggcagacaagcttccaatgactgacaagagggttgccagcctcctaaaaaaggccaaagctcagctctgcaagattgagaagagtaagagtcttaaacaaaccgaccagcccaaagcacagggtcaagaaagtgactcatcagagacctctgtgcgaggaccccggattaaacatgtctgcagaagagcagctgttgcccttggccgaaaacgagctgtgtttcctgatgacatgcccaccctgagtgccttaccatgggaagaacgagaaaagattttgtcttccatggggaatgatgacaagtcatcaattgctggctcagaagatgctgaacctcttgctccacccatcaaaccaattaaacctgtcactagaaacaaggcaccccaggaacctccagtaaagaaaggacgtcgatcgaggcggtgtgggcagtgtcccggctgccaggtgcctgaggactgtggtgtttgtactaattgcttagataagcccaagtttggtggtcgcaatataaagaagcagtgctgcaagatgagaaaatgtcagaatctacaatggatgccttccaaagcctacctgcagaagcaagctaaagctgtgaaaaagaaagagaaaaagtctaagaccagtgaaaagaaagacagcaaagagagcagtgttgtgaagaacgtggtggactctagtcagaaacctaccccatcagcaagagaggatcctgccccaaagaaaagcagtagtgagcctcctccacgaaagcccgtcgaggaaaagagtgaagaagggaatgtctcggcccctgggcctgaatccaaacaggccaccactccagcttccaggaagtcaagcaagcaggtctcccagccagcagtggtcatcccgcctcagccacctactacaggaccgccaagaaaagaagttcccaaaaccactcctagtgagcccaagaaaaagcagcctccaccaccagaatcaggtccagagcagagcaaacagaaaaaagtggctccccgcccaagtatccctgtaaaacaaaaaccaaaagaaaaggaaaaaccacctccggtcaataagcaggagaatgcaggcactttgaacatcctcagcactctctccaatggcaatagttctaagcaaaaaattccagcagatggagtccacaggatcagagtggactttaagacattgacaagcagtacgtgggcttcgccacactgcccaaccaggtgcaccgcaagtcggtgaagaaaggctttg

SEQ ID NO: 370681 - DNA, 4095 bp, Homo sapiens
ctgcttcacttcacggggcgaacatggcgcacagctgtcggtggcgcttccccgcccgacccgggaccaccgggggcggcggcggcggggggcgccggggcctagggggcgccccgcggcaacgcgtcccggccctgctgcttccccccgggcccccggtcggcggtggcggccccggggcgcccccctcccccccggctgtggcggccgcggcggcggcggcgggaagcagcggggctggggttccagggggagcggccgccgcctcagcagcctcctcgtcgtccgcctcgtcttcgtcttcgtcatcgtcctcagcctcttcagggccggccctgctccgggtgggcccgggcttcgacgcggcgctgcaggtctcggccgccatcggcaccaacctgcgccggttccgggccgtgtttggggagagcggcgggggaggcggcagcggagaggatgagcaattcttaggttttggctcagatgaagaagtcagagtgcgaagtcccacaaggtctccttcagttaaaactagtcctcgaaaacctcgtgggagacctagaagtggctctgaccgaaattcagctatcctctcagatccatctgtgttttcccctctaaataaatcagagaccaaatctggagataagatcaagaagaaagattctaaaagtatagaaaagaagagaggaagacctcccaccttccctggagtaaaaatcaaaataacacatggaaaggacatttcagagttaccaaagggaaacaaagaagatagcctgaaaaaaattaaaaggacaccttctgctacgtttcagcaagccacaaagattaaaaaattaagagcaggtaaactctctcctctcaagtctaagtttaagacagggaagcttcaaataggaaggaagggggtacaaattgtacgacggagaggaaggcctccatcaacagaaaggataaagaccccttcgggtctcctcattaattctgaactggaaaagccccagaaagtccggaaagacaaggaaggaacacctccacttacaaaagaagataagacagttgtcagacaaagccctcgaaggattaagccagttaggattattccttcttcaaaaaggacagatgcaaccattgctaagcaactcttacagagggcaaaaaagggggctcaaaagaaaattgaaaaagaagcagctcagctgcagggaagaaaggtgaagacacaggtcaaaaatattcgacagttcatcatgcctgttgtcagtgctatctcctcgcggatcattaagacccctcggcggtttatagaggatgaggattatgaccctccaattaaaattgcccgattagagtctacaccgaatagtagattcagtgccccgtcctgtggatcttctgaaaaatcaagtgcagcttctcagcactcctctcaaatgtcttcagactcctctcgatctagtagccccagtgttgatacctccacagactctcaggcttctgaggagattcaggtacttcctgaggagcggagcgatacccctgaagttcatcctccactgcccatttcccagtccccagaaaatgagagtaatgataggagaagcagaaggtattcagtgtcggagagaagttttggatctagaacgacgaaaaaattatcaactctacaaagtgccccccagcagcagacctcctcgtctccacctccacctctgctgactccaccgccaccactgcagccagcctccagtatctctgaccacacaccttggcttatgcctccaacaatccccttagcatcaccatttttgcctgcttccactgctcctatgcaagggaagcgaaaatctattttgcgagaaccgacatttaggtggacttctttaaagcattctaggtcagagccacaatacttttcctcagcaaagtatgccaaagaaggtcttattcgcaaaccaatatttgataatttccgaccccctccactaactcccgaggacgttggctttgcatctggtttttctgcatctggtaccgctgcttcagcccgattgttttcgccactccattctggaacaaggtttgatatgcacaaaaggagccctcttctgagagctccaagatttactccaagtgaggctcactctagaatatttgagtctgtaaccttgcctagtaatcgaacttctgctggaacatcttcttcaggagtatccaatagaaaaaggaaaagaaaagtgtttagtcctattcgatctgaaccaagatctccttctcactccatgaggacaagaagtggaaggcttagtagttctgagctctcacctctcacccccccgtcttctgtctcttcctcgttaagcatttctgttagtcctcttgccactagtgccttaaacccaacttttacttttccttctcattccctgactcagtctggggaatctgcagagaaaaatcagagaccaaggaagcagactagtgctccggcagagccattttcatcaagtagtcctactcctctcttcccttggtttaccccaggctctcagactgaaagagggagaaataaagacaaggcccccgaggagctgtccaaagatcgagatgctgacaagagcgtggagaaggacaagagtagagagagagaccgggagagagaaaaggagaataagcgggagtcaaggaaagagaaaaggaaaaagggatcagaaattcagagtagttctgctttgtatcctgtgggtagggtttccaaagagaaggttgttggtgaagatgttgccacttcatcttctgccaaaaaagcaacagggcggaagaagtcttcatcacatgattctgggactgatattacttctgtgactcttggggatacaacagctgtcaaaaccaaaatacttataaagaaagggagaggaaatctggaaaaaaccaacttggacctcggcccaactgccccatccctggagaaggagaaaaccctctgcctttccactccttcatctagcactgttaaacattccacttcctccataggctccatgttggctcaggcagacaagcttccaatgactgacaagagggttgccagcctcctaaaaaaggccaaagctcagctctgcaagattgagaagagtaagagtcttaaacaaaccgaccagcccaaagcacagggtcaagaaagtgactcatcagagacctctgtgcgaggaccccggattaaacatgtctgcagaagagcagctgttgcccttggccgaaaacgagctgtgtttcctgatgacatgcccaccctgagtgccttaccatgggaagaacgagaaaagattttgtcttccatggggaatgatgacaagtcatcaattgctggctcagaagatgctgaacctcttgctccacccatcaaaccaattaaacctgtcactagaaacaaggcaccccaggaacctccagtaaagaaaggacgtcgatcgaggcggtgtgggcagtgtcccggctgccaggtgcctgaggactgtggtgtttgtactaattgcttagataagcccaagtttggtggtcgcaatataaagaagcagtgctgcaagatgagaaaatgtcagaatctacaatggatgccttccaaagcctacctgcagaagcaagctaaagctgtgaaaaagaaagagaaaaagtctaagaccagtgaaaagaaagacagcaaagagagcagtgttgtgaagaacgtggtggactctagtcagaaacctaccccatcagcaagagaggatcctgccccaaagaaaagcagtagtgagcctcctccacgaaagcccgtcgaggaaaagagtgaagaagggaatgtctcggcccctgggcctgaatccaaacaggccaccactccagcttccaggaagtcaagcaagcaggtctcccagccagcagtggtcatcccgcctcagccacctactacaggaccgccaagaaaagaagttcccaaaaccactcctagtgagcccaagaaaaagcagcctccaccaccagaatcaggtggtggcctgtttggattcaggcccaggggccgagacattcccttcttcactcttttcc

SEQ ID NO: 370682 - DNA, 732 bp, Homo sapiens
gatctattaataaaatttgtcatttgcattattatctgttgcaaatgtgaaggcaaatagggtgtgattttgttctatattcatcttttgtctccttaggaaaaaccacctccggtcaataagcaggagaatgcaggcactttgaacatcctcagcactctctccaatggcaatagttctaagcaaaaaattccagcagatggagtccacaggatcagagtggactttaaggtaaaggtgttcagtgatcataaagtatattgagtgtcaaagactttaaataaagaaaatgctactaccaaaggtgttgaaagaggaaatcagcaccaactgggggaatgaataagaactcccattagcaggtgggtttagcgctgggagagctttggtcagtgttgttaggtcactgtttgtgaactgactgcagaacatacataatgaaacattcctatccatcctgagcagtatcagaggaagtaattccttcacatggaaagtatcaaaccatgatgattccttgagtcagcaaaactgtaagagaaattcaatcccagtgtattttcgcaatatattcaatatgaattgaacaactaggtgagccttttaatagtccgtgtctgagattaaaactttttaaagcagcagttatttttggactcattgaaatgaaatactctgacattgtgatgtcacactaattttatgcttttcatccttattttccatccaaag

SEQ ID NO: 370683 - DNA, 453 bp, Homo sapiens
ccccatcagcaagagaggatcctgccccaaagaaaagcagtagtgagcctcctccacgaaagcccgtcgaggaaaagagtgaagaagggaatgtctcggcccctgggcctgaatccaaacaggccaccactccagcttccaggaagtcaagcaagcaggtctcccagccagcagtggtcatcccgcctcagccacctactacaggaccgccaagaaaagaagttcccaaaaccactcctagtgagcccaagaaaaagcagcctccaccaccagaatcaggtgagtgaggagggcaagaaggaattgctgaaccacaagtactaacaaaaaagcactgatgtctcaaacagcatttgaaagcaggaaatgtatgatttgaagtcttcagttcaagaaaatcagctctctttctaactattatgtttaataataaagaaacagaaacaaaaaaaa

SEQ ID NO: 370684 - DNA, 618 bp, Homo sapiens
tttgtgtattgccaagtctgttgtgagcccttccacaagttttgtttagaggagaacgagcgccctctggaggaccagctggaaaattggtgttgtcgtcgttgcaaattctgtcacgtttgtggaaggcaacatcaggctacaaaggtacaaaacttggtaatagaactacagctgggcctctgtatcagtgggttctgtatccctggactcaaccaaccttggattgaatgtatctgggaaaaaatgagtagttgcctctgtactctatgtgaacagactttttcttgtcattatttcctaaacaatacagtataacaactatttacattgtattaggtatgataagtaatctagagataatttaaagtatatggtgggcggatcacttgaagccaggagttcgagaccagcctgagccaacatggtgaaaccccatctctactaaaaatacaaaaaattagccaggtgtggtggtgggcacctgtagtcccagctacttgggaggctgagggaggaaaatcgcttgaactttggaggcagaggttggggtgagccactccagcctgtggtgcagtctgtcactccagcctgggtgacacagtgagactccatctc

SEQ ID NO: 370685 - DNA, 6956 bp, Homo sapiens
ctgcttcacttcacggggcgaacatggcgcacagctgtcggtggcgcttccccgcccgacccgggaccaccgggggcggcggcggcggggggcgccggggcctagggggcgccccgcggcaacgcgtcccggccctgctgcttccccccgggcccccggtcggcggtggcggccccggggcgcccccctcccccccggctgtggcggccgcggcggcggcggcgggaagcagcggggctggggttccagggggagcggccgccgcctcagcagcctcctcgtcgtccgcctcgtcttcgtcttcgtcatcgtcctcagcctcttcagggccggccctgctccgggtgggcccgggcttcgacgcggcgctgcaggtctcggccgccatcggcaccaacctgcgccggttccgggccgtgtttggggagagcggcgggggaggcggcagcggagagctaacaacacagatcccatgtagttggagaaccaaaggccacatacatgacaaaaagactgaaccgttcaggttacttgcatggagttggtgcttaaatgatgagcaattcttaggttttggctcagatgaagaagtcagagtgcgaagtcccacaaggtctccttcagttaaaactagtcctcgaaaacctcgtgggagacctagaagtggctctgaccgaaattcagctatcctctcagatccatctgtgttttcccctctaaataaatcagagaccaaatctggagataagatcaagaagaaagattctaaaagtatagaaaagaagagaggaagacctcccaccttccctggagtaaaaatcaaaataacacatggaaaggacatttcagagttaccaaagggaaacaaagaagatagcctgaaaaaaattaaaaggacaccttctgctacgtttcagcaagccacaaagattaaaaaattaagagcaggtaaactctctcctctcaagtctaagtttaagacagggaagcttcaaataggaaggaagggggtacaaattgtacgacggagaggaaggcctccatcaacagaaaggataaagaccccttcgggtctcctcattaattctgaactggaaaagccccagaaagtccggaaagacaaggaaggaacacctccacttacaaaagaagataagacagttgtcagacaaagccctcgaaggattaagccagttaggattattccttcttcaaaaaggacagatgcaaccattgctaagcaactcttacagagggcaaaaaagggggctcaaaagaaaattgaaaaagaagcagctcagctgcagggaagaaaggtgaagacacaggtcaaaaatattcgacagttcatcatgcctgttgtcagtgctatctcctcgcggatcattaagacccctcggcggtttatagaggatgaggattatgaccctccaattaaaattgcccgattagagtctacaccgaatagtagattcagtgccccgtcctgtggatcttctgaaaaatcaagtgcagcttctcagcactcctctcaaatgtcttcagactcctctcgatctagtagccccagtgttgatacctccacagactctcaggcttctgaggagattcaggtacttcctgaggagcggagcgatacccctgaagttcatcctccactgcccatttcccagtccccagaaaatgagagtaatgataggagaagcagaaggtattcagtgtcggagagaagttttggatctagaacgacgaaaaaattatcaactctacaaagtgccccccagcagcagacctcctcgtctccacctccacctctgctgactccaccgccaccactgcagccagcctccagtatctctgaccacacaccttggcttatgcctccaacaatccccttaggcttatgctccaacaatccccttacatcaccatttttgcctgcttccactgctcctatgcaagggaagcgaaaatctattttgcgagaaccgacatttaggtggacttctttaaagcattctaggtcagagccacaatacttttcctcagcaaagtatgccaaagaaggtcttattcgcaaaccaatatttgataatttccgaccccctccactaactcccgaggacgttggctttgcatctggtttttctgcatctggtaccgctgcttcagcccgattgttttcgccactccattctggaacaaggtttgatatgcacaaaaggagccctcttctgagagctccaagatttactccaagtgaggctcactctagaatatttgagtctgtaaccttgcctagtaatcgaacttctgctggaacatcttcttcaggagtatccaatagaaaaaggaaaagaaaagtgtttagtcctattcgatctgaaccaagatctccttctcactccatgaggacaagaagtggaaggcttagtagttctgagctctcacctctcacccccccgtcttctgtctcttcctcgttaagcatttctgttagtcctcttgccactagtgccttaaacccaacttttacttttccttctcattccctgactcagtctggggaatctgcagagaaaaatcagagaccaaggaagcagactagtgctccggcagagccattttcatcaagtagtcctactcctctcttcccttggtttaccccaggctctcagactgaaagagggagaaataaagacaaggcccccgaggagctgtccaaagatcgagatgctgacaagagcgtggagaaggacaagagtagagagagagaccgggagagagaaaaggagaataagcgggagtcaaggaaagagaaaaggaaaaagggatcagaaattcagagtagttctgctttgtatcctgtgggtagggtttccaaagagaaggttgttggtgaagatgttgccacttcatcttctgccaaaaaagcaacagggcggaagaagtcttcatcacatgattctgggactgatattacttctgtgactcttggggatacaacagctgtcaaaaccaaaatacttataaagaaagggagaggaaatctggaaaaaaccaacttggacctcggcccaactgccccatccctggagaaggagaaaaccctctgcctttccactccttcatctagcactgttaaacattccacttcctccataggctccatgttggctcaggcagacaagcttccaatgactgacaagagggttgccagcctcctaaaaaaggccaaagctcagctctgcaagattgagaagagtaagagtcttaaacaaaccgaccagcccaaagcacagggtcaagaaagtgactcatcagagacctctgtgcgaggaccccggattaaacatgtctgcagaagagcagctgttgcccttggccgaaaacgagctgtgtttcctgatgacatgcccaccctgagtgccttaccatgggaagaacgagaaaagattttgtcttccatggggaatgatgacaagtcatcaattgctggctcagaagatgctgaacctcttgctccacccatcaaaccaattaaacctgtcactagaaacaaggcaccccaggaacctccagtaaagaaaggacgtcgatcgaggcggtgtgggcagtgtcccggctgccaggtgcctgaggactgtggtgtttgtactaattgcttagataagcccaagtttggtggtcgcaatataaagaagcagtgctgcaagatgagaaaatgtcagaatctacaatggatgccttccaaagcctacctgcagaagcaagctaaagctgtgaaaaagaaagagaaaaagtctaagaccagtgaaaagaaagacagcaaagagagcagtgttgtgaagaacgtggtggactctagtcagaaacctaccccatcagcaagagaggatcctgccccaaagaaaagcagtagtgagcctcctccacgaaagcccgtcgaggaaaagagtgaagaagggaatgtctcggcccctgggcctgaatccaaacaggccaccactccagcttccaggaagtcaagcaagcaggtctcccagccagcagtggtcatcccgcctcagccacctactacaggaccgccaagaaaagaagttcccaaaaccactcctagtgagcccaagaaaaagcagcctccaccaccagaatcaggtccagagcagagcaaacagaaaaaagtggctccccgcccaagtatccctgtaaaacaaaaaccaaaagaaaaggaaaaaccacctccggtcaataagcaggagaatgcaggcactttgaacatcctcagcactctctccaatggcaatagttctaagcaaaaaattccagcagatggagtccacaggatcagagtggactttaagacctactccaatgaagtccattgtgttgaagagattctgaaggaaatgacccattcatggccgcctcctttgacagcaatacatacgcctagtacagctgagccatccaagtttcctttccctacaaaggactctcagcatgtcagttctgtaacccaaaaccaaaaacaatatgatacatcttcaaaaactcactcaaattctcagcaaggaacgtcatccatgctcgaagacgaccttcagctcagtgacagtgaggacagtgacagtgaacaaaccccagagaagcctccctcctcatctgcacctccaagtgctccacagtcccttccagaaccagtggcatcagcacattccagcagtgcagagtcagaaagcaccagtgactcagacagttcctcagactcagagagcgagagcagttcaagtgacagcgaagaaaatgagcccctagaaaccccagctccggagcctgagcctccaacaacaaacaaatggcagctggacaactggctgaccaaagtcagcagccagctgcgccaccagagggccccaggagcacagagcccccacggcggcacccagagagtaagggcagcagcgacagtgccacgagtcaggagcattctgaatccaaagatcctccccctaaaagctccagcaaagcccccgcgcccacccgaagccccccaccccggaaagaggagctgtcagaagtctccggcacagcaggagcccccacaaaggcaaaccgttggaaccaaacaacccaaaaaacctgtcaaggcctctgcccgggcaggttcacggaccagcctgcagggggaaagggagccagggcttcttccctatggctcccgagaccagacttccaaagacaagcccaaggtgaagacgaaaggacggccccgggccgcagcaagcaacgaacccaagccagcagtgcccccctccagtgagaagaagaagcacaagagctccctccctgccccctctaaggctctctcaggcccagaacccgcgaaggacaatgtggaggacaggacccctgagcactttgctcttgttcccctgactgagagccagggcccaccccacagtggcagcagcagcaggactagtggctgccgccaagccgtggtggtccaggaggacagccgcaaagacagactcccattgcctttgagagacaccaagctgctctcaccgctcagggacactcctcccccacaaagcttgatggtgaagatcaccctagacctgctctctcggataccccagcctcccgggaaggggagccgccagaggaaagcagaagataaacagccgcccgcagggaagaagcacagctctgagaagaggagctcagacagctcaagcaagttggccaaaaagagaaagggtgaagcagaaagagactgtgataacaagaaaatcagactggagaaggaaatcaaatcacagtcatcttcatcttcatcctcccacaaagaatcttctaaaacaaagccctccaggccctcctcacagtcctcaaagaaggaaatgctccccccgccacccgtgtcctcgtcctcccagaagccagccaagcctgcacttaagaggtcaaggcgggaagcagacacctgtggccaggaccctcccaaaagtgccagcagtaccaagagcaaccacaaagactcttccattcccaagcagagaagagtagaggggaagggctccagaagctcctcggagcacaagggttcttccggagatactgcaaatccttttccagtgccttctttgccaaatggtaactctaaaccagggaagcctcaagtgaagtttgacaaacaacaagcagaccttcacatgagggaggaaaaaaagatgaagcagaaagcagagttaatgacggacagggttggaaaggcttttaagtacctggaagccgtcttgtccttcattgagtgcggaattgccacagagtctgaaagccagtcatccaagtcagcttactctgtctactcagaaactgtagatctcattaaattcataatgtcattaaaatccttctcagatgccacagcgccaacacaagagaaaatatttgctgttttatgcatgcgttgccagtccattttgaacatggcgatgtttcgttgtaaaaaagacatagcaataaagtattctcgtactcttaataaacacttcgagagttcttccaaagtcgcccaggcaccttctccatgcattgcaagaagcacaggcacaccatcccctctttccccaatgccttctcctgccagctccgtagggtcccagtcaagtgctggcagtgtggggagcagtggggtggctgccactatcagcaccccagtcaccatccagaatatgacatcttcctatgtcaccatcacatcccatgttcttaccgcctttgacctttgggaacaggccgaggccctcacgaggaagaataaagaattctttgctcggctcagcacaaatgtgtgcaccttggccctcaacagcagtttggtggacctggtgcactatacacgacagggttttcagcagctacaagaattaaccaaaacaccttaa

SEQ ID NO: 370686 - DNA, 834 bp, Homo sapiens
ctgcttcacttcacggggcgaacatggcgcacagctgtcggtggcgcttccccgcccgacccgggaccaccgggggcggcggcggcggggggcgccggggcctagggggcgccccgcggcaacgcgtcccggccctgctgcttccccccgggcccccggtcggcggtggcggccccggggcgcccccctcccccccggctgtggcggccgcggcggcggcggcgggaagcagcggggctggggttccagggggagcggccgccgcctcagcagcctcctcgtcgtccgcctcgtcttcgtcttcgtcatcgtcctcagcctcttcagggccggccctgctccgggtgggcccgggcttcgacgcggcgctgcaggtctcggccgccatcggcaccaacctgcgccggttccgggccgtgtttggggagagcggcgggggaggcggcagcggagaggttcctcaacttaaaagggatgaggagaccttggagacggttctgaggagactcaaaagatgattatatgattggaagtcagtcctatgaggaaaggttgagagaatgaaaggttaagaggcaacttaataactcttcaaaaaacatgaatggatccattattaggaatggtaaccagcggtttcccagctccactgacagcagaataagagaaaataggtttaaaccgaaatcaggagtagttgtgtaaagaacttattggtaatgatggttgtcattacagtcatggtaaaaaggttaccaaaataattttattatcttctctggaagtatattttaaaagtacagtcctgcctacataagaataaaatgacctctt

SEQ ID NO: 370687 - DNA, 16963 bp, Homo sapiens
ctgcttcacttcacggggcgaacatggcgcacagctgtcggtggcgcttccccgcccgacccgggaccaccgggggcggcggcggcggggggcgccggggcctagggggcgccccgcggcaacgcgtcccggccctgctgcttccccccgggcccccggtcggcggtggcggccccggggcgcccccctcccccccggctgtggcggccgcggcggcggcggcgggaagcagcggggctggggttccagggggagcggccgccgcctcagcagcctcctcgtcgtccgcctcgtcttcgtcttcgtcatcgtcctcagcctcttcagggccggccctgctccgggtgggcccgggcttcgacgcggcgctgcaggtctcggccgccatcggcaccaacctgcgccggttccgggccgtgtttggggagagcggcgggggaggcggcagcggagaggatgagcaattcttaggttttggctcagatgaagaagtcagagtgcgaagtcccacaaggtctccttcagttaaaactagtcctcgaaaacctcgtgggagacctagaagtggctctgaccgaaattcagctatcctctcagatccatctgtgttttcccctctaaataaatcagagaccaaatctggagataagatcaagaagaaagattctaaaagtatagaaaagaagagaggaagacctcccaccttccctggagtaaaaatcaaaataacacatggaaaggacatttcagagttaccaaagggaaacaaagaagatagcctgaaaaaaattaaaaggacaccttctgctacgtttcagcaagccacaaagattaaaaaattaagagcaggtaaactctctcctctcaagtctaagtttaagacagggaagcttcaaataggaaggaagggggtacaaattgtacgacggagaggaaggcctccatcaacagaaaggataaagaccccttcgggtctcctcattaattctgaactggaaaagccccagaaagtccggaaagacaaggaaggaacacctccacttacaaaagaagataagacagttgtcagacaaagccctcgaaggattaagccagttaggattattccttcttcaaaaaggacagatgcaaccattgctaagcaactcttacagagggcaaaaaagggggctcaaaagaaaattgaaaaagaagcagctcagctgcagggaagaaaggtgaagacacaggtcaaaaatattcgacagttcatcatgcctgttgtcagtgctatctcctcgcggatcattaagacccctcggcggtttatagaggatgaggattatgaccctccaattaaaattgcccgattagagtctacaccgaatagtagattcagtgccccgtcctgtggatcttctgaaaaatcaagtgcagcttctcagcactcctctcaaatgtcttcagactcctctcgatctagtagccccagtgttgatacctccacagactctcaggcttctgaggagattcaggtacttcctgaggagcggagcgatacccctgaagttcatcctccactgcccatttcccagtccccagaaaatgagagtaatgataggagaagcagaaggtattcagtgtcggagagaagttttggatctagaacgacgaaaaaattatcaactctacaaagtgccccccagcagcagacctcctcgtctccacctccacctctgctgactccaccgccaccactgcagccagcctccagtatctctgaccacacaccttggcttatgcctccaacaatccccttagcatcaccatttttgcctgcttccactgctcctatgcaagggaagcgaaaatctattttgcgagaaccgacatttaggtggacttctttaaagcattctaggtcagagccacaatacttttcctcagcaaagtatgccaaagaaggtcttattcgcaaaccaatatttgataatttccgaccccctccactaactcccgaggacgttggctttgcatctggtttttctgcatctggtaccgctgcttcagcccgattgttttcgccactccattctggaacaaggtttgatatgcacaaaaggagccctcttctgagagctccaagatttactccaagtgaggctcactctagaatatttgagtctgtaaccttgcctagtaatcgaacttctgctggaacatcttcttcaggagtatccaatagaaaaaggaaaagaaaagtgtttagtcctattcgatctgaaccaagatctccttctcactccatgaggacaagaagtggaaggcttagtagttctgagctctcacctctcacccccccgtcttctgtctcttcctcgttaagcatttctgttagtcctcttgccactagtgccttaaacccaacttttacttttccttctcattccctgactcagtctggggaatctgcagagaaaaatcagagaccaaggaagcagactagtgctccggcagagccattttcatcaagtagtcctactcctctcttcccttggtttaccccaggctctcagactgaaagagggagaaataaagacaaggcccccgaggagctgtccaaagatcgagatgctgacaagagcgtggagaaggacaagagtagagagagagaccgggagagagaaaaggagaataagcgggagtcaaggaaagagaaaaggaaaaagggatcagaaattcagagtagttctgctttgtatcctgtgggtagggtttccaaagagaaggttgttggtgaagatgttgccacttcatcttctgccaaaaaagcaacagggcggaagaagtcttcatcacatgattctgggactgatattacttctgtgactcttggggatacaacagctgtcaaaaccaaaatacttataaagaaagggagaggaaatctggaaaaaaccaacttggacctcggcccaactgccccatccctggagaaggagaaaaccctctgcctttccactccttcatctagcactgttaaacattccacttcctccataggctccatgttggctcaggcagacaagcttccaatgactgacaagagggttgccagcctcctaaaaaaggccaaagctcagctctgcaagattgagaagagtaagagtcttaaacaaaccgaccagcccaaagcacagggtcaagaaagtgactcatcagagacctctgtgcgaggaccccggattaaacatgtctgcagaagagcagctgttgcccttggccgaaaacgagctgtgtttcctgatgacatgcccaccctgagtgccttaccatgggaagaacgagaaaagattttgtcttccatggggaatgatgacaagtcatcaattgctggctcagaagatgctgaacctcttgctccacccatcaaaccaattaaacctgtcactagaaacaaggcaccccaggaacctccagtaaagaaaggacgtcgatcgaggcggtgtgggcagtgtcccggctgccaggtgcctgaggactgtggtgtttgtactaattgcttagataagcccaagtttggtggtcgcaatataaagaagcagtgctgcaagatgagaaaatgtcagaatctacaatggatgccttccaaagcctacctgcagaagcaagctaaagctgtgaaaaagaaagagaaaaagtctaagaccagtgaaaagaaagacagcaaagagagcagtgttgtgaagaacgtggtggactctagtcagaaacctaccccatcagcaagagaggatcctgccccaaagaaaagcagtagtgagcctcctccacgaaagcccgtcgaggaaaagagtgaagaagggaatgtctcggcccctgggcctgaatccaaacaggccaccactccagcttccaggaagtcaagcaagcaggtctcccagccagcagtggtcatcccgcctcagccacctactacaggaccgccaagaaaagaagttcccaaaaccactcctagtgagcccaagaaaaagcagcctccaccaccagaatcaggtccagagcagagcaaacagaaaaaagtggctccccgcccaagtatccctgtaaaacaaaaaccaaaagaaaaggaaaaaccacctccggtcaataagcaggagaatgcaggcactttgaacatcctcagcactctctccaatggcaatagttctaagcaaaaaattccagcagatggagtccacaggatcagagtggactttaaggaggattgtgaagcagaaaatgtgtgggagatgggaggcttaggaatcttgacttctgttcctataacacccagggtggtttgctttctctgtgccagtagtgggcatgtagagtttgtgtattgccaagtctgttgtgagcccttccacaagttttgtttagaggagaacgagcgccctctggaggaccagctggaaaattggtgttgtcgtcgttgcaaattctgtcacgtttgtggaaggcaacatcaggctacaaagcagctgctggagtgtaataagtgccgaaacagctatcaccctgagtgcctgggaccaaactaccccaccaaacccacaaagaagaagaaagtctggatctgtaccaagtgtgttcgctgtaagagctgtggatccacaactccaggcaaagggtgggatgcacagtggtctcatgatttctcactgtgtcatgattgcgccaagctctttgctaaaggaaacttctgccctctctgtgacaaatgttatgatgatgatgactatgagagtaagatgatgcaatgtggaaagtgtgatcgctgggtccattccaaatgtgagaatctttcagatgagatgtatgagattctatctaatctgccagaaagtgtggcctacacttgtgtgaactgtactgagcggcaccctgcagagtggcgactggcccttgaaaaagagctgcagatttctctgaagcaagttctgacagctttgttgaattctcggactaccagccatttgctacgctaccggcaggctgccaagcctccagacttaaatcccgagacagaggagagtataccttcccgcagctcccccgaaggacctgatccaccagttcttactgaggtcagcaaacaggatgatcagcagcctttagatctagaaggagtcaagaggaagatggaccaagggaattacacatctgtgttggagttcagtgatgatattgtgaagatcattcaagcagccattaattcagatggaggacagccagaaattaaaaaagccaacagcatggtcaagtccttcttcattcggcaaatggaacgtgtttttccatggttcagtgtcaaaaagtccaggttttgggagccaaataaagtatcaagcaacagtgggatgttaccaaacgcagtgcttccaccttcacttgaccataattatgctcagtggcaggagcgagaggaaaacagccacactgagcagcctcctttaatgaagaaaatcattccagctcccaaacccaaaggtcctggagaaccagactcaccaactcctctgcatcctcctacaccaccaattttgagtactgataggagtcgagaagacagtccagagctgaacccacccccaggcatagaagacaatagacagtgtgcgttatgtttgacttatggtgatgacagtgctaatgatgctggtcgtttactatatattggccaaaatgagtggacacatgtaaattgtgctttgtggtcagcggaagtgtttgaagatgatgacggatcactaaagaatgtgcatatggctgtgatcaggggcaagcagctgagatgtgaattctgccaaaagccaggagccaccgtgggttgctgtctcacatcctgcaccagcaactatcacttcatgtgttcccgagccaagaactgtgtctttctggatgataaaaaagtatattgccaacgacatcgggatttgatcaaaggcgaagtggttcctgagaatggatttgaagttttcagaagagtgtttgtggactttgaaggaatcagcttgagaaggaagtttctcaatggcttggaaccagaaaatatccacatgatgattgggtctatgacaatcgactgcttaggaattctaaatgatctctccgactgtgaagataagctctttcctattggatatcagtgttccagggtatactggagcaccacagatgctcgcaagcgctgtgtatatacatgcaagatagtggagtgccgtcctccagtcgtagagccggatatcaacagcactgttgaacatgatgaaaacaggaccattgcccatagtccaacatcttttacagaaagttcatcaaaagagagtcaaaacacagctgaaattataagtcctccatcaccagaccgacctcctcattcacaaacctctggctcctgttattatcatgtcatctcaaaggtccccaggattcgaacacccagttattctccaacacagagatcccctggctgtcgaccgttgccttctgcaggaagtcctaccccaaccactcatgaaatagtcacagtaggtgatcctttactctcctctggacttcgaagcattggctccaggcgtcacagtacctcttccttatcaccccagcggtccaaactccggataatgtctccaatgagaactgggaatacttactctaggaataatgtttcctcagtctccaccaccgggaccgctactgatcttgaatcaagtgccaaagtagttgatcatgtcttagggccactgaattcaagtactagtttagggcaaaacacttccacctcttcaaatttgcaaaggacagtggttactgtaggcaataaaaacagtcacttggatggatcttcatcttcagaaatgaagcagtccagtgcttcagacttggtgtccaagagctcctctttaaagggagagaagaccaaagtgctgagttccaagagctcagagggatctgcacataatgtggcttaccctggaattcctaaactggccccacaggttcataacacaacatctagagaactgaatgttagtaaaatcggctcctttgctgaaccctcttcagtgtcgttttcttctaaagaggccctctccttcccacacctccatttgagagggcaaaggaatgatcgagaccaacacacagattctacccaatcagcaaactcctctccagatgaagatactgaagtcaaaaccttgaagctatctggaatgagcaacagatcatccattatcaacgaacatatgggatctagttccagagataggagacagaaagggaaaaaatcctgtaaagaaactttcaaagaaaagcattccagtaaatcttttttggaacctggtcaggtgacaactggtgaggaaggaaacttgaagccagagtttatggatgaggttttgactcctgagtatatgggccaacgaccatgtaacaatgtttcttctgataagattggtgataaaggcctttctatgccaggagtccccaaagctccacccatgcaagtagaaggatctgccaaggaattacaggcaccacggaaacgcacagtcaaagtgacactgacacctctaaaaatggaaaatgagagtcaatccaaaaatgccctgaaagaaagtagtcctgcttcccctttgcaaatagagtcaacatctcccacagaaccaatttcagcctctgaaaatccaggagatggtccagtggcccaaccaagccccaataatacctcatgccaggattctcaaagtaacaactatcagaatcttccagtacaggacagaaacctaatgcttccagatggccccaaacctcaggaggatggctcttttaaaaggaggtatccccgtcgcagtgcccgtgcacgttctaacatgttttttgggcttaccccactctatggagtaagatcctatggtgaagaagacattccattctacagcagctcaactgggaagaagcgaggcaagagatcagctgaaggacaggtggatggggccgatgacttaagcacttcagatgaagacgacttatactattacaacttcactagaacagtgatttcttcaggtggagaggaacgactggcatcccataatttatttcgggaggaggaacagtgtgatcttccaaaaatctcacagttggatggtgttgatgatgggacagagagtgatactagtgtcacagccacaacaaggaaaagcagccagattccaaaaagaaatggtaaagaaaatggaacagagaacttaaagattgatagacctgaagatgctggggagaaagaacatgtcactaagagttctgttggccacaaaaatgagccaaagatggataactgccattctgtaagcagagttaaaacacagggacaagattccttggaagctcagctcagctcattggagtcaagccgcagagtccacacaagtaccccctccgacaaaaatttactggacacctataatactgagctcctgaaatcagattcagacaataacaacagtgatgactgtgggaatatcctgccttcagacattatggactttgtactaaagaatactccatccatgcaggctttgggtgagagcccagagtcatcttcatcagaactcctgaatcttggtgaaggattgggtcttgacagtaatcgtgaaaaagacatgggtctttttgaagtattttctcagcagctgcctacaacagaacctgtggatagtagtgtctcttcctctatctcagcagaggaacagtttgagttgcctctagagctaccatctgatctgtctgtcttgaccacccggagtcccactgtccccagccagaatcccagtagactagctgttatctcagactcaggggagaagagagtaaccatcacagaaaaatctgtagcctcctctgaaagtgacccagcactgctgagcccaggagtagatccaactcctgaaggccacatgactcctgatcattttatccaaggacacatggatgcagaccacatctctagccctccttgtggttcagtagagcaaggtcatggcaacaatcaggatttaactaggaacagtagcacccctggccttcaggtacctgtttccccaactgttcccatccagaaccagaagtatgtgcccaattctactgatagtcctggcccgtctcagatttccaatgcagctgtccagaccactccaccccacctgaagccagccactgagaaactcatagttgttaaccagaacatgcagccactttatgttctccaaactcttccaaatggagtgacccaaaaaatccaattgacctcttctgttagttctacacccagtgtgatggagacaaatacttcagtattgggacccatgggaggtggtctcacccttaccacaggactaaatccaagcttgccaacttctcaatctttgttcccttctgctagcaaaggattgctacccatgtctcatcaccagcacttacattccttccctgcagctactcaaagtagtttcccaccaaacatcagcaatcctccttcaggcctgcttattggggttcagcctcctccggatccccaacttttggtttcagaatccagccagaggacagacctcagtaccacagtagccactccatcctctggactcaagaaaagacccatatctcgtctacagacccgaaagaataaaaaacttgctccctctagtaccccttcaaacattgccccttctgatgtggtttctaatatgacattgattaacttcacaccctcccagcttcctaatcatccaagtctgttagatttggggtcacttaatacttcatctcaccgaactgtccccaacatcataaaaagatctaaatctagcatcatgtattttgaaccggcacccctgttaccacagagtgtgggaggaactgctgccacagcggcaggcacatcaacaataagccaggatactagccacctcacatcagggtctgtgtctggcttggcatccagttcctctgtcttgaatgttgtatccatgcaaactaccacaacccctacaagtagtgcgtcagttccaggacacgtcaccttaaccaacccaaggttgcttggtaccccagatattggctcaataagcaatcttttaatcaaagctagccagcagagcctggggattcaggaccagcctgtggctttaccgccaagttcaggaatgtttccacaactggggacatcacagaccccctctactgctgcaataacagcggcatctagcatctgtgtgctcccctccactcagactacgggcataacagccgcttcaccttctggggaagcagacgaacactatcagcttcagcatgtgaaccagctccttgccagcaaaactgggattcattcttcccagcgtgatcttgattctgcttcagggccccaggtatccaactttacccagacggtagacgctcctaatagcatgggactggagcagaacaaggctttatcctcagctgtgcaagccagccccacctctcctgggggttctccatcctctccatcttctggacagcggtcagcaagcccttcagtgccgggtcccactaaacccaaaccaaaaaccaaacggtttcagctgcctctagacaaagggaatggcaagaagcacaaagtttcccatttgcggaccagttcttctgaagcacacattccagaccaagaaacgacatccctgacctcaggcacagggactccaggagcagaggctgagcagcaggatacagctagcgtggagcagtcctcccagaaggagtgtgggcaacctgcagggcaagtcgctgttcttccggaagttcaggtgacccaaaatccagcaaatgaacaagaaagtgcagaacctaaaacagtggaagaagaggaaagtaatttcagctccccactgatgctttggcttcagcaagaacaaaagcggaaggaaagcattactgagaaaaaacccaagaaaggacttgtttttgaaatttccagtgatgatggctttcagatctgtgcagaaagtattgaagatgcctggaagtcattgacagataaagtccaggaagctcgatcaaatgcccgcctaaagcagctctcatttgcaggtgttaacggtttgaggatgctggggattctccatgatgcagttgtgttcctcattgagcagctgtctggtgccaagcactgtcgaaattacaaattccgtttccacaagccagaggaggccaatgaaccccccttgaaccctcacggctcagccagggctgaagtccacctcaggaagtcagcatttgacatgtttaacttcctggcttctaaacatcgtcagcctcctgaatacaaccccaatgatgaagaagaggaggaggtacagctgaagtcagctcggagggcaactagcatggatctgccaatgcccatgcgcttccggcacttaaaaaagacttctaaggaggcagttggtgtctacaggtctcccatccatggccggggtcttttctgtaagagaaacattgatgcaggtgagatggtgattgagtatgccggcaacgtcatccgctccatccagactgacaagcgggaaaagtattacgacagcaagggcattggttgctatatgttccgaattgatgactcagaggtagtggatgccaccatgcatggaaatgctgcacgcttcatcaatcactcgtgtgagcctaactgctattctcgggtcatcaatattgatgggcagaagcacattgtcatctttgccatgcgtaagatctaccgaggagaggaactcacttacgactataagttccccattgaggatgccagcaacaagctgccctgcaactgtggcgccaagaaatgccggaagttcctaaactaaagctgctcttctcccccagtgttggagtgcaaggaggcggggccatccaaagcaacgctgaaggccttttccagcagctgggagctcccggattgcgtggcacagctgaggggcctctgtgatggctgagctctcttatgtcctatactcacatcagacatgtgatcatagtcccagagacagagttgaggtctcgaagaaaagatccatgatcggctttctcctggggcccctccaattgtttactgttagaaagtgggaatggggtccctagcagacttgcctggaaggagcctattatagagggttggttatgttgggagattgggcctgaatttctccacagaaataagttgccatcctcaggttggccctttcccaagcactgtaagtgagtgggtcaggcaaagccccaaatggagggttggttagattcctgacagtttgccagccaggccccacctacagcgtctgtcgaacaaacagaggtctggtggttttccctactatcctcccactcgagagttcacttctggttgggagacaggattcctagcacctccggtgtcaaaaggctgtcatggggttgtgccaattaattaccaaacattgagcctgcaggctttgagtgggagtgttgcccccaggagccttatctcagccaattacctttcttgacagtaggagcggcttccctctcccattccctcttcactcccttttcttcctttcccctgtcttcatgccactgctttcccatgcttctttcgggttgtaggggagactgactgcctgctcaaggacactccctgctgggcataggatgtgcctgcaaaaagttccctgagcctgtaagcactccaggtggggaagtggacaggagccattggtcataaccagacagaatttggaaacattttcataaagctccatggagagttttaaagaaacatatgtagcatgattttgtaggagaggaaaaagattatttaaataggatttaaatcatgcaacaacgagagtatcacagccaggatgacccttgggtcccattcctaagacatggttactttattttccccttgttaagacataggaagacttaatttttaaacggtcagtgtccagttgaaggcagaacactaatcagatttcaaggcccacaacttggggactagaccaccttatgttgagggaactctgccacctgcgtgcaacccacagctaaagtaaattcaatgacactactgccctgattactccttaggatgtggtcaaaacagcatcaaatgtttcttctcttcctttccccaagacagagtcctgaacctgttaaattaagtcattggattttactctgttctgtttacagtttactatttaaggttttataaatgtaaatatattttgtatatttttctatgagaagcacttcatagggagaagcacttatgacaaggctattttttaaaccgcggtattatcctaatttaaaagaagatcggtttttaataattttttattttcataggatgaagttagagaaaatattcagctgtacacacaaagtctggtttttcctgcccaacttccccctggaaggtgtactttttgttgtttaatgtgtagcttgtttgtgccctgttgacataaatgtttcctgggtttgctctttgacaataaatggagaaggaaggtcacccaactccattgggccactcccctccttcccctattgaagctcctcaaaaggctacagtaatatcttgatacaacagattctcttctttcccgcctctctcctttccggcgcaacttccagagtggtgggagacggcaatctttacatttccctcatctttcttacttcagagttagcaaacaacaagttgaatggcaacttgacatttttgcatcaccatctgcctcataggccactctttcctttccctctgcccaccaagtcctcatatctgcagagaacccattgatcaccttgtgccctcttttggggcagcctgttgaaactgaagcacagtctgaccactcacgataaagcagatttttctctgcctctgccacaaggtttcagagtagtgtagtccaagtagagggtggggcacccttttctcgccgcaagaagcccattcctatggaagtctagcaaagcaatacgactcagcccagcactctctgccccaggactcatggctctgctgtgccttccatcctgggctcccttctctcctgtgaccttaagaactttgtctggtggctttgctggaacattgtcactgttttcactgtcatgcagggagcccagcactgtggccaggatggcagagacttccttgtcatcatggagaagtgccagcaggggactgggaaaagcactctacccagacctcacctcccttcctccttttgcccatgaacaagatgcagtggccctaggggttccactagtgtctgctttcctttattattgcactgtgtgaggtttttttgtaaatccttgtattcctattttttttaaagaaaaaaaaaaaaccttaagctgcatttgttactgaaatgattaatgcactgatgggtcctgaattcaccttgagaaagacccaaaggccagtcagggggtggggggaactcagctaaatagacctagttactgccctgctaggccatgctgtactgtgagcccctcctcactctctaccaaccctaaaccctgaggacaggggaggaacccacagcttccttctcctgccagctgcagatggtttgccttgcctttccaccccctaattgtcaaccacaaaaatgagaaattcctcttctagctcagccttgagtccattgccaaattttcagcacacctgccagcaacttgggggaataagcgaaggtttccctacaagagggaaagaaggcaaaaacggcacagctatctccaaacacatctgagttcatttcaaaagtgaccaagggaatctccgcacaaaagtgcagattgaggaattgtgatgggtcattcccaagaatcccccaaggggcatcccaaatccctgaggagtaacagctgcaaacctggtcagttctcagtgagagccagctcacttatagctttgctgctagaacctgttgtggctgcatttcctggtggccagtgacaactgtgtaaccagaatagctgcatggcgctgaccctttggccggaacttggtctcttggctccctccttggccacccaccacctctcgcacagcccctctgtttttacaccaataacaagaattaagggggaagccctggcagctatacgttttcaaccagactcctttgccgggacccagcccgccaccctgctcgcctccgtcaaacccccggccaatgcagtgagcaccatgtagctcccttgatttaaaaaaaataaaaaataaaaaaaaaaggaaaaaaaaatacaacacacacacaaaaataaaaaaaatattctaatgaatgtatctttctaaaggactgacgttcaatcaaatatctgaaaatactaaaggtcaaaaccttgtcagatgttaacttctaagttcggtttgggattttttttttttaatagaaatcaagttgtttttgtttttaaggtttaaagcaatacaaggttatggagcagatggttttgtgccgaatcatgaatactagtcaagtcacacactctggaaacttgcaactttttgtttgttttggttttcaaataaatataaatatgatatatataggaactaatatagtaatgcaccatgtaacaaagcctagttcagtccatggcttttaattctcttaacactatagataaggattgtgttacagttgctagtagcggcaggaagatgtcaggctcactttcctctgattcccgaaatggggggaacctctaaccataaaggaatggtagaacagtccattcctcggatcagagaaaaatgcagacatggtgtcacctggatttttttctgcccatgaatgttgccagtcagtacctgtcctccttgtttctctatttttggttatgaatgttggggttaccacctgcatttaggggaaaattgtgttctgtgctttcctggtatcttgttccgaggtactctagttctgtctttcaaccaagaaaatagaattgtggtgtttcttttattgaacttttaacagtctctttagtaaatacaggtagttgaataattgtttcaagagctcaacagatgacaagcttcttttctagaaataagacattttttgacaactttatcatgtataacagatctgttttttttccttgtgttcttccaagcttctggttagagaaaaagagaaaaaaaaaaaaggaaaatgtgtctaaagtccatcagtgttaactccctgtgacagggatgaaggaaaatactttaatagttcaaaaaataataatgctgaaagctctctacgaaagactgaatgtaaaagtaaaaagtgtacatagttgtaaaaaaaaggagtttttaaacatgtttattttctatgcacttttttttatttaagtgatagtttaattaataaacatgtcaagtttattgctgcacatggttaagcttccttttggctttggttggagagggtggagaaaagcgggaggggcatggcctgtgacctggtcacaaagtaccttccacagtcctttactttaaggtggcatcactaaattattccctgtagcccaccttcaggtccactccacactggctctcttgactattttcttcctttattcatcagtgatgtatgttcaggacctaattaattgtggatatgaggcagggtcaagaggacaaaggaacagggcctttaccttctacatagctcccctgtttcatccaaggaggttaagtattgatttttatcggttttctcaactgtgaatataataaactgaaagcatttcagggagaagctggagaacaccttctctagctgcactccaccttaaggctgaagctggatttgtt

SEQ ID NO: 370688 - DNA, 16946 bp, Homo sapiens
ctgcttcacttcacggggcgaacatggcgcacagctgtcggtggcgcttccccgcccgacccgggaccaccgggggcggcggcggcggggggcgccggggcctagggggcgccccgcggcaacgcgtcccggccctgctgcttccccccgggcccccggtcggcggtggcggccccggggcgcccccctcccccccggctgtggcggccgcggcggcggcggcgggaagcagcggggctggggttccagggggagcggccgccgcctcagcagcctcctcgtcgtccgcctcgtcttcgtcttcgtcatcgtcctcagcctcttcagggccggccctgctccgggtgggcccgggcttcgacgcggcgctgcaggtctcggccgccatcggcaccaacctgcgccggttccgggccgtgtttggggagagcggcgggggaggcggcagcggagaggatgagcaattcttaggttttggctcagatgaagaagtcagagtgcgaagtcccacaaggtctccttcagttaaaactagtcctcgaaaacctcgtgggagacctagaagtggctctgaccgaaattcagctatcctctcagatccatctgtgttttcccctctaaataaatcagagaccaaatctggagataagatcaagaagaaagattctaaaagtatagaaaagaagagaggaagacctcccaccttccctggagtaaaaatcaaaataacacatggaaaggacatttcagagttaccaaagggaaacaaagaagatagcctgaaaaaaattaaaaggacaccttctgctacgtttcagcaagccacaaagattaaaaaattaagagcaggtaaactctctcctctcaagtctaagtttaagacagggaagcttcaaataggaaggaagggggtacaaattgtacgacggagaggaaggcctccatcaacagaaaggataaagaccccttcgggtctcctcattaattctgaactggaaaagccccagaaagtccggaaagacaaggaaggaacacctccacttacaaaagaagataagacagttgtcagacaaagccctcgaaggattaagccagttaggattattccttcttcaaaaaggacagatgcaaccattgctaagcaactcttacagagggcaaaaaagggggctcaaaagaaaattgaaaaagaagcagctcagctgcagggaagaaaggtgaagacacaggtcaaaaatattcgacagttcatcatgcctgttgtcagtgctatctcctcgcggatcattaagacccctcggcggtttatagaggatgaggattatgaccctccaattaaaattgcccgattagagtctacaccgaatagtagattcagtgccccgtcctgtggatcttctgaaaaatcaagtgcagcttctcagcactcctctcaaatgtcttcagactcctctcgatctagtagccccagtgttgatacctccacagactctcaggcttctgaggagattcaggtacttcctgaggagcggagcgatacccctgaagttcatcctccactgcccatttcccagtccccagaaaatgagagtaatgataggagaagcagaaggtattcagtgtcggagagaagttttggatctagaacgacgaaaaaattatcaactctacaaagtgccccccagcagcagacctcctcgtctccacctccacctctgctgactccaccgccaccactgcagccagcctccagtatctctgaccacacaccttggcttatgcctccaacaatccccttagcatcaccatttttgcctgcttccactgctcctatgcaagggaagcgaaaatctattttgcgagaaccgacatttaggtggacttctttaaagcattctaggtcagagccacaatacttttcctcagcaaagtatgccaaagaaggtcttattcgcaaaccaatatttgataatttccgaccccctccactaactcccgaggacgttggctttgcatctggtttttctgcatctggtaccgctgcttcagcccgattgttttcgccactccattctggaacaaggtttgatatgcacaaaaggagccctcttctgagagctccaagatttactccaagtgaggctcactctagaatatttgagtctgtaaccttgcctagtaatcgaacttctgctggaacatcttcttcaggagtatccaatagaaaaaggaaaagaaaagtgtttagtcctattcgatctgaaccaagatctccttctcactccatgaggacaagaagtggaaggcttagtagttctgagctctcacctctcacccccccgtcttctgtctcttcctcgttaagcatttctgttagtcctcttgccactagtgccttaaacccaacttttacttttccttctcattccctgactcagtctggggaatctgcagagaaaaatcagagaccaaggaagcagactagtgctccggcagagccattttcatcaagtagtcctactcctctcttcccttggtttaccccaggctctcagactgaaagagggagaaataaagacaaggcccccgaggagctgtccaaagatcgagatgctgacaagagcgtggagaaggacaagagtagagagagagaccgggagagagaaaaggagaataagcgggagtcaaggaaagagaaaaggaaaaagggatcagaaattcagagtagttctgctttgtatcctgtgggtagggtttccaaagagaaggttgttggtgaagatgttgccacttcatcttctgccaaaaaagcaacagggcggaagaagtcttcatcacatgattctgggactgatattacttctgtgactcttggggatacaacagctgtcaaaaccaaaatacttataaagaaagggagaggaaatctggaaaaaaccaacttggacctcggcccaactgccccatccctggagaaggagaaaaccctctgcctttccactccttcatctagcactgttaaacattccacttcctccataggctccatgttggctcaggcagacaagcttccaatgactgacaagagggttgccagcctcctaaaaaaggccaaagctcagctctgcaagattgagaagagtaagagtcttaaacaaaccgaccagcccaaagcacagggtcaagaaagtgactcatcagagacctctgtgcgaggaccccggattaaacatgtctgcagaagagcagctgttgcccttggccgaaaacgagctgtgtttcctgatgacatgcccaccctgagtgccttaccatgggaagaacgagaaaagattttgtcttccatggggaatgatgacaagtcatcaattgctggctcagaagatgctgaacctcttgctccacccatcaaaccaattaaacctgtcactagaaacaaggcaccccaggaacctccagtaaagaaaggacgtcgatcgaggcggtgtgggcagtgtcccggctgccaggtgcctgaggactgtggtgtttgtactaattgcttagataagcccaagtttggtggtcgcaatataaagaagcagtgctgcaagatgagaaaatgtcagaatctacaatggatgccttccaaagcctacctgcagaagcaagctaaagctgtgaaaaagaaagagaaaaagtctaagaccagtgaaaagaaagacagcaaagagagcagtgttgtgaagaacgtggtggactctagtcagaaacctaccccatcagcaagagaggatcctgccccaaagaaaagcagtagtgagcctcctccacgaaagcccgtcgaggaaaagagtgaagaagggaatgtctcggcccctgggcctgaatccaaacaggccaccactccagcttccaggaagtcaagcaagcaggtctcccagccagcagtggtcatcccgcctcagccacctactacaggaccgccaagaaaagaagttcccaaaaccactcctagtgagcccaagaaaaagcagcctccaccaccagaatcaggtccagagcagagcaaacagaaaaaagtggctccccgcccaagtatccctgtaaaacaaaaaccaaaagaaaaggaaaaaccacctccggtcaataagcaggagaatgcaggcactttgaacatcctcagcactctctccaatggcaatagttctaagcaaaaaattccagcagatggagtccacaggatcagagtggactttaaggaggattgtgaagcagaaaatgtgtgggagatgggaggcttaggaatcttgacttctgttcctataacacccagggtggtttgctttctctgtgccagtagtgggcatgtagagtttgtgtattgccaagtctgttgtgagcccttccacaagttttgtttagaggagaacgagcgccctctggaggaccagctggaaaattggtgttgtcgtcgttgcaaattctgtcacgtttgtggaaggcaacatcaggctacaaagcagctgctggagtgtaataagtgccgaaacagctatcaccctgagtgcctgggaccaaactaccccaccaaacccacaaagaagaagaaagtctggatctgtaccaagtgtgttcgctgtaagagctgtggatccacaactccaggcaaagggtgggatgcacagtggtctcatgatttctcactgtgtcatgattgcgccaagctctttgctaaaggaaacttctgccctctctgtgacaaatgttatgatgatgatgactatgagagtaagatgatgcaatgtggaaagtgtgatcgctgggtccattccaaatgtgagaatctttcagatgagatgtatgagattctatctaatctgccagaaagtgtggcctacacttgtgtgaactgtactgagcggcaccctgcagagtggcgactggcccttgaaaaagagctgcagatttctctgaagcaagttctgacagctttgttgaattctcggactaccagccatttgctacgctaccggcaggctgccaagcctccagacttaaatcccgagacagaggagagtataccttcccgcagctcccccgaaggacctgatccaccagttcttactgaggtcagcaaacaggatgatcagcagcctttagatctagaaggagtcaagaggaagatggaccaagggaattacacatctgtgttggagttcagtgatgatattgtgaagatcattcaagcagccattaattcagatggaggacagccagaaattaaaaaagccaacagcatggtcaagtccttcttcattcggcaaatggaacgtgtttttccatggttcagtgtcaaaaagtccaggttttgggagccaaataaagtatcaagcaacagtgggatgttaccaaacgcagtgcttccaccttcacttgaccataattatgctcagtggcaggagcgagaggaaaacagccacactgagcagcctcctttaatgaagaaaatcattccagctcccaaacccaaaggtcctggagaaccagactcaccaactcctctgcatcctcctacaccaccaattttgagtactgataggagtcgagaagacagtccagagctgaacccacccccaggcatagaagacaatagacagtgtgcgttatgtttgacttatggtgatgacagtgctaatgatgctggtcgtttactatatattggccaaaatgagtggacacatgtaaattgtgctttgtggtcagcggaagtgtttgaagatgatgacggatcactaaagaatgtgcatatggctgtgatcaggggcaagcagctgagatgtgaattctgccaaaagccaggagccaccgtgggttgctgtctcacatcctgcaccagcaactatcacttcatgtgttcccgagccaagaactgtgtctttctggatgataaaaaagtatattgccaacgacatcgggatttgatcaaaggcgaagtggttcctgagaatggatttgaagttttcagaagagtgtttgtggactttgaaggaatcagcttgagaaggaagtttctcaatggcttggaaccagaaaatatccacatgatgattgggtctatgacaatcgactgcttaggaattctaaatgatctctccgactgtgaagataagctctttcctattggatatcagtgttccagggtatactggagcaccacagatgctcgcaagcgctgtgtatatacatgcaagatagtggagtgccgtcctccagtcgtagagccggatatcaacagcactgttgaacatgatgaaaacaggaccattgcccatagtccaacatcttttacagaaagttcatcaaaagagagtcaaaacacagctgaaattataagtcctccatcaccagaccgacctcctcattcacaaacctctggctcctgttattatcatgtcatctcaaaggtccccaggattcgaacacccagttattctccaacacagagatcccctggctgtcgaccgttgccttctgcaggaagtcctaccccaaccactcatgaaatagtcacagtaggtgatcctttactctcctctggacttcgaagcattggctccaggcgtcacagtacctcttccttatcaccccagcggtccaaactccggataatgtctccaatgagaactgggaatacttactctaggaataatgtttcctcagtctccaccaccgggaccgctactgatcttgaatcaagtgccaaagtagttgatcatgtcttagggccactgaattcaagtactagtttagggcaaaacacttccacctcttcaaatttgcaaaggacagtggttactgtaggcaataaaaacagtcacttggatggatcttcatcttcagaaatgaagcagtccagtgcttcagacttggtgtccaagagctcctctttaaagggagagaagaccaaagtgctgagttccaagagctcagagggatctgcacataatgtggcttaccctggaattcctaaactggccccacaggttcataacacaacatctagagaactgaatgttagtaaaatcggctcctttgctgaaccctcttcagtgtcgttttcttctaaagaggccctctccttcccacacctccatttgagagggcaaaggaatgatcgagaccaacacacagattctacccaatcagcaaactcctctccagatgaagatactgaagtcaaaaccttgaagctatctggaatgagcaacagatcatccattatcaacgaacatatgggatctagttccagagataggagacagaaagggaaaaaatcctgtaaagaaactttcaaagaaaagcattccagtaaatcttttttggaacctggtcaggtgacaactggtgaggaaggaaacttgaagccagagtttatggatgaggttttgactcctgagtatatgggccaacgaccatgtaacaatgtttcttctgataagattggtgataaaggcctttctatgccaggagtccccaaagctccacccatgcaagtagaaggatctgccaaggaattacaggcaccacggaaacgcacagtcaaagtgacactgacacctctaaaaatggaaaatgagagtcaatccaaaaatgccctgaaagaaagtagtcctgcttcccctttgcaaatagagtcaacatctcccacagaaccaatttcagcctctgaaaatccaggagatggtccagtggcccaaccaagccccaataatacctcatgccaggattctcaaagtaacaactatcagaatcttccagtacaggacagaaacctaatgcttccagatggccccaaacctcaggaggatggctcttttaaaaggaggtatccccgtcgcagtgcccgtgcacgttctaacatgttttttgggcttaccccactctatggagtaagatcctatggtgaagaagacattccattctacagcagctcaactgggaagaagcgaggcaagagatcagctgaaggacaggtggatggggccgatgacttaagcacttcagatgaagacgacttatactattacaacttcactagaacagtgatttcttcaggtggagaggaacgactggcatcccataatttatttcgggaggaggaacagtgtgatcttccaaaaatctcacagttggatggtgttgatgatgggacagagagtgatactagtgtcacagccacaacaaggaaaagcagccagattccaaaaagaaatggtaaagaaaatggaacagagaacttaaagattgatagacctgaagatgctggggagaaagaacatgtcactaagagttctgttggccacaaaaatgagccaaagatggataactgccattctgtaagcagagttaaaacacagggacaagattccttggaagctcagctcagctcattggagtcaagccgcagagtccacacaagtaccccctccgacaaaaatttactggacacctataatactgagctcctgaaatcagattcagacaataacaacagtgatgactgtgggaatatcctgccttcagacattatggactttgtactaaagaatactccatccatgcaggctttgggtgagagcccagagtcatcttcatcagaactcctgaatcttggtgaaggattgggtcttgacagtaatcgtgaaaaagacatgggtctttttgaagtattttctcagcagctgcctacaacagaacctgtggatagtagtgtctcttcctctatctcagcagaggaacagtttgagttgcctctagagctaccatctgatctgtctgtcttgaccacccggagtcccactgtccccagccagaatcccagtagactagctgttatctcagactcaggggagaagagagtaaccatcacagaaaaatctgtagcctcctctgaaagtgacccagcactgctgagcccaggagtagatccaactcctgaaggccacatgactcctgatcattttatccaaggacacatggatgcagaccacatctctagccctccttgtggttcagtagagcaaggtcatggcaacaatcaggatttaactaggaacagtagcacccctggccttcaggtacctgtttccccaactgttcccatccagaaccagaagtatgtgcccaattctactgatagtcctggcccgtctcagatttccaatgcagctgtccagaccactccaccccacctgaagccagccactgagaaactcatagttgttaaccagaacatgcagccactttatgttctccaaactcttccaaatggagtgacccaaaaaatccaattgacctcttctgttagttctacacccagtgtgatggagacaaatacttcagtattgggacccatgggaggtggtctcacccttaccacaggactaaatccaagcttgccaacttctcaatctttgttcccttctgctagcaaaggattgctacccatgtctcatcaccagcacttacattccttccctgcagctactcaaagtagtttcccaccaaacatcagcaatcctccttcaggcctgcttattggggttcagcctcctccggatccccaacttttggtttcagaatccagccagaggacagacctcagtaccacagtagccactccatcctctggactcaagaaaagacccatatctcgtctacagacccgaaagaataaaaaacttgctccctctagtaccccttcaaacattgccccttctgatgtggtttctaatatgacattgattaacttcacaccctcccagcttcctaatcatccaagtctgttagatttggggtcacttaatacttcatctcaccgaactgtccccaacatcataaaaagatctaaatctagcatcatgtattttgaaccggcacccctgttaccacagagtgtgggaggaactgctgccacagcggcaggcacatcaacaataagccaggatactagccacctcacatcagggtctgtgtctggcttggcatccagttcctctgtcttgaatgttgtatccatgcaaactaccacaacccctacaagtagtgcgtcagttccaggacacgtcaccttaaccaacccaaggttgcttggtaccccagatattggctcaataagcaatcttttaatcaaagctagccagcagagcctggggattcaggaccagcctgtggctttaccgccaagttcaggaatgtttccacaactggggacatcacagaccccctctactgctgcaataacagcggcatctagcatctgtgtgctcccctccactcagactacgggcataacagccgcttcaccttctggggaagcagacgaacactatcagcttcagcatgtgaaccagctccttgccagcaaaactgggattcattcttcccagcgtgatcttgattctgcttcagggccccaggtatccaactttacccagacggtagacgctcctaatagcatgggactggagcagaacaaggctttatcctcagctgtgcaagccagccccacctctcctgggggttctccatcctctccatcttctggacagcggtcagcaagcccttcagtgccgggtcccactaaacccaaaccaaaaaccaaacggtttcagctgcctctagacaaagggaatggcaagaagcacaaagtttcccatttgcggaccagttcttctgaagcacacattccagaccaagaaacgacatccctgacctcaggcacagggactccaggagcagaggctgagcagcaggatacagctagcgtggagcagtcctcccagaaggagtgtgggcaacctgcagggcaagtcgctgttcttccggaagttcaggtgacccaaaatccagcaaatgaacaagaaagtgcagaacctaaaacagtggaagaagaggaaagtaatttcagctccccactgatgctttggcttcagcaagaacaaaagcggaaggaaagcattactgagaaaaaacccaagaaaggacttgtttttgaaatttccagtgatgatggctttcagatctgtgcagaaagtattgaagatgcctggaagtcattgacagataaagtccaggaagctcgatcaaatgcccgcctaaagcagctctcatttgcaggtgttaacggtttgaggatgctggggattctccatgatgcagttgtgttcctcattgagcagctgtctggtgccaagcactgtcgaaattacaaattccgtttccacaagccagaggaggccaatgaaccccccttgaaccctcacggctcagccagggctgaagtccacctcaggaagtcagcatttgacatgtttaacttcctggcttctaaacatcgtcagcctcctgaatacaaccccaatgatgaagaagaggaggaggtacagctgaagtcagctcggagggcaactagcatggatctgccaatgcccatgcgcttccggcacttaaaaaagacttctaaggaggcagttggtgtctacaggtctcccatccatggccggggtcttttctgtaagagaaacattgatgcaggtgagatggtgattgagtatgccggcaacgtcatccgctccatccagactgacaagcgggaaaagtattacgacagcaagggcattggttgctatatgttccgaattgatgactcagaggtagtggatgccaccatgcatggaaatgctgcacgcttcatcaatcactcgtgtgagcctaactgctattctcgggtcatcaatattgatgggcagaagcacattgtcatctttgccatgcgtaagatctaccgaggagaggaactcacttacgactataagttccccattgaggatgccagcaacaagctgccctgcaactgtggcgccaagaaatgccggaagttcctaaactaaagctgctcttctcccccagtgttggagtgcaaggaggcggggccatccaaagcaacgctgaaggccttttccagcagctgggagctcccggattgcgtggcacagctgaggggcctctgtgatggctgagctctcttatgtcctatactcacatcagacatgtgatcatagtcccagagacagagttgaggtctcgaagaaaagatccatgatcggctttctcctggggcccctccaattgtttactgttagaaagtgggaatggggtccctagcagacttgcctggaaggagcctattatagagggttggttatgttgggagattgggcctgaatttctccacagaaataagttgccatcctcaggttggccctttcccaagcactgtaagtgagtgggtcaggcaaagccccaaatggagggttggttagattcctgacagtttgccagccaggccccacctacagcgtctgtcgaacaaacagaggtctggtggttttccctactatcctcccactcgagagttcacttctggttgggagacaggattcctagcacctccggtgtcaaaaggctgtcatggggttgtgccaattaattaccaaacattgagcctgcaggctttgagtgggagtgttgcccccaggagccttatctcagccaattacctttcttgacagtaggagcggcttccctctcccattccctcttcactcccttttcttcctttcccctgtcttcatgccactgctttcccatgcttctttcgggttgtaggggagactgactgcctgctcaaggacactccctgctgggcataggatgtgcctgcaaaaagttccctgagcctgtaagcactccaggtggggaagtggacaggagccattggtcataaccagacagaatttggaaacattttcataaagctccatggagagttttaaagaaacatatgtagcatgattttgtaggagaggaaaaagattatttaaataggatttaaatcatgcaacaacgagagtatcacagccaggatgacccttgggtcccattcctaagacatggttactttattttccccttgttaagacataggaagacttaatttttaaacggtcagtgtccagttgaaggcagaacactaatcagatttcaaggcccacaacttggggactagaccaccttatgttgagggaactctgccacctgcgtgcaacccacagctaaagtaaattcaatgacactactgccctgattactccttaggatgtggtcaaaacagcatcaaatgtttcttctcttcctttccccaagacagagtcctgaacctgttaaattaagtcattggattttactctgttctgtttacagtttactatttaaggttttataaatgtaaatatattttgtatatttttctatgagaagcacttcatagggagaagcacttatgacaaggctattttttaaaccgcggtattatcctaatttaaaagaagatcggtttttaataattttttattttcataggatgaagttagagaaaatattcagctgtacacacaaagtctggtttttcctgcccaacttccccctggaaggtgtactttttgttgtttaatgtgtagcttgtttgtgccctgttgacataaatgtttcctgggtttgctctttgacaataaatggagaaggaaggtcacccaactccattgggccactcccctccttcccctattgaagctcctcaaaaggctacagtaatatcttgatacaacagattctcttctttcccgcctctctcctttccggcgcaacttccagagtggtgggagacggcaatctttacatttccctcatctttcttacttcagagttagcaaacaacaagttgaatggcaacttgacatttttgcatcaccatctgcctcataggccactctttcctttccctctgcccaccaagtcctcatatctgcagagaacccattgatcaccttgtgccctcttttggggcagcctgttgaaactgaagcacagtctgaccactcacgataaagcagatttttctctgcctctgccacaaggtttcagagtagtgtagtccaagtagagggtggggcacccttttctcgccgcaagaagcccattcctatggaagtctagcaaagcaatacgactcagcccagcactctctgccccaggactcatggctctgctgtgccttccatcctgggctcccttctctcctgtgaccttaagaactttgtctggtggctttgctggaacattgtcactgttttcactgtcatgcagggagcccagcactgtggccaggatggcagagacttccttgtcatcatggagaagtgccagcaggggactgggaaaagcactctacccagacctcacctcccttcctccttttgcccatgaacaagatgcagtggccctaggggttccactagtgtctgctttcctttattattgcactgtgtgaggtttttttgtaaatccttgtattcctattttttttaaagaaaaaaaaaaaaccttaagctgcatttgttactgaaatgattaatgcactgatgggtcctgaattcaccttgagaaagacccaaaggccagtcagggggtggggggaactcagctaaatagacctagttactgccctgctaggccatgctgtactgtgagcccctcctcactctctaccaaccctaaaccctgaggacaggggaggaacccacagcttccttctcctgccagctgcagatggtttgccttgcctttccaccccctaattgtcaaccacaaaaatgagaaattcctcttctagctcagccttgagtccattgcaaaaacggcacagctatctccaaacacatctgagttcatttcaaaagtgaccaagggaatctccgcacaaaagtgcagattgaggaattgtgatgggtcattcccaagaatcccccaaggggcatcccaaatccctgaggagtaacagctgcaaacctggtcagttctcagtgagagccagctcacttatagctttgctgctagaacctgttgtggctgcatttcctggtggccagtgacaactgtgtaaccagaatagctgcatggcgctgaccctttggccggaacttggtctcttggctccctccttggccacccaccacctctcgcacagcccctctgtttttacaccaataacaagaattaagggggaagccctggcagctatacgttttcaaccagactcctttgccgggacccagcccgccaccctgctcgcctccgtcaaacccccggccaatgcagtgagcaccatgtagctcccttgatttaaaaaaaataaaaaataaaaaaaaaaggaaaaaaaaatacaacacacacacaaaaataaaaaaaatattctaatgaatgtatctttctaaaggactgacgttcaatcaaatatctgaaaatactaaaggtcaaaaccttgtcagatgttaacttctaagttcggtttgggattttttttttttaatagaaatcaagttgtttttgtttttaaggaaaagcgggtcattgcaaagggctgggtgtaattttatgtttcatttccttcattttaaagcaatacaaggttatggagcagatggttttgtgccgaatcatgaatactagtcaagtcacacactctggaaacttgcaactttttgtttgttttggttttcaaataaatataaatatgatatatataggaactaatatagtaatgcaccatgtaacaaagcctagttcagtccatggcttttaattctcttaacactatagataaggattgtgttacagttgctagtagcggcaggaagatgtcaggctcactttcctctgattcccgaaatggggggaacctctaaccataaaggaatggtagaacagtccattcctcggatcagagaaaaatgcagacatggtgtcacctggatttttttctgcccatgaatgttgccagtcagtacctgtcctccttgtttctctatttttggttatgaatgttggggttaccacctgcatttaggggaaaattgtgttctgtgctttcctggtatcttgttccgaggtactctagttctgtctttcaaccaagaaaatagaattgtggtgtttcttttattgaacttttaacagtctctttagtaaatacaggtagttgaataattgtttcaagagctcaacagatgacaagcttcttttctagaaataagacattttttgacaactttatcatgtataacagatctgttttttttccttgtgttcttccaagcttctggttagagaaaaagagaaaaaaaaaaaaggaaaatgtgtctaaagtccatcagtgttaactccctgtgacagggatgaaggaaaatactttaatagttcaaaaaataataatgctgaaagctctctacgaaagactgaatgtaaaagtaaaaagtgtacatagttgtaaaaaaaaggagtttttaaacatgtttattttctatgcacttttttttatttaagtgatagtttaattaataaacatgtcaagtttattgctgcacatggttaagcttccttttggctttggttggagagggtggagaaaagcgggaggggcatggcctgtgacctggtcacaaagtaccttccacagtcctttactttaaggtggcatcactaaattattccctgtagcccaccttcaggtccactccacactggctctcttgactattttcttcctttattcatcagtgatgtatgttcaggacctaattaattgtggatatgaggcagggtcaagaggacaaaggaacagggcctttaccttctacatagctcccctgtttcatccaaggaggttaagtattgatttttatcggttttctcaactgtgaatataataaactgaaagcatttcagggagaagctggagaacaccttctctagctgcactccaccttaaggctgaagctggatttgtt

SEQ ID NO: 370689 - DNA, 16963 bp, Homo sapiens
ctgcttcacttcacggggcgaacatggcgcacagctgtcggtggcgcttccccgcccgacccgggaccaccgggggcggcggcggcggggggcgccggggcctagggggcgccccgcggcaacgcgtcccggccctgctgcttccccccgggcccccggtcggcggtggcggccccggggcgcccccctcccccccggctgtggcggccgcggcggcggcggcgggaagcagcggggctggggttccagggggagcggccgccgcctcagcagcctcctcgtcgtccgcctcgtcttcgtcttcgtcatcgtcctcagcctcttcagggccggccctgctccgggtgggcccgggcttcgacgcggcgctgcaggtctcggccgccatcggcaccaacctgcgccggttccgggccgtgtttggggagagcggcgggggaggcggcagcggagaggatgagcaattcttaggttttggctcagatgaagaagtcagagtgcgaagtcccacaaggtctccttcagttaaaactagtcctcgaaaacctcgtgggagacctagaagtggctctgaccgaaattcagctatcctctcagatccatctgtgttttcccctctaaataaatcagagaccaaatctggagataagatcaagaagaaagattctaaaagtatagaaaagaagagaggaagacctcccaccttccctggagtaaaaatcaaaataacacatggaaaggacatttcagagttaccaaagggaaacaaagaagatagcctgaaaaaaattaaaaggacaccttctgctacgtttcagcaagccacaaagattaaaaaattaagagcaggtaaactctctcctctcaagtctaagtttaagacagggaagcttcaaataggaaggaagggggtacaaattgtacgacggagaggaaggcctccatcaacagaaaggataaagaccccttcgggtctcctcattaattctgaactggaaaagccccagaaagtccggaaagacaaggaaggaacacctccacttacaaaagaagataagacagttgtcagacaaagccctcgaaggattaagccagttaggattattccttcttcaaaaaggacagatgcaaccattgctaagcaactcttacagagggcaaaaaagggggctcaaaagaaaattgaaaaagaagcagctcagctgcagggaagaaaggtgaagacacaggtcaaaaatattcgacagttcatcatgcctgttgtcagtgctatctcctcgcggatcattaagacccctcggcggtttatagaggatgaggattatgaccctccaattaaaattgcccgattagagtctacaccgaatagtagattcagtgccccgtcctgtggatcttctgaaaaatcaagtgcagcttctcagcactcctctcaaatgtcttcagactcctctcgatctagtagccccagtgttgatacctccacagactctcaggcttctgaggagattcaggtacttcctgaggagcggagcgatacccctgaagttcatcctccactgcccatttcccagtccccagaaaatgagagtaatgataggagaagcagaaggtattcagtgtcggagagaagttttggatctagaacgacgaaaaaattatcaactctacaaagtgccccccagcagcagacctcctcgtctccacctccacctctgctgactccaccgccaccactgcagccagcctccagtatctctgaccacacaccttggcttatgcctccaacaatccccttagcatcaccatttttgcctgcttccactgctcctatgcaagggaagcgaaaatctattttgcgagaaccgacatttaggtggacttctttaaagcattctaggtcagagccacaatacttttcctcagcaaagtatgccaaagaaggtcttattcgcaaaccaatatttgataatttccgaccccctccactaactcccgaggacgttggctttgcatctggtttttctgcatctggtaccgctgcttcagcccgattgttttcgccactccattctggaacaaggtttgatatgcacaaaaggagccctcttctgagagctccaagatttactccaagtgaggctcactctagaatatttgagtctgtaaccttgcctagtaatcgaacttctgctggaacatcttcttcaggagtatccaatagaaaaaggaaaagaaaagtgtttagtcctattcgatctgaaccaagatctccttctcactccatgaggacaagaagtggaaggcttagtagttctgagctctcacctctcacccccccgtcttctgtctcttcctcgttaagcatttctgttagtcctcttgccactagtgccttaaacccaacttttacttttccttctcattccctgactcagtctggggaatctgcagagaaaaatcagagaccaaggaagcagactagtgctccggcagagccattttcatcaagtagtcctactcctctcttcccttggtttaccccaggctctcagactgaaagagggagaaataaagacaaggcccccgaggagctgtccaaagatcgagatgctgacaagagcgtggagaaggacaagagtagagagagagaccgggagagagaaaaggagaataagcgggagtcaaggaaagagaaaaggaaaaagggatcagaaattcagagtagttctgctttgtatcctgtgggtagggtttccaaagagaaggttgttggtgaagatgttgccacttcatcttctgccaaaaaagcaacagggcggaagaagtcttcatcacatgattctgggactgatattacttctgtgactcttggggatacaacagctgtcaaaaccaaaatacttataaagaaagggagaggaaatctggaaaaaaccaacttggacctcggcccaactgccccatccctggagaaggagaaaaccctctgcctttccactccttcatctagcactgttaaacattccacttcctccataggctccatgttggctcaggcagacaagcttccaatgactgacaagagggttgccagcctcctaaaaaaggccaaagctcagctctgcaagattgagaagagtaagagtcttaaacaaaccgaccagcccaaagcacagggtcaagaaagtgactcatcagagacctctgtgcgaggaccccggattaaacatgtctgcagaagagcagctgttgcccttggccgaaaacgagctgtgtttcctgatgacatgcccaccctgagtgccttaccatgggaagaacgagaaaagattttgtcttccatggggaatgatgacaagtcatcaattgctggctcagaagatgctgaacctcttgctccacccatcaaaccaattaaacctgtcactagaaacaaggcaccccaggaacctccagtaaagaaaggacgtcgatcgaggcggtgtgggcagtgtcccggctgccaggtgcctgaggactgtggtgtttgtactaattgcttagataagcccaagtttggtggtcgcaatataaagaagcagtgctgcaagatgagaaaatgtcagaatctacaatggatgccttccaaagcctacctgcagaagcaagctaaagctgtgaaaaagaaagagaaaaagtctaagaccagtgaaaagaaagacagcaaagagagcagtgttgtgaagaacgtggtggactctagtcagaaacctaccccatcagcaagagaggatcctgccccaaagaaaagcagtagtgagcctcctccacgaaagcccgtcgaggaaaagagtgaagaagggaatgtctcggcccctgggcctgaatccaaacaggccaccactccagcttccaggaagtcaagcaagcaggtctcccagccagcagtggtcatcccgcctcagccacctactacaggaccgccaagaaaagaagttcccaaaaccactcctagtgagcccaagaaaaagcagcctccaccaccagaatcaggtccagagcagagcaaacagaaaaaagtggctccccgcccaagtatccctgtaaaacaaaaaccaaaagaaaaggaaaaaccacctccggtcaataagcaggagaatgcaggcactttgaacatcctcagcactctctccaatggcaatagttctaagcaaaaaattccagcagatggagtccacaggatcagagtggactttaaggaggattgtgaagcagaaaatgtgtgggagatgggaggcttaggaatcttgacttctgttcctataacacccagggtggtttgctttctctgtgccagtagtgggcatgtagagtttgtgtattgccaagtctgttgtgagcccttccacaagttttgtttagaggagaacgagcgccctctggaggaccagctggaaaattggtgttgtcgtcgttgcaaattctgtcacgtttgtggaaggcaacatcaggctacaaagcagctgctggagtgtaataagtgccgaaacagctatcaccctgagtgcctgggaccaaactaccccaccaaacccacaaagaagaagaaagtctggatctgtaccaagtgtgttcgctgtaagagctgtggatccacaactccaggcaaagggtgggatgcacagtggtctcatgatttctcactgtgtcatgattgcgccaagctctttgctaaaggaaacttctgccctctctgtgacaaatgttatgatgatgatgactatgagagtaagatgatgcaatgtggaaagtgtgatcgctgggtccattccaaatgtgagaatctttcagatgagatgtatgagattctatctaatctgccagaaagtgtggcctacacttgtgtgaactgtactgagcggcaccctgcagagtggcgactggcccttgaaaaagagctgcagatttctctgaagcaagttctgacagctttgttgaattctcggactaccagccatttgctacgctaccggcaggctgccaagcctccagacttaaatcccgagacagaggagagtataccttcccgcagctcccccgaaggacctgatccaccagttcttactgaggtcagcaaacaggatgatcagcagcctttagatctagaaggagtcaagaggaagatggaccaagggaattacacatctgtgttggagttcagtgatgatattgtgaagatcattcaagcagccattaattcagatggaggacagccagaaattaaaaaagccaacagcatggtcaagtccttcttcattcggcaaatggaacgtgtttttccatggttcagtgtcaaaaagtccaggttttgggagccaaataaagtatcaagcaacagtgggatgttaccaaacgcagtgcttccaccttcacttgaccataattatgctcagtggcaggagcgagaggaaaacagccacactgagcagcctcctttaatgaagaaaatcattccagctcccaaacccaaaggtcctggagaaccagactcaccaactcctctgcatcctcctacaccaccaattttgagtactgataggagtcgagaagacagtccagagctgaacccacccccaggcatagaagacaatagacagtgtgcgttatgtttgacttatggtgatgacagtgctaatgatgctggtcgtttactatatattggccaaaatgagtggacacatgtaaattgtgctttgtggtcagcggaagtgtttgaagatgatgacggatcactaaagaatgtgcatatggctgtgatcaggggcaagcagctgagatgtgaattctgccaaaagccaggagccaccgtgggttgctgtctcacatcctgcaccagcaactatcacttcatgtgttcccgagccaagaactgtgtctttctggatgataaaaaagtatattgccaacgacatcgggatttgatcaaaggcgaagtggttcctgagaatggatttgaagttttcagaagagtgtttgtggactttgaaggaatcagcttgagaaggaagtttctcaatggcttggaaccagaaaatatccacatgatgattgggtctatgacaatcgactgcttaggaattctaaatgatctctccgactgtgaagataagctctttcctattggatatcagtgttccagggtatactggagcaccacagatgctcgcaagcgctgtgtatatacatgcaagatagtggagtgccgtcctccagtcgtagagccggatatcaacagcactgttgaacatgatgaaaacaggaccattgcccatagtccaacatcttttacagaaagttcatcaaaagagagtcaaaacacagctgaaattataagtcctccatcaccagaccgacctcctcattcacaaacctctggctcctgttattatcatgtcatctcaaaggtccccaggattcgaacacccagttattctccaacacagagatcccctggctgtcgaccgttgccttctgcaggaagtcctaccccaaccactcatgaaatagtcacagtaggtgatcctttactctcctctggacttcgaagcattggctccaggcgtcacagtacctcttccttatcaccccagcggtccaaactccggataatgtctccaatgagaactgggaatacttactctaggaataatgtttcctcagtctccaccaccgggaccgctactgatcttgaatcaagtgccaaagtagttgatcatgtcttagggccactgaattcaagtactagtttagggcaaaacacttccacctcttcaaatttgcaaaggacagtggttactgtaggcaataaaaacagtcacttggatggatcttcatcttcagaaatgaagcagtccagtgcttcagacttggtgtccaagagctcctctttaaagggagagaagaccaaagtgctgagttccaagagctcagagggatctgcacataatgtggcttaccctggaattcctaaactggccccacaggttcataacacaacatctagagaactgaatgttagtaaaatcggctcctttgctgaaccctcttcagtgtcgttttcttctaaagaggccctctccttcccacacctccatttgagagggcaaaggaatgatcgagaccaacacacagattctacccaatcagcaaactcctctccagatgaagatactgaagtcaaaaccttgaagctatctggaatgagcaacagatcatccattatcaacgaacatatgggatctagttccagagataggagacagaaagggaaaaaatcctgtaaagaaactttcaaagaaaagcattccagtaaatcttttttggaacctggtcaggtgacaactggtgaggaaggaaacttgaagccagagtttatggatgaggttttgactcctgagtatatgggccaacgaccatgtaacaatgtttcttctgataagattggtgataaaggcctttctatgccaggagtccccaaagctccacccatgcaagtagaaggatctgccaaggaattacaggcaccacggaaacgcacagtcaaagtgacactgacacctctaaaaatggaaaatgagagtcaatccaaaaatgccctgaaagaaagtagtcctgcttcccctttgcaaatagagtcaacatctcccacagaaccaatttcagcctctgaaaatccaggagatggtccagtggcccaaccaagccccaataatacctcatgccaggattctcaaagtaacaactatcagaatcttccagtacaggacagaaacctaatgcttccagatggccccaaacctcaggaggatggctcttttaaaaggaggtatccccgtcgcagtgcccgtgcacgttctaacatgttttttgggcttaccccactctatggagtaagatcctatggtgaagaagacattccattctacagcagctcaactgggaagaagcgaggcaagagatcagctgaaggacaggtggatggggccgatgacttaagcacttcagatgaagacgacttatactattacaacttcactagaacagtgatttcttcaggtggagaggaacgactggcatcccataatttatttcgggaggaggaacagtgtgatcttccaaaaatctcacagttggatggtgttgatgatgggacagagagtgatactagtgtcacagccacaacaaggaaaagcagccagattccaaaaagaaatggtaaagaaaatggaacagagaacttaaagattgatagacctgaagatgctggggagaaagaacatgtcactaagagttctgttggccacaaaaatgagccaaagatggataactgccattctgtaagcagagttaaaacacagggacaagattccttggaagctcagctcagctcattggagtcaagccgcagagtccacacaagtaccccctccgacaaaaatttactggacacctataatactgagctcctgaaatcagattcagacaataacaacagtgatgactgtgggaatatcctgccttcagacattatggactttgtactaaagaatactccatccatgcaggctttgggtgagagcccagagtcatcttcatcagaactcctgaatcttggtgaaggattgggtcttgacagtaatcgtgaaaaagacatgggtctttttgaagtattttctcagcagctgcctacaacagaacctgtggatagtagtgtctcttcctctatctcagcagaggaacagtttgagttgcctctagagctaccatctgatctgtctgtcttgaccacccggagtcccactgtccccagccagaatcccagtagactagctgttatctcagactcaggggagaagagagtaaccatcacagaaaaatctgtagcctcctctgaaagtgacccagcactgctgagcccaggagtagatccaactcctgaaggccacatgactcctgatcattttatccaaggacacatggatgcagaccacatctctagccctccttgtggttcagtagagcaaggtcatggcaacaatcaggatttaactaggaacagtagcacccctggccttcaggtacctgtttccccaactgttcccatccagaaccagaagtatgtgcccaattctactgatagtcctggcccgtctcagatttccaatgcagctgtccagaccactccaccccacctgaagccagccactgagaaactcatagttgttaaccagaacatgcagccactttatgttctccaaactcttccaaatggagtgacccaaaaaatccaattgacctcttctgttagttctacacccagtgtgatggagacaaatacttcagtattgggacccatgggaggtggtctcacccttaccacaggactaaatccaagcttgccaacttctcaatctttgttcccttctgctagcaaaggattgctacccatgtctcatcaccagcacttacattccttccctgcagctactcaaagtagtttcccaccaaacatcagcaatcctccttcaggcctgcttattggggttcagcctcctccggatccccaacttttggtttcagaatccagccagaggacagacctcagtaccacagtagccactccatcctctggactcaagaaaagacccatatctcgtctacagacccgaaagaataaaaaacttgctccctctagtaccccttcaaacattgccccttctgatgtggtttctaatatgacattgattaacttcacaccctcccagcttcctaatcatccaagtctgttagatttggggtcacttaatacttcatctcaccgaactgtccccaacatcataaaaagatctaaatctagcatcatgtattttgaaccggcacccctgttaccacagagtgtgggaggaactgctgccacagcggcaggcacatcaacaataagccaggatactagccacctcacatcagggtctgtgtctggcttggcatccagttcctctgtcttgaatgttgtatccatgcaaactaccacaacccctacaagtagtgcgtcagttccaggacacgtcaccttaaccaacccaaggttgcttggtaccccagatattggctcaataagcaatcttttaatcaaagctagccagcagagcctggggattcaggaccagcctgtggctttaccgccaagttcaggaatgtttccacaactggggacatcacagaccccctctactgctgcaataacagcggcatctagcatctgtgtgctcccctccactcagactacgggcataacagccgcttcaccttctggggaagcagacgaacactatcagcttcagcatgtgaaccagctccttgccagcaaaactgggattcattcttcccagcgtgatcttgattctgcttcagggccccaggtatccaactttacccagacggtagacgctcctaatagcatgggactggagcagaacaaggctttatcctcagctgtgcaagccagccccacctctcctgggggttctccatcctctccatcttctggacagcggtcagcaagcccttcagtgccgggtcccactaaacccaaaccaaaaaccaaacggtttcagctgcctctagacaaagggaatggcaagaagcacaaagtttcccatttgcggaccagttcttctgaagcacacattccagaccaagaaacgacatccctgacctcaggcacagggactccaggagcagaggctgagcagcaggatacagctagcgtggagcagtcctcccagaaggagtgtgggcaacctgcagggcaagtcgctgttcttccggaagttcaggtgacccaaaatccagcaaatgaacaagaaagtgcagaacctaaaacagtggaagaagaggaaagtaatttcagctccccactgatgctttggcttcagcaagaacaaaagcggaaggaaagcattactgagaaaaaacccaagaaaggacttgtttttgaaatttccagtgatgatggctttcagatctgtgcagaaagtattgaagatgcctggaagtcattgacagataaagtccaggaagctcgatcaaatgcccgcctaaagcagctctcatttgcaggtgttaacggtttgaggatgctggggattctccatgatgcagttgtgttcctcattgagcagctgtctggtgccaagcactgtcgaaattacaaattccgtttccacaagccagaggaggccaatgaaccccccttgaaccctcacggctcagccagggctgaagtccacctcaggaagtcagcatttgacatgtttaacttcctggcttctaaacatcgtcagcctcctgaatacaaccccaatgatgaagaagaggaggaggtacagctgaagtcagctcggagggcaactagcatggatctgccaatgcccatgcgcttccggcacttaaaaaagacttctaaggaggcagttggtgtctacaggtctcccatccatggccggggtcttttctgtaagagaaacattgatgcaggtgagatggtgattgagtatgccggcaacgtcatccgctccatccagactgacaagcgggaaaagtattacgacagcaagggcattggttgctatatgttccgaattgatgactcagaggtagtggatgccaccatgcatggaaatgctgcacgcttcatcaatcactcgtgtgagcctaactgctattctcgggtcatcaatattgatgggcagaagcacattgtcatctttgccatgcgtaagatctaccgaggagaggaactcacttacgactataagttccccattgaggatgccagcaacaagctgccctgcaactgtggcgccaagaaatgccggaagttcctaaactaaagctgctcttctcccccagtgttggagtgcaaggaggcggggccatccaaagcaacgctgaaggccttttccagcagctgggagctcccggattgcgtggcacagctgaggggcctctgtgatggctgagctctcttatgtcctatactcacatcagacatgtgatcatagtcccagagacagagttgaggtctcgaagaaaagatccatgatcggctttctcctggggcccctccaattgtttactgttagaaagtgggaatggggtccctagcagacttgcctggaaggagcctattatagagggttggttatgttgggagattgggcctgaatttctccacagaaataagttgccatcctcaggttggccctttcccaagcactgtaagtgagtgggtcaggcaaagccccaaatggagggttggttagattcctgacagtttgccagccaggccccacctacagcgtctgtcgaacaaacagaggtctggtggttttccctactatcctcccactcgagagttcacttctggttgggagacaggattcctagcacctccggtgtcaaaaggctgtcatggggttgtgccaattaattaccaaacattgagcctgcaggctttgagtgggagtgttgcccccaggagccttatctcagccaattacctttcttgacagtaggagcggcttccctctcccattccctcttcactcccttttcttcctttcccctgtcttcatgccactgctttcccatgcttctttcgggttgtaggggagactgactgcctgctcaaggacactccctgctgggcataggatgtgcctgcaaaaagttccctgagcctgtaagcactccaggtggggaagtggacaggagccattggtcataaccagacagaatttggaaacattttcataaagctccatggagagttttaaagaaacatatgtagcatgattttgtaggagaggaaaaagattatttaaataggatttaaatcatgcaacaacgagagtatcacagccaggatgacccttgggtcccattcctaagacatggttactttattttccccttgttaagacataggaagacttaatttttaaacggtcagtgtccagttgaaggcagaacactaatcagatttcaaggcccacaacttggggactagaccaccttatgttgagggaactctgccacctgcgtgcaacccacagctaaagtaaattcaatgacactactgccctgattactccttaggatgtggtcaaaacagcatcaaatgtttcttctcttcctttccccaagacagagtcctgaacctgttaaattaagtcattggattttactctgttctgtttacagtttactatttaaggttttataaatgtaaatatattttgtatatttttctatgagaagcacttcatagggagaagcacttatgacaaggctattttttaaaccgcggtattatcctaatttaaaagaagatcggtttttaataattttttattttcataggatgaagttagagaaaatattcagctgtacacacaaagtctggtttttcctgcccaacttccccctggaaggtgtactttttgttgtttaatgtgtagcttgtttgtgccctgttgacataaatgtttcctgggtttgctctttgacaataaatggagaaggaaggtcacccaactccattgggccactcccctccttcccctattgaagctcctcaaaaggctacagtaatatcttgatacaacagattctcttctttcccgcctctctcctttccggcgcaacttccagagtggtgggagacggcaatctttacatttccctcatctttcttacttcagagttagcaaacaacaagttgaatggcaacttgacatttttgcatcaccatctgcctcataggccactctttcctttccctctgcccaccaagtcctcatatctgcagagaacccattgatcaccttgtgccctcttttggggcagcctgttgaaactgaagcacagtctgaccactcacgataaagcagatttttctctgcctctgccacaaggtttcagagtagtgtagtccaagtagagggtggggcacccttttctcgccgcaagaagcccattcctatggaagtctagcaaagcaatacgactcagcccagcactctctgccccaggactcatggctctgctgtgccttccatcctgggctcccttctctcctgtgaccttaagaactttgtctggtggctttgctggaacattgtcactgttttcactgtcatgcagggagcccagcactgtggccaggatggcagagacttccttgtcatcatggagaagtgccagcaggggactgggaaaagcactctacccagacctcacctcccttcctccttttgcccatgaacaagatgcagtggccctaggggttccactagtgtctgctttcctttattattgcactgtgtgaggtttttttgtaaatccttgtattcctattttttttaaagaaaaaaaaaaaaccttaagctgcatttgttactgaaatgattaatgcactgatgggtcctgaattcaccttgagaaagacccaaaggccagtcagggggtggggggaactcagctaaatagacctagttactgccctgctaggccatgctgtactgtgagcccctcctcactctctaccaaccctaaaccctgaggacaggggaggaacccacagcttccttctcctgccagctgcagatggtttgccttgcctttccaccccctaattgtcaaccacaaaaatgagaaattcctcttctagctcagccttgagtccattgccaaattttcagcacacctgccagcaacttgggggaataagcgaaggtttccctacaagagggaaagaaggcaaaaacggcacagctatctccaaacacatctgagttcatttcaaaagtgaccaagggaatctccgcaccatcccaaatccctgaggagtaacagctgcaaacctggtcagttctcagtgagagccagctcacttatagctttgctgctagaacctgttgtggctgcatttcctggtggccagtgacaactgtgtaaccagaatagctgcatggcgctgaccctttggccggaacttggtctcttggctccctccttggccacccaccacctctcgcacagcccctctgtttttacaccaataacaagaattaagggggaagccctggcagctatacgttttcaaccagactcctttgccgggacccagcccgccaccctgctcgcctccgtcaaacccccggccaatgcagtgagcaccatgtagctcccttgatttaaaaaaaataaaaaataaaaaaaaaaggaaaaaaaaatacaacacacacacaaaaataaaaaaaatattctaatgaatgtatctttctaaaggactgacgttcaatcaaatatctgaaaatactaaaggtcaaaaccttgtcagatgttaacttctaagttcggtttgggattttttttttttaatagaaatcaagttgtttttgtttttaaggaaaagcgggtcattgcaaagggctgggtgtaattttatgtttcatttccttcattttaaagcaatacaaggttatggagcagatggttttgtgccgaatcatgaatactagtcaagtcacacactctggaaacttgcaactttttgtttgttttggttttcaaataaatataaatatgatatatataggaactaatatagtaatgcaccatgtaacaaagcctagttcagtccatggcttttaattctcttaacactatagataaggattgtgttacagttgctagtagcggcaggaagatgtcaggctcactttcctctgattcccgaaatggggggaacctctaaccataaaggaatggtagaacagtccattcctcggatcagagaaaaatgcagacatggtgtcacctggatttttttctgcccatgaatgttgccagtcagtacctgtcctccttgtttctctatttttggttatgaatgttggggttaccacctgcatttaggggaaaattgtgttctgtgctttcctggtatcttgttccgaggtactctagttctgtctttcaaccaagaaaatagaattgtggtgtttcttttattgaacttttaacagtctctttagtaaatacaggtagttgaataattgtttcaagagctcaacagatgacaagcttcttttctagaaataagacattttttgacaactttatcatgtataacagatctgttttttttccttgtgttcttccaagcttctggttagagaaaaagagaaaaaaaaaaaaggaaaatgtgtctaaagtccatcagtgttaactccctgtgacagggatgaaggaaaatactttaatagttcaaaaaataataatgctgaaagctctctacgaaagactgaatgtaaaagtaaaaagtgtacatagttgtaaaaaaaaggagtttttaaacatgtttattttctatgcacttttttttatttaagtgatagtttaattaataaacatgtcaagtttattgctgcacatggttaagcttccttttggctttggttggagagggtggagaaaagcgggaggggcatggcctgtgacctggtcacaaagtaccttccacagtcctttactttaaggtggcatcactaaattattccctgtagcccaccttcaggtccactccacactggctctcttgactattttcttcctttattcatcagtgatgtatgttcaggacctaattaattgtggatatgaggcagggtcaagaggacaaaggaacagggcctttaccttctacatagctcccctgtttcatccaaggaggttaagtattgatttttatcggttttctcaactgtgaatataataaactgaaagcatttcagggagaagctggagaacaccttctctagctgcactccaccttaaggctgaagctggatttgtt

SEQ ID NO: 370690 - DNA, 14768 bp, Homo sapiens
ctgcttcacttcacggggcgaacatggcgcacagctgtcggtggcgcttccccgcccgacccgggaccaccgggggcggcggcggcggggggcgccggggcctagggggcgccccgcggcaacgcgtcccggccctgctgcttccccccgggcccccggtcggcggtggcggccccggggcgcccccctcccccccggctgtggcggccgcggcggcggcggcgggaagcagcggggctggggttccagggggagcggccgccgcctcagcagcctcctcgtcgtccgcctcgtcttcgtcttcgtcatcgtcctcagcctcttcagggccggccctgctccgggtgggcccgggcttcgacgcggcgctgcaggtctcggccgccatcggcaccaacctgcgccggttccgggccgtgtttggggagagcggcgggggaggcggcagcggagaggatgagcaattcttaggttttggctcagatgaagaagtcagagtgcgaagtcccacaaggtctccttcagttaaaactagtcctcgaaaacctcgtgggagacctagaagtggctctgaccgaaattcagctatcctctcagatccatctgtgttttcccctctaaataaatcagagaccaaatctggagataagatcaagaagaaagattctaaaagtatagaaaagaagagaggaagacctcccaccttccctggagtaaaaatcaaaataacacatggaaaggacatttcagagttaccaaagggaaacaaagaagatagcctgaaaaaaattaaaaggacaccttctgctacgtttcagcaagccacaaagattaaaaaattaagagcaggtaaactctctcctctcaagtctaagtttaagacagggaagcttcaaataggaaggaagggggtacaaattgtacgacggagaggaaggcctccatcaacagaaaggataaagaccccttcgggtctcctcattaattctgaactggaaaagccccagaaagtccggaaagacaaggaaggaacacctccacttacaaaagaagataagacagttgtcagacaaagccctcgaaggattaagccagttaggattattccttcttcaaaaaggacagatgcaaccattgctaagcaactcttacagagggcaaaaaagggggctcaaaagaaaattgaaaaagaagcagctcagctgcagggaagaaaggtgaagacacaggtcaaaaatattcgacagttcatcatgcctgttgtcagtgctatctcctcgcggatcattaagacccctcggcggtttatagaggatgaggattatgaccctccaattaaaattgcccgattagagtctacaccgaatagtagattcagtgccccgtcctgtggatcttctgaaaaatcaagtgcagcttctcagcactcctctcaaatgtcttcagactcctctcgatctagtagccccagtgttgatacctccacagactctcaggcttctgaggagattcaggtacttcctgaggagcggagcgatacccctgaagttcatcctccactgcccatttcccagtccccagaaaatgagagtaatgataggagaagcagaaggtattcagtgtcggagagaagttttggatctagaacgacgaaaaaattatcaactctacaaagtgccccccagcagcagacctcctcgtctccacctccacctctgctgactccaccgccaccactgcagccagcctccagtatctctgaccacacaccttggcttatgcctccaacaatccccttagcatcaccatttttgcctgcttccactgctcctatgcaagggaagcgaaaatctattttgcgagaaccgacatttaggtggacttctttaaagcattctaggtcagagccacaatacttttcctcagcaaagtatgccaaagaaggtcttattcgcaaaccaatatttgataatttccgaccccctccactaactcccgaggacgttggctttgcatctggtttttctgcatctggtaccgctgcttcagcccgattgttttcgccactccattctggaacaaggtttgatatgcacaaaaggagccctcttctgagagctccaagatttactccaagtgaggctcactctagaatatttgagtctgtaaccttgcctagtaatcgaacttctgctggaacatcttcttcaggagtatccaatagaaaaaggaaaagaaaagtgtttagtcctattcgatctgaaccaagatctccttctcactccatgaggacaagaagtggaaggcttagtagttctgagctctcacctctcacccccccgtcttctgtctcttcctcgttaagcatttctgttagtcctcttgccactagtgccttaaacccaacttttacttttccttctcattccctgactcagtctggggaatctgcagagaaaaatcagagaccaaggaagcagactagtgctccggcagagccattttcatcaagtagtcctactcctctcttcccttggtttaccccaggctctcagactgaaagagggagaaataaagacaaggcccccgaggagctgtccaaagatcgagatgctgacaagagcgtggagaaggacaagagtagagagagagaccgggagagagaaaaggagaataagcgggagtcaaggaaagagaaaaggaaaaagggatcagaaattcagagtagttctgctttgtatcctgtgggtagggtttccaaagagaaggttgttggtgaagatgttgccacttcatcttctgccaaaaaagcaacagggcggaagaagtcttcatcacatgattctgggactgatattacttctgtgactcttggggatacaacagctgtcaaaaccaaaatacttataaagaaagggagaggaaatctggaaaaaaccaacttggacctcggcccaactgccccatccctggagaaggagaaaaccctctgcctttccactccttcatctagcactgttaaacattccacttcctccataggctccatgttggctcaggcagacaagcttccaatgactgacaagagggttgccagcctcctaaaaaaggccaaagctcagctctgcaagattgagaagagtaagagtcttaaacaaaccgaccagcccaaagcacagggtcaagaaagtgactcatcagagacctctgtgcgaggaccccggattaaacatgtctgcagaagagcagctgttgcccttggccgaaaacgagctgtgtttcctgatgacatgcccaccctgagtgccttaccatgggaagaacgagaaaagattttgtcttccatggggaatgatgacaagtcatcaattgctggctcagaagatgctgaacctcttgctccacccatcaaaccaattaaacctgtcactagaaacaaggcaccccaggaacctccagtaaagaaaggacgtcgatcgaggcggtgtgggcagtgtcccggctgccaggtgcctgaggactgtggtgtttgtactaattgcttagataagcccaagtttggtggtcgcaatataaagaagcagtgctgcaagatgagaaaatgtcagaatctacaatggatgccttccaaagcctacctgcagaagcaagctaaagctgtgaaaaagaaagagaaaaagtctaagaccagtgaaaagaaagacagcaaagagagcagtgttgtgaagaacgtggtggactctagtcagaaacctaccccatcagcaagagaggatcctgccccaaagaaaagcagtagtgagcctcctccacgaaagcccgtcgaggaaaagagtgaagaagggaatgtctcggcccctgggcctgaatccaaacaggccaccactccagcttccaggaagtcaagcaagcaggtctcccagccagcagtggtcatcccgcctcagccacctactacaggaccgccaagaaaagaagttcccaaaaccactcctagtgagcccaagaaaaagcagcctccaccaccagaatcaggtccagagcagagcaaacagaaaaaagtggctccccgcccaagtatccctgtaaaacaaaaaccaaaagaaaaggaaaaaccacctccggtcaataagcaggagaatgcaggcactttgaacatcctcagcactctctccaatggcaatagttctaagcaaaaaattccagcagatggagtccacaggatcagagtggactttaaggaggattgtgaagcagaaaatgtgtgggagatgggaggcttaggaatcttgacttctgttcctataacacccagggtggtttgctttctctgtgccagtagtgggcatgtagagtttgtgtattgccaagtctgttgtgagcccttccacaagttttgtttagaggagaacgagcgccctctggaggaccagctggaaaattggtgttgtcgtcgttgcaaattctgtcacgtttgtggaaggcaacatcaggctacaaagcagctgctggagtgtaataagtgccgaaacagctatcaccctgagtgcctgggaccaaactaccccaccaaacccacaaagaagaagaaagtctggatctgtaccaagtgtgttcgctgtaagagctgtggatccacaactccaggcaaagggtgggatgcacagtggtctcatgatttctcactgtgtcatgattgcgccaagctctttgctaaaggaaacttctgccctctctgtgacaaatgttatgatgatgatgactatgagagtaagatgatgcaatgtggaaagtgtgatcgctgggtccattccaaatgtgagaatctttcagatgagatgtatgagattctatctaatctgccagaaagtgtggcctacacttgtgtgaactgtactgagcggcaccctgcagagtggcgactggcccttgaaaaagagctgcagatttctctgaagcaagttctgacagctttgttgaattctcggactaccagccatttgctacgctaccggcaggctgccaagcctccagacttaaatcccgagacagaggagagtataccttcccgcagctcccccgaaggacctgatccaccagttcttactgaggtcagcaaacaggatgatcagcagcctttagatctagaaggagtcaagaggaagatggaccaagggaattacacatctgtgttggagttcagtgatgatattgtgaagatcattcaagcagccattaattcagatggaggacagccagaaattaaaaaagccaacagcatggtcaagtccttcttcattcggcaaatggaacgtgtttttccatggttcagtgtcaaaaagtccaggttttgggagccaaataaagtatcaagcaacagtgggatgttaccaaacgcagtgcttccaccttcacttgaccataattatgctcagtggcaggagcgagaggaaaacagccacactgagcagcctcctttaatgaagaaaatcattccagctcccaaacccaaaggtcctggagaaccagactcaccaactcctctgcatcctcctacaccaccaattttgagtactgataggagtcgagaagacagtccagagctgaacccacccccaggcatagaagacaatagacagtgtgcgttatgtttgacttatggtgatgacagtgctaatgatgctggtcgtttactatatattggccaaaatgagtggacacatgtaaattgtgctttgtggtcagcggaagtgtttgaagatgatgacggatcactaaagaatgtgcatatggctgtgatcaggggcaagcagctgagatgtgaattctgccaaaagccaggagccaccgtgggttgctgtctcacatcctgcaccagcaactatcacttcatgtgttcccgagccaagaactgtgtctttctggatgataaaaaagtatattgccaacgacatcgggatttgatcaaaggcgaagtggttcctgagaatggatttgaagttttcagaagagtgtttgtggactttgaaggaatcagcttgagaaggaagtttctcaatggcttggaaccagaaaatatccacatgatgattgggtctatgacaatcgactgcttaggaattctaaatgatctctccgactgtgaagataagctctttcctattggatatcagtgttccagggtatactggagcaccacagatgctcgcaagcgctgtgtatatacatgcaagatagtggagtgccgtcctccagtcgtagagccggatatcaacagcactgttgaacatgatgaaaacaggaccattgcccatagtccaacatcttttacagaaagttcatcaaaagagagtcaaaacacagctgaaattataagtcctccatcaccagaccgacctcctcattcacaaacctctggctcctgttattatcatgtcatctcaaaggtccccaggattcgaacacccagttattctccaacacagagatcccctggctgtcgaccgttgccttctgcaggaagtcctaccccaaccactcatgaaatagtcacagtaggtgatcctttactctcctctggacttcgaagcattggctccaggcgtcacagtacctcttccttatcaccccagcggtccaaactccggataatgtctccaatgagaactgggaatacttactctaggaataatgtttcctcagtctccaccaccgggaccgctactgatcttgaatcaagtgccaaagtagttgatcatgtcttagggccactgaattcaagtactagtttagggcaaaacacttccacctcttcaaatttgcaaaggacagtggttactgtaggcaataaaaacagtcacttggatggatcttcatcttcagaaatgaagcagtccagtgcttcagacttggtgtccaagagctcctctttaaagggagagaagaccaaagtgctgagttccaagagctcagagggatctgcacataatgtggcttaccctggaattcctaaactggccccacaggttcataacacaacatctagagaactgaatgttagtaaaatcggctcctttgctgaaccctcttcagtgtcgttttcttctaaagaggccctctccttcccacacctccatttgagagggcaaaggaatgatcgagaccaacacacagattctacccaatcagcaaactcctctccagatgaagatactgaagtcaaaaccttgaagctatctggaatgagcaacagatcatccattatcaacgaacatatgggatctagttccagagataggagacagaaagggaaaaaatcctgtaaagaaactttcaaagaaaagcattccagtaaatcttttttggaacctggtcaggtgacaactggtgaggaaggaaacttgaagccagagtttatggatgaggttttgactcctgagtatatgggccaacgaccatgtaacaatgtttcttctgataagattggtgataaaggcctttctatgccaggagtccccaaagctccacccatgcaagtagaaggatctgccaaggaattacaggcaccacggaaacgcacagtcaaagtgacactgacacctctaaaaatggaaaatgagagtcaatccaaaaatgccctgaaagaaagtagtcctgcttcccctttgcaaatagagtcaacatctcccacagaaccaatttcagcctctgaaaatccaggagatggtccagtggcccaaccaagccccaataatacctcatgccaggattctcaaagtaacaactatcagaatcttccagtacaggacagaaacctaatgcttccagatggccccaaacctcaggaggatggctcttttaaaaggaggtatccccgtcgcagtgcccgtgcacgttctaacatgttttttgggcttaccccactctatggagtaagatcctatggtgaagaagacattccattctacagcagctcaactgggaagaagcgaggcaagagatcagctgaaggacaggtggatggggccgatgacttaagcacttcagatgaagacgacttatactattacaacttcactagaacagtgatttcttcaggtggagaggaacgactggcatcccataatttatttcgggaggaggaacagtgtgatcttccaaaaatctcacagttggatggtgttgatgatgggacagagagtgatactagtgtcacagccacaacaaggaaaagcagccagattccaaaaagaaatggtaaagaaaatggaacagagaacttaaagattgatagacctgaagatgctggggagaaagaacatgtcactaagagttctgttggccacaaaaatgagccaaagatggataactgccattctgtaagcagagttaaaacacagggacaagattccttggaagctcagctcagctcattggagtcaagccgcagagtccacacaagtaccccctccgacaaaaatttactggacacctataatactgagctcctgaaatcagattcagacaataacaacagtgatgactgtgggaatatcctgccttcagacattatggactttgtactaaagaatactccatccatgcaggctttgggtgagagcccagagtcatcttcatcagaactcctgaatcttggtgaaggattgggtcttgacagtaatcgtgaaaaagacatgggtctttttgaagtattttctcagcagctgcctacaacagaacctgtggatagtagtgtctcttcctctatctcagcagaggaacagtttgagttgcctctagagctaccatctgatctgtctgtcttgaccacccggagtcccactgtccccagccagaatcccagtagactagctgttatctcagactcaggggagaagagagtaaccatcacagaaaaatctgtagcctcctctgaaagtgacccagcactgctgagcccaggagtagatccaactcctgaaggccacatgactcctgatcattttatccaaggacacatggatgcagaccacatctctagccctccttgtggttcagtagagcaaggtcatggcaacaatcaggatttaactaggaacagtagcacccctggccttcaggtacctgtttccccaactgttcccatccagaaccagaagtatgtgcccaattctactgatagtcctggcccgtctcagatttccaatgcagctgtccagaccactccaccccacctgaagccagccactgagaaactcatagttgttaaccagaacatgcagccactttatgttctccaaactcttccaaatggagtgacccaaaaaatccaattgacctcttctgttagttctacacccagtgtgatggagacaaatacttcagtattgggacccatgggaggtggtctcacccttaccacaggactaaatccaagcttgccaacttctcaatctttgttcccttctgctagcaaaggattgctacccatgtctcatcaccagcacttacattccttccctgcagctactcaaagtagtttcccaccaaacatcagcaatcctccttcaggcctgcttattggggttcagcctcctccggatccccaacttttggtttcagaatccagccagaggacagacctcagtaccacagtagccactccatcctctggactcaagaaaagacccatatctcgtctacagacccgaaagaataaaaaacttgctccctctagtaccccttcaaacattgccccttctgatgtggtttctaatatgacattgattaacttcacaccctcccagcttcctaatcatccaagtctgttagatttggggtcacttaatacttcatctcaccgaactgtccccaacatcataaaaagatctaaatctagcatcatgtattttgaaccggcacccctgttaccacagagtgtgggaggaactgctgccacagcggcaggcacatcaacaataagccaggatactagccacctcacatcagggtctgtgtctggcttggcatccagttcctctgtcttgaatgttgtatccatgcaaactaccacaacccctacaagtagtgcgtcagttccaggacacgtcaccttaaccaacccaaggttgcttggtaccccagatattggctcaataagcaatcttttaatcaaagctagccagcagagcctggggattcaggaccagcctgtggctttaccgccaagttcaggaatgtttccacaactggggacatcacagaccccctctactgctgcaataacagcggcatctagcatctgtgtgctcccctccactcagactacgggcataacagccgcttcaccttctggggaagcagacgaacactatcagcttcagcatgtgaaccagctccttgccagcaaaactgggattcattcttcccagcgtgatcttgattctgcttcagggccccaggtatccaactttacccagacggtagacgctcctaatagcatgggactggagcagaacaaggctttatcctcagctgtgcaagccagccccacctctcctgggggttctccatcctctccatcttctggacagcggtcagcaagcccttcagtgccgggtcccactaaacccaaaccaaaaaccaaacggtttcagctgcctctagacaaagggaatggcaagaagcacaaagtttcccatttgcggaccagttcttctgaagcacacattccagaccaagaaacgacatccctgacctcaggcacagggactccaggagcagaggctgagcagcaggatacagctagcgtggagcagtcctcccagaaggagtgtgggcaacctgcagggcaagtcgctgttcttccggaagttcaggtgacccaaaatccagcaaatgaacaagaaagtgcagaacctaaaacagtggaagaagaggaaagtaatttcagctccccactgatgctttggcttcagcaagaacaaaagcggaaggaaagcattactgagaaaaaacccaagaaaggacttgtttttgaaatttccagtgatgatggctttcagatctgtgcagaaagtattgaagatgcctggaagtcattgacagataaagtccaggaagctcgatcaaatgcccgcctaaagcagctctcatttgcaggtgttaacggtttgaggatgctggggattctccatgatgcagttgtgttcctcattgagcagctgtctggtgccaagcactgtcgaaattacaaattccgtttccacaagccagaggaggccaatgaaccccccttgaaccctcacggctcagccagggctgaagtccacctcaggaagtcagcatttgacatgtttaacttcctggcttctaaacatcgtcagcctcctgaatacaaccccaatgatgaagaagaggaggaggtacagctgaagtcagctcggagggcaactagcatggatctgccaatgcccatgcgcttccggcacttaaaaaagacttctaaggaggcagttggtgtctacaggtctcccatccatggccggggtcttttctgtaagagaaacattgatgcaggtgagatggtgattgagtatgccggcaacgtcatccgctccatccagactgacaagcgggaaaagtattacgacagcaagggcattggttgctatatgttccgaattgatgactcagaggtagtggatgccaccatgcatggaaatgctgcacgcttcatcaatcactcgtgtgagcctaactgctattctcgggtcatcaatattgatgggcagaagcacattgtcatctttgccatgcgtaagatctaccgaggagaggaactcacttacgactataagttccccattgaggatgccagcaacaagctgccctgcaactgtggcgccaagaaatgccggaagttcctaaactaaagctgctcttctcccccagtgttggagtgcaaggaggcggggccatccaaagcaacgctgaaggccttttccagcagctgggagctcccggattgcgtggcacagctgaggggcctctgtgatggctgagctctcttatgtcctatactcacatcagacatgtgatcatagtcccagagacagagttgaggtctcgaagaaaagatccatgatcggctttctcctggggcccctccaattgtttactgttagaaagtgggaatggggtccctagcagacttgcctggaaggagcctattatagagggttggttatgttgggagattgggcctgaatttctccacagaaataagttgccatcctcaggttggccctttcccaagcactgtaagtgagtgggtcaggcaaagccccaaatggagggttggttagattcctgacagtttgccagccaggccccacctacagcgtctgtcgaacaaacagaggtctggtggttttccctactatcctcccactcgagagttcacttctggttgggagacaggattcctagcacctccggtgtcaaaaggctgtcatggggttgtgccaattaattaccaaacattgagcctgcaggctttgagtgggagtgttgcccccaggagccttatctcagccaattacctttcttgacagtaggagcggcttccctctcccattccctcttcactcccttttcttcctttcccctgtcttcatgccactgctttcccatgcttctttcgggttgtaggggagactgactgcctgctcaaggacactccctgctgggcataggatgtgcctgcaaaaagttccctgagcctgtaagcactccaggtggggaagtggacaggagccattggtcataaccagacagaatttggaaacattttcataaagctccatggagagttttaaagaaacatatgtagcatgattttgtaggagaggaaaaagattatttaaataggatttaaatcatgcaacaacgagagtatcacagccaggatgacccttgggtcccattcctaagacatggttactttattttccccttgttaagacataggaagacttaatttttaaacggtcagtgtccagttgaaggcagaacactaatcagatttcaaggcccacaacttggggactagaccaccttatgttgagggaactctgccacctgcgtgcaacccacagctaaagtaaattcaatgacactactgccctgattactccttaggatgtggtcaaaacagcatcaaatgtttcttctcttcctttccccaagacagagtcctgaacctgttaaattaagtcattggattttactctgttctgtttacagtttactatttaaggttttataaatgtaaatatattttgtatatttttctatgagaagcacttcatagggagaagcacttatgacaaggctattttttaaaccgcggtattatcctaatttaaaagaagatcggtttttaataattttttattttcataggatgaagttagagaaaatattcagctgtacacacaaagtctggtttttcctgcccaacttccccctggaaggtgtactttttgttgtttaatgtgtagcttgtttgtgccctgttgacataaatgtttcctgggtttgctctttgacaataaatggagaaggaaggtcacccaactccattgggccactcccctccttcccctattgaagctcctcaaaaggctacagtaatatcttgatacaacagattctcttctttcccgcctctctcctttccggcgcaacttccagagtggtgggagacggcaatctttacatttccctcatctttcttacttcagagttagcaaacaacaagttgaatggcaacttgacatttttgcatcaccatctgcctcataggccactctttcctttccctctgcccaccaagtcctcatatctgcagagaacccattgatcaccttgtgccctcttttggggcagcctgttgaaactgaagcacagtctgaccactcacgataaagcagatttttctctgcctctgccacaaggtttcagagtagtgtagtccaagtagagggtggggcacccttttctcgccgcaagaagcccattcctatggaagtctagcaaagcaatacgactcagcccagcactctctgccccaggactcatggctctgctgtgccttccatcctgggctcccttctctcctgtgaccttaagaactttgtctggtggctttgctggaacattgtcactgttttcactgtcatgcagggagcccagcactgtggccaggatggcagagacttccttgtcatcatggagaagtgccagcaggggactgggaaaagcactctacccagacctcacctcccttcctccttttgcccatgaacaagatgcagtggccctaggggttccactagtgtctgctttcctttattattgcactgtgtgaggtttttttgtaaatccttgtattcctattttttttaaagaaaaaaaaaaaaccttaagctgcatttgttactgaaatgattaatgcactgatgggtcctgaattcaccttgagaaagacccaaaggccagtcagggggtggggggaactcagctaaatagacctagttactgccctgctaggccatgctgtactgtgagcccctccttgctcatgtgcgaacggccataattttgattctcaataatgagcgaggcatcatcagggtcagcattgctcgcagatccagaagcattgcacacataacggaaagatggtaggatagggagtcgtagac

SEQ ID NO: 370691 - DNA, 17083 bp, Homo sapiens
ctgcttcacttcacggggcgaacatggcgcacagctgtcggtggcgcttccccgcccgacccgggaccaccgggggcggcggcggcggggggcgccggggcctagggggcgccccgcggcaacgcgtcccggccctgctgcttccccccgggcccccggtcggcggtggcggccccggggcgcccccctcccccccggctgtggcggccgcggcggcggcggcgggaagcagcggggctggggttccagggggagcggccgccgcctcagcagcctcctcgtcgtccgcctcgtcttcgtcttcgtcatcgtcctcagcctcttcagggccggccctgctccgggtgggcccgggcttcgacgcggcgctgcaggtctcggccgccatcggcaccaacctgcgccggttccgggccgtgtttggggagagcggcgggggaggcggcagcggagaggatgagcaattcttaggttttggctcagatgaagaagtcagagtgcgaagtcccacaaggtctccttcagttaaaactagtcctcgaaaacctcgtgggagacctagaagtggctctgaccgaaattcagctatcctctcagatccatctgtgttttcccctctaaataaatcagagaccaaatctggagataagatcaagaagaaagattctaaaagtatagaaaagaagagaggaagacctcccaccttccctggagtaaaaatcaaaataacacatggaaaggacatttcagagttaccaaagggaaacaaagaagatagcctgaaaaaaattaaaaggacaccttctgctacgtttcagcaagccacaaagattaaaaaattaagagcaggtaaactctctcctctcaagtctaagtttaagacagggaagcttcaaataggaaggaagggggtacaaattgtacgacggagaggaaggcctccatcaacagaaaggataaagaccccttcgggtctcctcattaattctgaactggaaaagccccagaaagtccggaaagacaaggaaggaacacctccacttacaaaagaagataagacagttgtcagacaaagccctcgaaggattaagccagttaggattattccttcttcaaaaaggacagatgcaaccattgctaagcaactcttacagagggcaaaaaagggggctcaaaagaaaattgaaaaagaagcagctcagctgcagggaagaaaggtgaagacacaggtcaaaaatattcgacagttcatcatgcctgttgtcagtgctatctcctcgcggatcattaagacccctcggcggtttatagaggatgaggattatgaccctccaattaaaattgcccgattagagtctacaccgaatagtagattcagtgccccgtcctgtggatcttctgaaaaatcaagtgcagcttctcagcactcctctcaaatgtcttcagactcctctcgatcccgaatagtagattcagtgcccccttctcagcactcctctcaaatgtcttcagactcctctcgatctagtagccccagtgttgatacctccacagactctcaggcttctgaggagattcaggtacttcctgaggagcggagcgatacccctgaagttcatcctccactgcccatttcccagtccccagaaaatgagagtaatgataggagaagcagaaggtattcagtgtcggagagaagttttggatctagaacgacgaaaaaattatcaactctacaaagtgccccccagcagcagacctcctcgtctccacctccacctctgctgactccaccgccaccactgcagccagcctccagtatctctgaccacacaccttggcttatgcctccaacaatccccttagcatcaccatttttgcctgcttccactgctcctatgcaagggaagcgaaaatctattttgcgagaaccgacatttaggtggacttctttaaagcattctaggtcagagccacaatacttttcctcagcaaagtatgccaaagaaggtcttattcgcaaaccaatatttgataatttccgaccccctccactaactcccgaggacgttggctttgcatctggtttttctgcatctggtaccgctgcttcagcccgattgttttcgccactccattctggaacaaggtttgatatgcacaaaaggagccctcttctgagagctccaagatttactccaagtgaggctcactctagaatatttgagtctgtaaccttgcctagtaatcgaacttctgctggaacatcttcttcaggagtatccaatagaaaaaggaaaagaaaagtgtttagtcctattcgatctgaaccaagatctccttctcactccatgaggacaagaagtggaaggcttagtagttctgagctctcacctctcacccccccgtcttctgtctcttcctcgttaagcatttctgttagtcctcttgccactagtgccttaaacccaacttttacttttccttctcattccctgactcagtctggggaatctgcagagaaaaatcagagaccaaggaagcagactagtgctccggcagagccattttcatcaagtagtcctactcctctcttcccttggtttaccccaggctctcagactgaaagagggagaaataaagacaaggcccccgaggagctgtccaaagatcgagatgctgacaagagcgtggagaaggacaagagtagagagagagaccgggagagagaaaaggagaataagcgggagtcaaggaaagagaaaaggaaaaagggatcagaaattcagagtagttctgctttgtatcctgtgggtagggtttccaaagagaaggttgttggtgaagatgttgccacttcatcttctgccaaaaaagcaacagggcggaagaagtcttcatcacatgattctgggactgatattacttctgtgactcttggggatacaacagctgtcaaaaccaaaatacttataaagaaagggagaggaaatctggaaaaaaccaacttggacctcggcccaactgccccatccctggagaaggagaaaaccctctgcctttccactccttcatctagcactgttaaacattccacttcctccataggctccatgttggctcaggcagacaagcttccaatgactgacaagagggttgccagcctcctaaaaaaggccaaagctcagctctgcaagattgagaagagtaagagtcttaaacaaaccgaccagcccaaagcacagggtcaagaaagtgactcatcagagacctctgtgcgaggaccccggattaaacatgtctgcagaagagcagctgttgcccttggccgaaaacgagctgtgtttcctgatgacatgcccaccctgagtgccttaccatgggaagaacgagaaaagattttgtcttccatggggaatgatgacaagtcatcaattgctggctcagaagatgctgaacctcttgctccacccatcaaaccaattaaacctgtcactagaaacaaggcaccccaggaacctccagtaaagaaaggacgtcgatcgaggcggtgtgggcagtgtcccggctgccaggtgcctgaggactgtggtgtttgtactaattgcttagataagcccaagtttggtggtcgcaatataaagaagcagtgctgcaagatgagaaaatgtcagaatctacaatggatgccttccaaagcctacctgcagaagcaagctaaagctgtgaaaaagaaagagaaaaagtctaagaccagtgaaaagaaagacagcaaagagagcagtgttgtgaagaacgtggtggactctagtcagaaacctaccccatcagcaagagaggatcctgccccaaagaaaagcagtagtgagcctcctccacgaaagcccgtcgaggaaaagagtgaagaagggaatgtctcggcccctgggcctgaatccaaacaggccaccactccagcttccaggaagtcaagcaagcaggtctcccagccagcagtggtcatcccgcctcagccacctactacaggaccgccaagaaaagaagttcccaaaaccactcctagtgagcccaagaaaaagcagcctccaccaccagaatcaggtccagagcagagcaaacagaaaaaagtggctccccgcccaagtatccctgtaaaacaaaaaccaaaagaaaaggaaaaaccacctccggtcaataagcaggagaatgcaggcactttgaacatcctcagcactctctccaatggcaatagttctaagcaaaaaattccagcagatggagtccacaggatcagagtggactttaaggaggattgtgaagcagaaaatgtgtgggagatgggaggcttaggaatcttgacttctgttcctataacacccagggtggtttgctttctctgtgccagtagtgggcatgtagagtttgtgtattgccaagtctgttgtgagcccttccacaagttttgtttagaggagaacgagcgccctctggaggaccagctggaaaattggtgttgtcgtcgttgcaaattctgtcacgtttgtggaaggcaacatcaggctacaaagcagctgctggagtgtaataagtgccgaaacagctatcaccctgagtgcctgggaccaaactaccccaccaaacccacaaagaagaagaaagtctggatctgtaccaagtgtgttcgctgtaagagctgtggatccacaactccaggcaaagggtgggatgcacagtggtctcatgatttctcactgtgtcatgattgcgccaagctctttgctaaaggaaacttctgccctctctgtgacaaatgttatgatgatgatgactatgagagtaagatgatgcaatgtggaaagtgtgatcgctgggtccattccaaatgtgagaatctttcagatgagatgtatgagattctatctaatctgccagaaagtgtggcctacacttgtgtgaactgtactgagcggcaccctgcagagtggcgactggcccttgaaaaagagctgcagatttctctgaagcaagttctgacagctttgttgaattctcggactaccagccatttgctacgctaccggcaggctgccaagcctccagacttaaatcccgagacagaggagagtataccttcccgcagctcccccgaaggacctgatccaccagttcttactgaggtcagcaaacaggatgatcagcagcctttagatctagaaggagtcaagaggaagatggaccaagggaattacacatctgtgttggagttcagtgatgatattgtgaagatcattcaagcagccattaattcagatggaggacagccagaaattaaaaaagccaacagcatggtcaagtccttcttcattcggcaaatggaacgtgtttttccatggttcagtgtcaaaaagtccaggttttgggagccaaataaagtatcaagcaacagtgggatgttaccaaacgcagtgcttccaccttcacttgaccataattatgctcagtggcaggagcgagaggaaaacagccacactgagcagcctcctttaatgaagaaaatcattccagctcccaaacccaaaggtcctggagaaccagactcaccaactcctctgcatcctcctacaccaccaattttgagtactgataggagtcgagaagacagtccagagctgaacccacccccaggcatagaagacaatagacagtgtgcgttatgtttgacttatggtgatgacagtgctaatgatgctggtcgtttactatatattggccaaaatgagtggacacatgtaaattgtgctttgtggtcagcggaagtgtttgaagatgatgacggatcactaaagaatgtgcatatggctgtgatcaggggcaagcagctgagatgtgaattctgccaaaagccaggagccaccgtgggttgctgtctcacatcctgcaccagcaactatcacttcatgtgttcccgagccaagaactgtgtctttctggatgataaaaaagtatattgccaacgacatcgggatttgatcaaaggcgaagtggttcctgagaatggatttgaagttttcagaagagtgtttgtggactttgaaggaatcagcttgagaaggaagtttctcaatggcttggaaccagaaaatatccacatgatgattgggtctatgacaatcgactgcttaggaattctaaatgatctctccgactgtgaagataagctctttcctattggatatcagtgttccagggtatactggagcaccacagatgctcgcaagcgctgtgtatatacatgcaagatagtggagtgccgtcctccagtcgtagagccggatatcaacagcactgttgaacatgatgaaaacaggaccattgcccatagtccaacatcttttacagaaagttcatcaaaagagagtcaaaacacagctgaaattataagtcctccatcaccagaccgacctcctcattcacaaacctctggctcctgttattatcatgtcatctcaaaggtccccaggattcgaacacccagttattctccaacacagagatcccctggctgtcgaccgttgccttctgcaggaagtcctaccccaaccactcatgaaatagtcacagtaggtgatcctttactctcctctggacttcgaagcattggctccaggcgtcacagtacctcttccttatcaccccagcggtccaaactccggataatgtctccaatgagaactgggaatacttactctaggaataatgtttcctcagtctccaccaccgggaccgctactgatcttgaatcaagtgccaaagtagttgatcatgtcttagggccactgaattcaagtactagtttagggcaaaacacttccacctcttcaaatttgcaaaggacagtggttactgtaggcaataaaaacagtcacttggatggatcttcatcttcagaaatgaagcagtccagtgcttcagacttggtgtccaagagctcctctttaaagggagagaagaccaaagtgctgagttccaagagctcagagggatctgcacataatgtggcttaccctggaattcctaaactggccccacaggttcataacacaacatctagagaactgaatgttagtaaaatcggctcctttgctgaaccctcttcagtgtcgttttcttctaaagaggccctctccttcccacacctccatttgagagggcaaaggaatgatcgagaccaacacacagattctacccaatcagcaaactcctctccagatgaagatactgaagtcaaaaccttgaagctatctggaatgagcaacagatcatccattatcaacgaacatatgggatctagttccagagataggagacagaaagggaaaaaatcctgtaaagaaactttcaaagaaaagcattccagtaaatcttttttggaacctggtcaggtgacaactggtgaggaaggaaacttgaagccagagtttatggatgaggttttgactcctgagtatatgggccaacgaccatgtaacaatgtttcttctgataagattggtgataaaggcctttctatgccaggagtccccaaagctccacccatgcaagtagaaggatctgccaaggaattacaggcaccacggaaacgcacagtcaaagtgacactgacacctctaaaaatggaaaatgagagtcaatccaaaaatgccctgaaagaaagtagtcctgcttcccctttgcaaatagagtcaacatctcccacagaaccaatttcagcctctgaaaatccaggagatggtccagtggcccaaccaagccccaataatacctcatgccaggattctcaaagtaacaactatcagaatcttccagtacaggacagaaacctaatgcttccagatggccccaaacctcaggaggatggctcttttaaaaggaggtatccccgtcgcagtgcccgtgcacgttctaacatgttttttgggcttaccccactctatggagtaagatcctatggtgaagaagacattccattctacagcagctcaactgggaagaagcgaggcaagagatcagctgaaggacaggtggatggggccgatgacttaagcacttcagatgaagacgacttatactattacaacttcactagaacagtgatttcttcaggtggagaggaacgactggcatcccataatttatttcgggaggaggaacagtgtgatcttccaaaaatctcacagttggatggtgttgatgatgggacagagagtgatactagtgtcacagccacaacaaggaaaagcagccagattccaaaaagaaatggtaaagaaaatggaacagagaacttaaagattgatagacctgaagatgctggggagaaagaacatgtcactaagagttctgttggccacaaaaatgagccaaagatggataactgccattctgtaagcagagttaaaacacagggacaagattccttggaagctcagctcagctcattggagtcaagccgcagagtccacacaagtaccccctccgacaaaaatttactggacacctataatactgagctcctgaaatcagattcagacaataacaacagtgatgactgtgggaatatcctgccttcagacattatggactttgtactaaagaatactccatccatgcaggctttgggtgagagcccagagtcatcttcatcagaactcctgaatcttggtgaaggattgggtcttgacagtaatcgtgaaaaagacatgggtctttttgaagtattttctcagcagctgcctacaacagaacctgtggatagtagtgtctcttcctctatctcagcagaggaacagtttgagttgcctctagagctaccatctgatctgtctgtcttgaccacccggagtcccactgtccccagccagaatcccagtagactagctgttatctcagactcaggggagaagagagtaaccatcacagaaaaatctgtagcctcctctgaaagtgacccagcactgctgagcccaggagtagatccaactcctgaaggccacatgactcctgatcattttatccaaggacacatggatgcagaccacatctctagccctccttgtggttcagtagagcaaggtcatggcaacaatcaggatttaactaggaacagtagcacccctggccttcaggtacctgtttccccaactgttcccatccagaaccagaagtatgtgcccaattctactgatagtcctggcccgtctcagatttccaatgcagctgtccagaccactccaccccacctgaagccagccactgagaaactcatagttgttaaccagaacatgcagccactttatgttctccaaactcttccaaatggagtgacccaaaaaatccaattgacctcttctgttagttctacacccagtgtgatggagacaaatacttcagtattgggacccatgggaggtggtctcacccttaccacaggactaaatccaagcttgccaacttctcaatctttgttcccttctgctagcaaaggattgctacccatgtctcatcaccagcacttacattccttccctgcagctactcaaagtagtttcccaccaaacatcagcaatcctccttcaggcctgcttattggggttcagcctcctccggatccccaacttttggtttcagaatccagccagaggacagacctcagtaccacagtagccactccatcctctggactcaagaaaagacccatatctcgtctacagacccgaaagaataaaaaacttgctccctctagtaccccttcaaacattgccccttctgatgtggtttctaatatgacattgattaacttcacaccctcccagcttcctaatcatccaagtctgttagatttggggtcacttaatacttcatctcaccgaactgtccccaacatcataaaaagatctaaatctagcatcatgtattttgaaccggcacccctgttaccacagagtgtgggaggaactgctgccacagcggcaggcacatcaacaataagccaggatactagccacctcacatcagggtctgtgtctggcttggcatccagttcctctgtcttgaatgttgtatccatgcaaactaccacaacccctacaagtagtgcgtcagttccaggacacgtcaccttaaccaacccaaggttgcttggtaccccagatattggctcaataagcaatcttttaatcaaagctagccagcagagcctggggattcaggaccagcctgtggctttaccgccaagttcaggaatgtttccacaactggggacatcacagaccccctctactgctgcaataacagcggcatctagcatctgtgtgctcccctccactcagactacgggcataacagccgcttcaccttctggggaagcagacgaacactatcagcttcagcatgtgaaccagctccttgccagcaaaactgggattcattcttcccagcgtgatcttgattctgcttcagggccccaggtatccaactttacccagacggtagacgctcctaatagcatgggactggagcagaacaaggctttatcctcagctgtgcaagccagccccacctctcctgggggttctccatcctctccatcttctggacagcggtcagcaagcccttcagtgccgggtcccactaaacccaaaccaaaaaccaaacggtttcagctgcctctagacaaagggaatggcaagaagcacaaagtttcccatttgcggaccagttcttctgaagcacacattccagaccaagaaacgacatccctgacctcaggcacagggactccaggagcagaggctgagcagcaggatacagctagcgtggagcagtcctcccagaaggagtgtgggcaacctgcagggcaagtcgctgttcttccggaagttcaggtgacccaaaatccagcaaatgaacaagaaagtgcagaacctaaaacagtggaagaagaggaaagtaatttcagctccccactgatgctttggcttcagcaagaacaaaagcggaaggaaagcattactgagaaaaaacccaagaaaggacttgtttttgaaatttccagtgatgatggctttcagatctgtgcagaaagtattgaagatgcctggaagtcattgacagataaagtccaggaagctcgatcaaatgcccgcctaaagcagctctcatttgcaggtgttaacggtttgaggatgctggggattctccatgatgcagttgtgttcctcattgagcagctgtctggtgccaagcactgtcgaaattacaaattccgtttccacaagccagaggaggccaatgaaccccccttgaaccctcacggctcagccagggctgaagtccacctcaggaagtcagcatttgacatgtttaacttcctggcttctaaacatcgtcagcctcctgaatacaaccccaatgatgaagaagaggaggaggtacagctgaagtcagctcggagggcaactagcatggatctgccaatgcccatgcgcttccggcacttaaaaaagacttctaaggaggcagttggtgtctacaggtctcccatccatggccggggtcttttctgtaagagaaacattgatgcaggtgagatggtgattgagtatgccggcaacgtcatccgctccatccagactgacaagcgggaaaagtattacgacagcaagggcattggttgctatatgttccgaattgatgactcagaggtagtggatgccaccatgcatggaaatgctgcacgcttcatcaatcactcgtgtgagcctaactgctattctcgggtcatcaatattgatgggcagaagcacattgtcatctttgccatgcgtaagatctaccgaggagaggaactcacttacgactataagttccccattgaggatgccagcaacaagctgccctgcaactgtggcgccaagaaatgccggaagttcctaaactaaagctgctcttctcccccagtgttggagtgcaaggaggcggggccatccaaagcaacgctgaaggccttttccagcagctgggagctcccggattgcgtggcacagctgaggggcctctgtgatggctgagctctcttatgtcctatactcacatcagacatgtgatcatagtcccagagacagagttgaggtctcgaagaaaagatccatgatcggctttctcctggggcccctccaattgtttactgttagaaagtgggaatggggtccctagcagacttgcctggaaggagcctattatagagggttggttatgttgggagattgggcctgaatttctccacagaaataagttgccatcctcaggttggccctttcccaagcactgtaagtgagtgggtcaggcaaagccccaaatggagggttggttagattcctgacagtttgccagccaggccccacctacagcgtctgtcgaacaaacagaggtctggtggttttccctactatcctcccactcgagagttcacttctggttgggagacaggattcctagcacctccggtgtcaaaaggctgtcatggggttgtgccaattaattaccaaacattgagcctgcaggctttgagtgggagtgttgcccccaggagccttatctcagccaattacctttcttgacagtaggagcggcttccctctcccattccctcttcactcccttttcttcctttcccctgtcttcatgccactgctttcccatgcttctttcgggttgtaggggagactgactgcctgctcaaggacactccctgctgggcataggatgtgcctgcaaaaagttccctgagcctgtaagcactccaggtggggaagtggacaggagccattggtcataaccagacagaatttggaaacattttcataaagctccatggagagttttaaagaaacatatgtagcatgattttgtaggagaggaaaaagattatttaaataggatttaaatcatgcaacaacgagagtatcacagccaggatgacccttgggtcccattcctaagacatggttactttattttccccttgttaagacataggaagacttaatttttaaacggtcagtgtccagttgaaggcagaacactaatcagatttcaaggcccacaacttggggactagaccaccttatgttgagggaactctgccacctgcgtgcaacccacagctaaagtaaattcaatgacactactgccctgattactccttaggatgtggtcaaaacagcatcaaatgtttcttctcttcctttccccaagacagagtcctgaacctgttaaattaagtcattggattttactctgttctgtttacagtttactatttaaggttttataaatgtaaatatattttgtatatttttctatgagaagcacttcatagggagaagcacttatgacaaggctattttttaaaccgcggtattatcctaatttaaaagaagatcggtttttaataattttttattttcataggatgaagttagagaaaatattcagctgtacacacaaagtctggtttttcctgcccaacttccccctggaaggtgtactttttgttgtttaatgtgtagcttgtttgtgccctgttgacataaatgtttcctgggtttgctctttgacaataaatggagaaggaaggtcacccaactccattgggccactcccctccttcccctattgaagctcctcaaaaggctacagtaatatcttgatacaacagattctcttctttcccgcctctctcctttccggcgcaacttccagagtggtgggagacggcaatctttacatttccctcatctttcttacttcagagttagcaaacaacaagttgaatggcaacttgacatttttgcatcaccatctgcctcataggccactctttcctttccctctgcccaccaagtcctcatatctgcagagaacccattgatcaccttgtgccctcttttggggcagcctgttgaaactgaagcacagtctgaccactcacgataaagcagatttttctctgcctctgccacaaggtttcagagtagtgtagtccaagtagagggtggggcacccttttctcgccgcaagaagcccattcctatggaagtctagcaaagcaatacgactcagcccagcactctctgccccaggactcatggctctgctgtgccttccatcctgggctcccttctctcctgtgaccttaagaactttgtctggtggctttgctggaacattgtcactgttttcactgtcatgcagggagcccagcactgtggccaggatggcagagacttccttgtcatcatggagaagtgccagcaggggactgggaaaagcactctacccagacctcacctcccttcctccttttgcccatgaacaagatgcagtggccctaggggttccactagtgtctgctttcctttattattgcactgtgtgaggtttttttgtaaatccttgtattcctattttttttaaagaaaaaaaaaaaaccttaagctgcatttgttactgaaatgattaatgcactgatgggtcctgaattcaccttgagaaagacccaaaggccagtcagggggtggggggaactcagctaaatagacctagttactgccctgctaggccatgctgtactgtgagcccctcctcactctctaccaaccctaaaccctgaggacaggggaggaacccacagcttccttctcctgccagctgcagatggtttgccttgcctttccaccccctaattgtcaaccacaaaaatgagaaattcctcttctagctcagccttgagtccattgccaaattttcagcacacctgccagcaacttgggggaataagcgaaggtttccctacaagagggaaagaaggcaaaaacggcacagctatctccaaacacatctgagttcatttcaaaagtgaccaagggaatctccgcacaaaagtgcagattgaggaattgtgatgggtcattcccaagaatcccccaaggggcatcccaaatccctgaggagtaacagctgcaaacctggtcagttctcagtgagagccagctcacttatagctttgctgctagaacctgttgtggctgcatttcctggtggccagtgacaactgtgtaaccagaatagctgcatggcgctgaccctttggccggaacttggtctcttggctccctccttggccacccaccacctctcgcacagcccctctgtttttacaccaataacaagaattaagggggaagccctggcagctatacgttttcaaccagactcctttgccgggacccagcccgccaccctgctcgcctccgtcaaacccccggccaatgcagtgagcaccatgtagctcccttgatttaaaaaaaataaaaaataaaaaaaaaaggaaaaaaaaatacaacacacacacaaaaataaaaaaaatattctaatgaatgtatctttctaaaggactgacgttcaatcaaatatctgaaaatactaaaggtcaaaaccttgtcagatgttaacttctaagttcggtttgggattttttttttttaatagaaatcaagttgtttttgtttttaaggaaaagcgggtcattgcaaagggctgggtgtaattttatgtttcatttccttcattttaaagcaatacaaggttatggagcagatggttttgtgccgaatcatgaatactagtcaagtcacacactctggaaacttgcaactttttgtttgttttggttttcaaataaatataaatatgatatatataggaactaatatagtaatgcaccatgtaacaaagcctagttcagtccatggcttttaattctcttaacactatagataaggattgtgttacagttgctagtagcggcaggaagatgtcaggctcactttcctctgattcccgaaatggggggaacctctaaccataaaggaatggtagaacagtccattcctcggatcagagaaaaatgcagacatggtgtcacctggatttttttctgcccatgaatgttgccagtcagtacctgtcctccttgtttctctatttttggttatgaatgttggggttaccacctgcatttaggggaaaattgtgttctgtgctttcctggtatcttgttccgaggtactctagttctgtctttcaaccaagaaaatagaattgtggtgtttcttttattgaacttttaacagtctctttagtaaatacaggtagttgaataattgtttcaagagctcaacagatgacaagcttcttttctagaaataagacattttttgacaactttatcatgtataacagatctgttttttttccttgtgttcttccaagcttctggttagagaaaaagagaaaaaaaaaaaaggaaaatgtgtctaaagtccatcagtgttaactccctgtgacagggatgaaggaaaatactttaatagttcaaaaaataataatgctgaaagctctctacgaaagactgaatgtaaaagtaaaaagtgtacatagttgtaaaaaaaaggagtttttaaacatgtttattttctatgcacttttttttatttaagtgatagtttaattaataaacatgtcaagtttattgctgcacatggttaagcttccttttggctttggttggagagggtggagaaaagcgggaggggcatggcctgtgacctggtcacaaagtaccttccacagtcctttactttaaggtggcatcactaaattattccctgtagcccaccttcaggtccactccacactggctctcttgactattttcttcctttattcatcagtgatgtatgttcaggacctaattaattgtggatatgaggcagggtcaagaggacaaaggaacagggcctttaccttctacatagctcccctgtttcatccaaggaggttaagtattgatttttatcggttttctcaactgtgaatataataaactgaaagcatttcagggagaagctggagaacaccttctctagctgcactccaccttaaggctgaagctggatttgtt

SEQ ID NO: 370692 - DNA, 16903 bp, Homo sapiens
ctgcttcacttcacggggcgaacatggcgcacagctgtcggtggcgcttccccgcccgacccgggaccaccgggggcggcggcggcggggggcgccggggcctagggggcgccccgcggcaacgcgtcccggccctgctgcttccccccgggcccccggtcggcggtggcggccccggggcgcccccctcccccccggctgtggcggccgcggcggcggcggcgggaagcagcggggctggggttccagggggagcggccgccgcctcagcagcctcctcgtcgtccgcctcgtcttcgtcttcgtcatcgtcctcagcctcttcagggccggccctgctccgggtgggcccgggcttcgacgcggcgctgcaggtctcggccgccatcggcaccaacctgcgccggttccgggccgtgtttggggagagcggcgggggaggcggcagcggagaggatgagcaattcttaggttttggctcagatgaagaagtcagagtgcgaagtcccacaaggtctccttcagttaaaactagtcctcgaaaacctcgtgggagacctagaagtggctctgaccgaaattcagctatcctctcagatccatctgtgttttcccctctaaataaatcagagaccaaatctggagataagatcaagaagaaagattctaaaagtatagaaaagaagagaggaagacctcccaccttccctggagtaaaaatcaaaataacacatggaaaggacatttcagagttaccaaagggaaacaaagaagatagcctgaaaaaaattaaaaggacaccttctgctacgtttcagcaagccacaaagattaaaaaattaagagcaggtaaactctctcctctcaagtctaagtttaagacagggaagcttcaaataggaaggaagggggtacaaattgtacgacggagaggaaggcctccatcaacagaaaggataaagaccccttcgggtctcctcattaattctgaactggaaaagccccagaaagtccggaaagacaaggaaggaacacctccacttacaaaagaagataagacagttgtcagacaaagccctcgaaggattaagccagttaggattattccttcttcaaaaaggacagatgcaaccattgctaagcaactcttacagagggcaaaaaagggggctcaaaagaaaattgaaaaagaagcagctcagctgcagggaagaaaggtgaagacacaggtcaaaaatattcgacagttcatcatgcctgttgtcagtgctatctcctcgcggatcattaagacccctcggcggtttatagaggatgaggattatgaccctccaattaaaattgcccgattagagtctacaccgaatagtagattcagtgccccgtcctgtggatcttctgaaaaatcaagtgcagcttctcagcactcctctcaaatgtcttcagactcctctcgatctagtagccccagtgttgatacctccacagactctcaggcttctgaggagattcaggtacttcctgaggagcggagcgatacccctgaagttcatcctccactgcccatttcccagtccccagaaaatgagagtaatgataggagaagcagaaggtattcagtgtcggagagaagttttggatctagaacgacgaaaaaattatcaactctacaaagtgccccccagcagcagacctcctcgtctccacctccacctctgctgactccaccgccaccactgcagccagcctccagtatctctgaccacacaccttggcttatgcctccaacaatccccttagcatcaccatttttgcctgcttccactgctcctatgcaagggaagcgaaaatctattttgcgagaaccgacatttaggtggacttctttaaagcattctaggtcagagccacaatacttttcctcagcaaagtatgccaaagaaggtcttattcgcaaaccaatatttgataatttccgaccccctccactaactcccgaggacgttggctttgcatctggtttttctgcatctggtaccgctgcttcagcccgattgttttcgccactccattctggaacaaggtttgatatgcacaaaaggagccctcttctgagagctccaagatttactccaagtgaggctcactctagaatatttgagtctgtaaccttgcctagtaatcgaacttctgctggaacatcttcttcaggagtatccaatagaaaaaggaaaagaaaagtgtttagtcctattcgatctgaaccaagatctccttctcactccatgaggacaagaagtggaaggcttagtagttctgagctctcacctctcacccccccgtcttctgtctcttcctcgttaagcatttctgttagtcctcttgccactagtgccttaaacccaacttttacttttccttctcattccctgactcagtctggggaatctgcagagaaaaatcagagaccaaggaagcagactagtgctccggcagagccattttcatcaagtagtcctactcctctcttcccttggtttaccccaggctctcagactgaaagagggagaaataaagacaaggcccccgaggagctgtccaaagatcgagatgctgacaagagcgtggagaaggacaagagtagagagagagaccgggagagagaaaaggagaataagcgggagtcaaggaaagagaaaaggaaaaagggatcagaaattcagagtagttctgctttgtatcctgtgggtagggtttccaaagagaaggttgttggtgaagatgttgccacttcatcttctgccaaaaaagcaacagggcggaagaagtcttcatcacatgattctgggactgatattacttctgtgactcttggggatacaacagctgtcaaaaccaaaatacttataaagaaagggagaggaaatctggaaaaaaccaacttggacctcggcccaactgccccatccctggagaaggagaaaaccctctgcctttccactccttcatctagcactgttaaacattccacttcctccataggctccatgttggctcaggcagacaagcttccaatgactgacaagagggttgccagcctcctaaaaaaggccaaagctcagctctgcaagattgagaagagtaagagtcttaaacaaaccgaccagcccaaagcacagggtcaagaaagtgactcatcagagacctctgtgcgaggaccccggattaaacatgtctgcagaagagcagctgttgcccttggccgaaaacgagctgtgtttcctgatgacatgcccaccctgagtgccttaccatgggaagaacgagaaaagattttgtcttccatggggaatgatgacaagtcatcaattgctggctcagaagatgctgaacctcttgctccacccatcaaaccaattaaacctgtcactagaaacaaggcaccccaggaacctccagtaaagaaaggacgtcgatcgaggcggtgtgggcagtgtcccggctgccaggtgcctgaggactgtggtgtttgtactaattgcttagataagcccaagtttggtggtcgcaatataaagaagcagtgctgcaagatgagaaaatgtcagaatctacaatggatgccttccaaagcctacctgcagaagcaagctaaagctgtgaaaaagaaagagaaaaagtctaagaccagtgaaaagaaagacagcaaagagagcagtgttgtgaagaacgtggtggactctagtcagaaacctaccccatcagcaagagaggatcctgccccaaagaaaagcagtagtgagcctcctccacgaaagcccgtcgaggaaaagagtgaagaagggaatgtctcggcccctgggcctgaatccaaacaggccaccactccagcttccaggaagtcaagcaagcaggtctcccagccagcagtggtcatcccgcctcagccacctactacaggaccgccaagaaaagaagttcccaaaaccactcctagtgagcccaagaaaaagcagcctccaccaccagaatcaggtccagagcagagcaaacagaaaaaagtggctccccgcccaagtatccctgtaaaacaaaaaccaaaagaaaaggaaaaaccacctccggtcaataagcaggagaatgcaggcactttgaacatcctcagcactctctccaatggcaatagttctaagcaaaaaattccagcagatggagtccacaggatcagagtggactttaagtttgtgtattgccaagtctgttgtgagcccttccacaagttttgtttagaggagaacgagcgccctctggaggaccagctggaaaattggtgttgtcgtcgttgcaaattctgtcacgtttgtggaaggcaacatcaggctacaaagcagctgctggagtgtaataagtgccgaaacagctatcaccctgagtgcctgggaccaaactaccccaccaaacccacaaagaagaagaaagtctggatctgtaccaagtgtgttcgctgtaagagctgtggatccacaactccaggcaaagggtgggatgcacagtggtctcatgatttctcactgtgtcatgattgcgccaagctctttgctaaaggaaacttctgccctctctgtgacaaatgttatgatgatgatgactatgagagtaagatgatgcaatgtggaaagtgtgatcgctgggtccattccaaatgtgagaatctttcagatgagatgtatgagattctatctaatctgccagaaagtgtggcctacacttgtgtgaactgtactgagcggcaccctgcagagtggcgactggcccttgaaaaagagctgcagatttctctgaagcaagttctgacagctttgttgaattctcggactaccagccatttgctacgctaccggcaggctgccaagcctccagacttaaatcccgagacagaggagagtataccttcccgcagctcccccgaaggacctgatccaccagttcttactgaggtcagcaaacaggatgatcagcagcctttagatctagaaggagtcaagaggaagatggaccaagggaattacacatctgtgttggagttcagtgatgatattgtgaagatcattcaagcagccattaattcagatggaggacagccagaaattaaaaaagccaacagcatggtcaagtccttcttcattcggcaaatggaacgtgtttttccatggttcagtgtcaaaaagtccaggttttgggagccaaataaagtatcaagcaacagtgggatgttaccaaacgcagtgcttccaccttcacttgaccataattatgctcagtggcaggagcgagaggaaaacagccacactgagcagcctcctttaatgaagaaaatcattccagctcccaaacccaaaggtcctggagaaccagactcaccaactcctctgcatcctcctacaccaccaattttgagtactgataggagtcgagaagacagtccagagctgaacccacccccaggcatagaagacaatagacagtgtgcgttatgtttgacttatggtgatgacagtgctaatgatgctggtcgtttactatatattggccaaaatgagtggacacatgtaaattgtgctttgtggtcagcggaagtgtttgaagatgatgacggatcactaaagaatgtgcatatggctgtgatcaggggcaagcagctgagatgtgaattctgccaaaagccaggagccaccgtgggttgctgtctcacatcctgcaccagcaactatcacttcatgtgttcccgagccaagaactgtgtctttctggatgataaaaaagtatattgccaacgacatcgggatttgatcaaaggcgaagtggttcctgagaatggatttgaagttttcagaagagtgtttgtggactttgaaggaatcagcttgagaaggaagtttctcaatggcttggaaccagaaaatatccacatgatgattgggtctatgacaatcgactgcttaggaattctaaatgatctctccgactgtgaagataagctctttcctattggatatcagtgttccagggtatactggagcaccacagatgctcgcaagcgctgtgtatatacatgcaagatagtggagtgccgtcctccagtcgtagagccggatatcaacagcactgttgaacatgatgaaaacaggaccattgcccatagtccaacatcttttacagaaagttcatcaaaagagagtcaaaacacagctgaaattataagtcctccatcaccagaccgacctcctcattcacaaacctctggctcctgttattatcatgtcatctcaaaggtccccaggattcgaacacccagttattctccaacacagagatcccctggctgtcgaccgttgccttctgcaggaagtcctaccccaaccactcatgaaatagtcacagtaggtgatcctttactctcctctggacttcgaagcattggctccaggcgtcacagtacctcttccttatcaccccagcggtccaaactccggataatgtctccaatgagaactgggaatacttactctaggaataatgtttcctcagtctccaccaccgggaccgctactgatcttgaatcaagtgccaaagtagttgatcatgtcttagggccactgaattcaagtactagtttagggcaaaacacttccacctcttcaaatttgcaaaggacagtggttactgtaggcaataaaaacagtcacttggatggatcttcatcttcagaaatgaagcagtccagtgcttcagacttggtgtccaagagctcctctttaaagggagagaagaccaaagtgctgagttccaagagctcagagggatctgcacataatgtggcttaccctggaattcctaaactggccccacaggttcataacacaacatctagagaactgaatgttagtaaaatcggctcctttgctgaaccctcttcagtgtcgttttcttctaaagaggccctctccttcccacacctccatttgagagggcaaaggaatgatcgagaccaacacacagattctacccaatcagcaaactcctctccagatgaagatactgaagtcaaaaccttgaagctatctggaatgagcaacagatcatccattatcaacgaacatatgggatctagttccagagataggagacagaaagggaaaaaatcctgtaaagaaactttcaaagaaaagcattccagtaaatcttttttggaacctggtcaggtgacaactggtgaggaaggaaacttgaagccagagtttatggatgaggttttgactcctgagtatatgggccaacgaccatgtaacaatgtttcttctgataagattggtgataaaggcctttctatgccaggagtccccaaagctccacccatgcaagtagaaggatctgccaaggaattacaggcaccacggaaacgcacagtcaaagtgacactgacacctctaaaaatggaaaatgagagtcaatccaaaaatgccctgaaagaaagtagtcctgcttcccctttgcaaatagagtcaacatctcccacagaaccaatttcagcctctgaaaatccaggagatggtccagtggcccaaccaagccccaataatacctcatgccaggattctcaaagtaacaactatcagaatcttccagtacaggacagaaacctaatgcttccagatggccccaaacctcaggaggatggctcttttaaaaggaggtatccccgtcgcagtgcccgtgcacgttctaacatgttttttgggcttaccccactctatggagtaagatcctatggtgaagaagacattccattctacagcagctcaactgggaagaagcgaggcaagagatcagctgaaggacaggtggatggggccgatgacttaagcacttcagatgaagacgacttatactattacaacttcactagaacagtgatttcttcaggtggagaggaacgactggcatcccataatttatttcgggaggaggaacagtgtgatcttccaaaaatctcacagttggatggtgttgatgatgggacagagagtgatactagtgtcacagccacaacaaggaaaagcagccagattccaaaaagaaatggtaaagaaaatggaacagagaacttaaagattgatagacctgaagatgctggggagaaagaacatgtcactaagagttctgttggccacaaaaatgagccaaagatggataactgccattctgtaagcagagttaaaacacagggacaagattccttggaagctcagctcagctcattggagtcaagccgcagagtccacacaagtaccccctccgacaaaaatttactggacacctataatactgagctcctgaaatcagattcagacaataacaacagtgatgactgtgggaatatcctgccttcagacattatggactttgtactaaagaatactccatccatgcaggctttgggtgagagcccagagtcatcttcatcagaactcctgaatcttggtgaaggattgggtcttgacagtaatcgtgaaaaagacatgggtctttttgaagtattttctcagcagctgcctacaacagaacctgtggatagtagtgtctcttcctctatctcagcagaggaacagtttgagttgcctctagagctaccatctgatctgtctgtcttgaccacccggagtcccactgtccccagccagaatcccagtagactagctgttatctcagactcaggggagaagagagtaaccatcacagaaaaatctgtagcctcctctgaaagtgacccagcactgctgagcccaggagtagatccaactcctgaaggccacatgactcctgatcattttatccaaggacacatggatgcagaccacatctctagccctccttgtggttcagtagagcaaggtcatggcaacaatcaggatttaactaggaacagtagcacccctggccttcaggtacctgtttccccaactgttcccatccagaaccagaagtatgtgcccaattctactgatagtcctggcccgtctcagatttccaatgcagctgtccagaccactccaccccacctgaagccagccactgagaaactcatagttgttaaccagaacatgcagccactttatgttctccaaactcttccaaatggagtgacccaaaaaatccaattgacctcttctgttagttctacacccagtgtgatggagacaaatacttcagtattgggacccatgggaggtggtctcacccttaccacaggactaaatccaagcttgccaacttctcaatctttgttcccttctgctagcaaaggattgctacccatgtctcatcaccagcacttacattccttccctgcagctactcaaagtagtttcccaccaaacatcagcaatcctccttcaggcctgcttattggggttcagcctcctccggatccccaacttttggtttcagaatccagccagaggacagacctcagtaccacagtagccactccatcctctggactcaagaaaagacccatatctcgtctacagacccgaaagaataaaaaacttgctccctctagtaccccttcaaacattgccccttctgatgtggtttctaatatgacattgattaacttcacaccctcccagcttcctaatcatccaagtctgttagatttggggtcacttaatacttcatctcaccgaactgtccccaacatcataaaaagatctaaatctagcatcatgtattttgaaccggcacccctgttaccacagagtgtgggaggaactgctgccacagcggcaggcacatcaacaataagccaggatactagccacctcacatcagggtctgtgtctggcttggcatccagttcctctgtcttgaatgttgtatccatgcaaactaccacaacccctacaagtagtgcgtcagttccaggacacgtcaccttaaccaacccaaggttgcttggtaccccagatattggctcaataagcaatcttttaatcaaagctagccagcagagcctggggattcaggaccagcctgtggctttaccgccaagttcaggaatgtttccacaactggggacatcacagaccccctctactgctgcaataacagcggcatctagcatctgtgtgctcccctccactcagactacgggcataacagccgcttcaccttctggggaagcagacgaacactatcagcttcagcatgtgaaccagctccttgccagcaaaactgggattcattcttcccagcgtgatcttgattctgcttcagggccccaggtatccaactttacccagacggtagacgctcctaatagcatgggactggagcagaacaaggctttatcctcagctgtgcaagccagccccacctctcctgggggttctccatcctctccatcttctggacagcggtcagcaagcccttcagtgccgggtcccactaaacccaaaccaaaaaccaaacggtttcagctgcctctagacaaagggaatggcaagaagcacaaagtttcccatttgcggaccagttcttctgaagcacacattccagaccaagaaacgacatccctgacctcaggcacagggactccaggagcagaggctgagcagcaggatacagctagcgtggagcagtcctcccagaaggagtgtgggcaacctgcagggcaagtcgctgttcttccggaagttcaggtgacccaaaatccagcaaatgaacaagaaagtgcagaacctaaaacagtggaagaagaggaaagtaatttcagctccccactgatgctttggcttcagcaagaacaaaagcggaaggaaagcattactgagaaaaaacccaagaaaggacttgtttttgaaatttccagtgatgatggctttcagatctgtgcagaaagtattgaagatgcctggaagtcattgacagataaagtccaggaagctcgatcaaatgcccgcctaaagcagctctcatttgcaggtgttaacggtttgaggatgctggggattctccatgatgcagttgtgttcctcattgagcagctgtctggtgccaagcactgtcgaaattacaaattccgtttccacaagccagaggaggccaatgaaccccccttgaaccctcacggctcagccagggctgaagtccacctcaggaagtcagcatttgacatgtttaacttcctggcttctaaacatcgtcagcctcctgaatacaaccccaatgatgaagaagaggaggaggtacagctgaagtcagctcggagggcaactagcatggatctgccaatgcccatgcgcttccggcacttaaaaaagacttctaaggaggcagttggtgtctacaggtctcccatccatggccggggtcttttctgtaagagaaacattgatgcaggtgagatggtgattgagtatgccggcaacgtcatccgctccatccagactgacaagcgggaaaagtattacgacagcaagggcattggttgctatatgttccgaattgatgactcagaggtagtggatgccaccatgcatggaaatgctgcacgcttcatcaatcactcgtgtgagcctaactgctattctcgggtcatcaatattgatgggcagaagcacattgtcatctttgccatgcgtaagatctaccgaggagaggaactcacttacgactataagttccccattgaggatgccagcaacaagctgccctgcaactgtggcgccaagaaatgccggaagttcctaaactaaagctgctcttctcccccagtgttggagtgcaaggaggcggggccatccaaagcaacgctgaaggccttttccagcagctgggagctcccggattgcgtggcacagctgaggggcctctgtgatggctgagctctcttatgtcctatactcacatcagacatgtgatcatagtcccagagacagagttgaggtctcgaagaaaagatccatgatcggctttctcctggggcccctccaattgtttactgttagaaagtgggaatggggtccctagcagacttgcctggaaggagcctattatagagggttggttatgttgggagattgggcctgaatttctccacagaaataagttgccatcctcaggttggccctttcccaagcactgtaagtgagtgggtcaggcaaagccccaaatggagggttggttagattcctgacagtttgccagccaggccccacctacagcgtctgtcgaacaaacagaggtctggtggttttccctactatcctcccactcgagagttcacttctggttgggagacaggattcctagcacctccggtgtcaaaaggctgtcatggggttgtgccaattaattaccaaacattgagcctgcaggctttgagtgggagtgttgcccccaggagccttatctcagccaattacctttcttgacagtaggagcggcttccctctcccattccctcttcactcccttttcttcctttcccctgtcttcatgccactgctttcccatgcttctttcgggttgtaggggagactgactgcctgctcaaggacactccctgctgggcataggatgtgcctgcaaaaagttccctgagcctgtaagcactccaggtggggaagtggacaggagccattggtcataaccagacagaatttggaaacattttcataaagctccatggagagttttaaagaaacatatgtagcatgattttgtaggagaggaaaaagattatttaaataggatttaaatcatgcaacaacgagagtatcacagccaggatgacccttgggtcccattcctaagacatggttactttattttccccttgttaagacataggaagacttaatttttaaacggtcagtgtccagttgaaggcagaacactaatcagatttcaaggcccacaacttggggactagaccaccttatgttgagggaactctgccacctgcgtgcaacccacagctaaagtaaattcaatgacactactgccctgattactccttaggatgtggtcaaaacagcatcaaatgtttcttctcttcctttccccaagacagagtcctgaacctgttaaattaagtcattggattttactctgttctgtttacagtttactatttaaggttttataaatgtaaatatattttgtatatttttctatgagaagcacttcatagggagaagcacttatgacaaggctattttttaaaccgcggtattatcctaatttaaaagaagatcggtttttaataattttttattttcataggatgaagttagagaaaatattcagctgtacacacaaagtctggtttttcctgcccaacttccccctggaaggtgtactttttgttgtttaatgtgtagcttgtttgtgccctgttgacataaatgtttcctgggtttgctctttgacaataaatggagaaggaaggtcacccaactccattgggccactcccctccttcccctattgaagctcctcaaaaggctacagtaatatcttgatacaacagattctcttctttcccgcctctctcctttccggcgcaacttccagagtggtgggagacggcaatctttacatttccctcatctttcttacttcagagttagcaaacaacaagttgaatggcaacttgacatttttgcatcaccatctgcctcataggccactctttcctttccctctgcccaccaagtcctcatatctgcagagaacccattgatcaccttgtgccctcttttggggcagcctgttgaaactgaagcacagtctgaccactcacgataaagcagatttttctctgcctctgccacaaggtttcagagtagtgtagtccaagtagagggtggggcacccttttctcgccgcaagaagcccattcctatggaagtctagcaaagcaatacgactcagcccagcactctctgccccaggactcatggctctgctgtgccttccatcctgggctcccttctctcctgtgaccttaagaactttgtctggtggctttgctggaacattgtcactgttttcactgtcatgcagggagcccagcactgtggccaggatggcagagacttccttgtcatcatggagaagtgccagcaggggactgggaaaagcactctacccagacctcacctcccttcctccttttgcccatgaacaagatgcagtggccctaggggttccactagtgtctgctttcctttattattgcactgtgtgaggtttttttgtaaatccttgtattcctattttttttaaagaaaaaaaaaaaaccttaagctgcatttgttactgaaatgattaatgcactgatgggtcctgaattcaccttgagaaagacccaaaggccagtcagggggtggggggaactcagctaaatagacctagttactgccctgctaggccatgctgtactgtgagcccctcctcactctctaccaaccctaaaccctgaggacaggggaggaacccacagcttccttctcctgccagctgcagatggtttgccttgcctttccaccccctaattgtcaaccacaaaaatgagaaattcctcttctagctcagccttgagtccattgccaaattttcagcacacctgccagcaacttgggggaataagcgaaggtttccctacaagagggaaagaaggcaaaaacggcacagctatctccaaacacatctgagttcatttcaaaagtgaccaagggaatctccgcacaaaagtgcagattgaggaattgtgatgggtcattcccaagaatcccccaaggggcatcccaaatccctgaggagtaacagctgcaaacctggtcagttctcagtgagagccagctcacttatagctttgctgctagaacctgttgtggctgcatttcctggtggccagtgacaactgtgtaaccagaatagctgcatggcgctgaccctttggccggaacttggtctcttggctccctccttggccacccaccacctctcgcacagcccctctgtttttacaccaataacaagaattaagggggaagccctggcagctatacgttttcaaccagactcctttgccgggacccagcccgccaccctgctcgcctccgtcaaacccccggccaatgcagtgagcaccatgtagctcccttgatttaaaaaaaataaaaaataaaaaaaaaaggaaaaaaaaatacaacacacacacaaaaataaaaaaaatattctaatgaatgtatctttctaaaggactgacgttcaatcaaatatctgaaaatactaaaggtcaaaaccttgtcagatgttaacttctaagttcggtttgggattttttttttttaatagaaatcaagttgtttttgtttttaaggaaaagcgggtcattgcaaagggctgggtgtaattttatgtttcatttccttcattttaaagcaatacaaggttatggagcagatggttttgtgccgaatcatgaatactagtcaagtcacacactctggaaacttgcaactttttgtttgttttggttttcaaataaatataaatatgatatatataggaactaatatagtaatgcaccatgtaacaaagcctagttcagtccatggcttttaattctcttaacactatagataaggattgtgttacagttgctagtagcggcaggaagatgtcaggctcactttcctctgattcccgaaatggggggaacctctaaccataaaggaatggtagaacagtccattcctcggatcagagaaaaatgcagacatggtgtcacctggatttttttctgcccatgaatgttgccagtcagtacctgtcctccttgtttctctatttttggttatgaatgttggggttaccacctgcatttaggggaaaattgtgttctgtgctttcctggtatcttgttccgaggtactctagttctgtctttcaaccaagaaaatagaattgtggtgtttcttttattgaacttttaacagtctctttagtaaatacaggtagttgaataattgtttcaagagctcaacagatgacaagcttcttttctagaaataagacattttttgacaactttatcatgtataacagatctgttttttttccttgtgttcttccaagcttctggttagagaaaaagagaaaaaaaaaaaaggaaaatgtgtctaaagtccatcagtgttaactccctgtgacagggatgaaggaaaatactttaatagttcaaaaaataataatgctgaaagctctctacgaaagactgaatgtaaaagtaaaaagtgtacatagttgtaaaaaaaaggagtttttaaacatgtttattttctatgcacttttttttatttaagtgatagtttaattaataaacatgtcaagtttattgctgcacatggttaagcttccttttggctttggttggagagggtggagaaaagcgggaggggcatggcctgtgacctggtcacaaagtaccttccacagtcctttactttaaggtggcatcactaaattattccctgtagcccaccttcaggtccactccacactggctctcttgactattttcttcctttattcatcagtgatgtatgttcaggacctaattaattgtggatatgaggcagggtcaagaggacaaaggaacagggcctttaccttctacatagctcccctgtttcatccaaggaggttaagtattgatttttatcggttttctcaactgtgaatataataaactgaaagcatttcagggagaagctggagaacaccttctctagctgcactccaccttaaggctgaagctggatttgtt

SEQ ID NO: 370693 - DNA, 13232 bp, Homo sapiens
ctgcttcacttcacggggcgaacatggcgcacagctgtcggtggcgcttccccgcccgacccgggaccaccgggggcggcggcggcggggggcgccggggcctagggggcgccccgcggcaacgcgtcccggccctgctgcttccccccgggcccccggtcggcggtggcggccccggggcgcccccctcccccccggctgtggcggccgcggcggcggcggcgggaagcagcggggctggggttccagggggagcggccgccgcctcagcagcctcctcgtcgtccgcctcgtcttcgtcttcgtcatcgtcctcagcctcttcagggccggccctgctccgggtgggcccgggcttcgacgcggcgctgcaggtctcggccgccatcggcaccaacctgcgccggttccgggccgtgtttggggagagcggcgggggaggcggcagcggagaggatgagcaattcttaggttttggctcagatgaagaagtcagagtgcgaagtcccacaaggtctccttcagttaaaactagtcctcgaaaacctcgtgggagacctagaagtggctctgaccgaaattcagctatcctctcagatccatctgtgttttcccctctaaataaatcagagaccaaatctggagataagatcaagaagaaagattctaaaagtatagaaaagaagagaggaagacctcccaccttccctggagtaaaaatcaaaataacacatggaaaggacatttcagagttaccaaagggaaacaaagaagatagcctgaaaaaaattaaaaggacaccttctgctacgtttcagcaagccacaaagattaaaaaattaagagcaggtaaactctctcctctcaagtctaagtttaagacagggaagcttcaaataggaaggaagggggtacaaattgtacgacggagaggaaggcctccatcaacagaaaggataaagaccccttcgggtctcctcattaattctgaactggaaaagccccagaaagtccggaaagacaaggaaggaacacctccacttacaaaagaagataagacagttgtcagacaaagccctcgaaggattaagccagttaggattattccttcttcaaaaaggacagatgcaaccattgctaagcaactcttacagagggcaaaaaagggggctcaaaagaaaattgaaaaagaagcagctcagctgcagggaagaaaggtgaagacacaggtcaaaaatattcgacagttcatcatgcctgttgtcagtgctatctcctcgcggatcattaagacccctcggcggtttatagaggatgaggattatgaccctccaattaaaattgcccgattagagtctacaccgaatagtagattcagtgccccgtcctgtggatcttctgaaaaatcaagtgcagcttctcagcactcctctcaaatgtcttcagactcctctcgatctagtagccccagtgttgatacctccacagactctcaggcttctgaggagattcaggtacttcctgaggagcggagcgatacccctgaagttcatcctccactgcccatttcccagtccccagaaaatgagagtaatgataggagaagcagaaggtattcagtgtcggagagaagttttggatctagaacgacgaaaaaattatcaactctacaaagtgccccccagcagcagacctcctcgtctccacctccacctctgctgactccaccgccaccactgcagccagcctccagtatctctgaccacacaccttggcttatgcctccaacaatccccttagcatcaccatttttgcctgcttccactgctcctatgcaagggaagcgaaaatctattttgcgagaaccgacatttaggtggacttctttaaagcattctaggtcagagccacaatacttttcctcagcaaagtatgccaaagaaggtcttattcgcaaaccaatatttgataatttccgaccccctccactaactcccgaggacgttggctttgcatctggtttttctgcatctggtaccgctgcttcagcccgattgttttcgccactccattctggaacaaggtttgatatgcacaaaaggagccctcttctgagagctccaagatttactccaagtgaggctcactctagaatatttgagtctgtaaccttgcctagtaatcgaacttctgctggaacatcttcttcaggagtatccaatagaaaaaggaaaagaaaagtgtttagtcctattcgatctgaaccaagatctccttctcactccatgaggacaagaagtggaaggcttagtagttctgagctctcacctctcacccccccgtcttctgtctcttcctcgttaagcatttctgttagtcctcttgccactagtgccttaaacccaacttttacttttccttctcattccctgactcagtctggggaatctgcagagaaaaatcagagaccaaggaagcagactagtgctccggcagagccattttcatcaagtagtcctactcctctcttcccttggtttaccccaggctctcagactgaaagagggagaaataaagacaaggcccccgaggagctgtccaaagatcgagatgctgacaagagcgtggagaaggacaagagtagagagagagaccgggagagagaaaaggagaataagcgggagtcaaggaaagagaaaaggaaaaagggatcagaaattcagagtagttctgctttgtatcctgtgggtagggtttccaaagagaaggttgttggtgaagatgttgccacttcatcttctgccaaaaaagcaacagggcggaagaagtcttcatcacatgattctgggactgatattacttctgtgactcttggggatacaacagctgtcaaaaccaaaatacttataaagaaagggagaggaaatctggaaaaaaccaacttggacctcggcccaactgccccatccctggagaaggagaaaaccctctgcctttccactccttcatctagcactgttaaacattccacttcctccataggctccatgttggctcaggcagacaagcttccaatgactgacaagagggttgccagcctcctaaaaaaggccaaagctcagctctgcaagattgagaagagtaagagtcttaaacaaaccgaccagcccaaagcacagggtcaagaaagtgactcatcagagacctctgtgcgaggaccccggattaaacatgtctgcagaagagcagctgttgcccttggccgaaaacgagctgtgtttcctgatgacatgcccaccctgagtgccttaccatgggaagaacgagaaaagattttgtcttccatggggaatgatgacaagtcatcaattgctggctcagaagatgctgaacctcttgctccacccatcaaaccaattaaacctgtcactagaaacaaggcaccccaggaacctccagtaaagaaaggacgtcgatcgaggcggtgtgggcagtgtcccggctgccaggtgcctgaggactgtggtgtttgtactaattgcttagataagcccaagtttggtggtcgcaatataaagaagcagtgctgcaagatgagaaaatgtcagaatctacaatggatgccttccaaagcctacctgcagaagcaagctaaagctgtgaaaaagaaagagaaaaagtctaagaccagtgaaaagaaagacagcaaagagagcagtgttgtgaagaacgtggtggactctagtcagaaacctaccccatcagcaagagaggatcctgccccaaagaaaagcagtagtgagcctcctccacgaaagcccgtcgaggaaaagagtgaagaagggaatgtctcggcccctgggcctgaatccaaacaggccaccactccagcttccaggaagtcaagcaagcaggtctcccagccagcagtggtcatcccgcctcagccacctactacaggaccgccaagaaaagaagttcccaaaaccactcctagtgagcccaagaaaaagcagcctccaccaccagaatcaggtccagagcagagcaaacagaaaaaagtggctccccgcccaagtatccctgtaaaacaaaaaccaaaagaaaaggaaaaaccacctccggtcaataagcaggagaatgcaggcactttgaacatcctcagcactctctccaatggcaatagttctaagcaaaaaattccagcagatggagtccacaggatcagagtggactttaaggaggattgtgaagcagaaaatgtgtgggagatgggaggcttaggaatcttgacttctgttcctataacacccagggtggtttgctttctctgtgccagtagtgggcatgtagagtttgtgtattgccaagtctgttgtgagcccttccacaagttttgtttagaggagaacgagcgccctctggaggaccagctggaaaattggtgttgtcgtcgttgcaaattctgtcacgtttgtggaaggcaacatcaggctacaaagcagctgctggagtgtaataagtgccgaaacagctatcaccctgagtgcctgggaccaaactaccccaccaaacccacaaagaagaagaaagtctggatctgtaccaagtgtgttcgctgtaagagctgtggatccacaactccaggcaaagggtgggatgcacagtggtctcatgatttctcactgtgtcatgattgcgccaagctctttgctaaaggaaacttctgccctctctgtgacaaatgttatgatgatgatgactatgagagtaagatgatgcaatgtggaaagtgtgatcgctgggtccattccaaatgtgagaatctttcagatgagatgtatgagattctatctaatctgccagaaagtgtggcctacacttgtgtgaactgtactgagcggcaccctgcagagtggcgactggcccttgaaaaagagctgcagatttctctgaagcaagttctgacagctttgttgaattctcggactaccagccatttgctacgctaccggcaggctgccaagcctccagacttaaatcccgagacagaggagagtataccttcccgcagctcccccgaaggacctgatccaccagttcttactgaggtcagcaaacaggatgatcagcagcctttagatctagaaggagtcaagaggaagatggaccaagggaattacacatctgtgttggagttcagtgatgatattgtgaagatcattcaagcagccattaattcagatggaggacagccagaaattaaaaaagccaacagcatggtcaagtccttcttcattcggcaaatggaacgtgtttttccatggttcagtgtcaaaaagtccaggttttgggagccaaataaagtatcaagcaacagtgggatgttaccaaacgcagtgcttccaccttcacttgaccataattatgctcagtggcaggagcgagaggaaaacagccacactgagcagcctcctttaatgaagaaaatcattccagctcccaaacccaaaggtcctggagaaccagactcaccaactcctctgcatcctcctacaccaccaattttgagtactgataggagtcgagaagacagtccagagctgaacccacccccaggcatagaagacaatagacagtgtgcgttatgtttgacttatggtgatgacagtgctaatgatgctggtcgtttactatatattggccaaaatgagtggacacatgtaaattgtgctttgtggtcagcggaagtgtttgaagatgatgacggatcactaaagaatgtgcatatggctgtgatcaggggcaagcagctgagatgtgaattctgccaaaagccaggagccaccgtgggttgctgtctcacatcctgcaccagcaactatcacttcatgtgttcccgagccaagaactgtgtctttctggatgataaaaaagtatattgccaacgacatcgggatttgatcaaaggcgaagtggttcctgagaatggatttgaagttttcagaagagtgtttgtggactttgaaggaatcagcttgagaaggaagtttctcaatggcttggaaccagaaaatatccacatgatgattgggtctatgacaatcgactgcttaggaattctaaatgatctctccgactgtgaagataagctctttcctattggatatcagtgttccagggtatactggagcaccacagatgctcgcaagcgctgtgtatatacatgcaagatagtggagtgccgtcctccagtcgtagagccggatatcaacagcactgttgaacatgatgaaaacaggaccattgcccatagtccaacatcttttacagaaagttcatcaaaagagagtcaaaacacagctgaaattataagtcctccatcaccagaccgacctcctcattcacaaacctctggctcctgttattatcatgtcatctcaaaggtccccaggattcgaacacccagttattctccaacacagagatcccctggctgtcgaccgttgccttctgcaggaagtcctaccccaaccactcatgaaatagtcacagtaggtgatcctttactctcctctggacttcgaagcattggctccaggcgtcacagtacctcttccttatcaccccagcggtccaaactccggataatgtctccaatgagaactgggaatacttactctaggaataatgtttcctcagtctccaccaccgggaccgctactgatcttgaatcaagtgccaaagtagttgatcatgtcttagggccactgaattcaagtactagtttagggcaaaacacttccacctcttcaaatttgcaaaggacagtggttactgtaggcaataaaaacagtcacttggatggatcttcatcttcagaaatgaagcagtccagtgcttcagacttggtgtccaagagctcctctttaaagggagagaagaccaaagtgctgagttccaagagctcagagggatctgcacataatgtggcttaccctggaattcctaaactggccccacaggttcataacacaacatctagagaactgaatgttagtaaaatcggctcctttgctgaaccctcttcagtgtcgttttcttctaaagaggccctctccttcccacacctccatttgagagggcaaaggaatgatcgagaccaacacacagattctacccaatcagcaaactcctctccagatgaagatactgaagtcaaaaccttgaagctatctggaatgagcaacagatcatccattatcaacgaacatatgggatctagttccagagataggagacagaaagggaaaaaatcctgtaaagaaactttcaaagaaaagcattccagtaaatcttttttggaacctggtcaggtgacaactggtgaggaaggaaacttgaagccagagtttatggatgaggttttgactcctgagtatatgggccaacgaccatgtaacaatgtttcttctgataagattggtgataaaggcctttctatgccaggagtccccaaagctccacccatgcaagtagaaggatctgccaaggaattacaggcaccacggaaacgcacagtcaaagtgacactgacacctctaaaaatggaaaatgagagtcaatccaaaaatgccctgaaagaaagtagtcctgcttcccctttgcaaatagagtcaacatctcccacagaaccaatttcagcctctgaaaatccaggagatggtccagtggcccaaccaagccccaataatacctcatgccaggattctcaaagtaacaactatcagaatcttccagtacaggacagaaacctaatgcttccagatggccccaaacctcaggaggatggctcttttaaaaggaggtatccccgtcgcagtgcccgtgcacgttctaacatgttttttgggcttaccccactctatggagtaagatcctatggtgaagaagacattccattctacagcagctcaactgggaagaagcgaggcaagagatcagctgaaggacaggtggatggggccgatgacttaagcacttcagatgaagacgacttatactattacaacttcactagaacagtgatttcttcaggtggagaggaacgactggcatcccataatttatttcgggaggaggaacagtgtgatcttccaaaaatctcacagttggatggtgttgatgatgggacagagagtgatactagtgtcacagccacaacaaggaaaagcagccagattccaaaaagaaatggtaaagaaaatggaacagagaacttaaagattgatagacctgaagatgctggggagaaagaacatgtcactaagagttctgttggccacaaaaatgagccaaagatggataactgccattctgtaagcagagttaaaacacagggacaagattccttggaagctcagctcagctcattggagtcaagccgcagagtccacacaagtaccccctccgacaaaaatttactggacacctataatactgagctcctgaaatcagattcagacaataacaacagtgatgactgtgggaatatcctgccttcagacattatggactttgtactaaagaatactccatccatgcaggctttgggtgagagcccagagtcatcttcatcagaactcctgaatcttggtgaaggattgggtcttgacagtaatcgtgaaaaagacatgggtctttttgaagtattttctcagcagctgcctacaacagaacctgtggatagtagtgtctcttcctctatctcagcagaggaacagtttgagttgcctctagagctaccatctgatctgtctgtcttgaccacccggagtcccactgtccccagccagaatcccagtagactagctgttatctcagactcaggggagaagagagtaaccatcacagaaaaatctgtagcctcctctgaaagtgacccagcactgctgagcccaggagtagatccaactcctgaaggccacatgactcctgatcattttatccaaggacacatggatgcagaccacatctctagccctccttgtggttcagtagagcaaggtcatggcaacaatcaggatttaactaggaacagtagcacccctggccttcaggtacctgtttccccaactgttcccatccagaaccagaagtatgtgcccaattctactgatagtcctggcccgtctcagatttccaatgcagctgtccagaccactccaccccacctgaagccagccactgagaaactcatagttgttaaccagaacatgcagccactttatgttctccaaactcttccaaatggagtgacccaaaaaatccaattgacctcttctgttagttctacacccagtgtgatggagacaaatacttcagtattgggacccatgggaggtggtctcacccttaccacaggactaaatccaagcttgccaacttctcaatctttgttcccttctgctagcaaaggattgctacccatgtctcatcaccagcacttacattccttccctgcagctactcaaagtagtttcccaccaaacatcagcaatcctccttcaggcctgcttattggggttcagcctcctccggatccccaacttttggtttcagaatccagccagaggacagacctcagtaccacagtagccactccatcctctggactcaagaaaagacccatatctcgtctacagacccgaaagaataaaaaacttgctccctctagtaccccttcaaacattgccccttctgatgtggtttctaatatgacattgattaacttcacaccctcccagcttcctaatcatccaagtctgttagatttggggtcacttaatacttcatctcaccgaactgtccccaacatcataaaaagatctaaatctagcatcatgtattttgaaccggcacccctgttaccacagagtgtgggaggaactgctgccacagcggcaggcacatcaacaataagccaggatactagccacctcacatcagggtctgtgtctggcttggcatccagttcctctgtcttgaatgttgtatccatgcaaactaccacaacccctacaagtagtgcgtcagttccaggacacgtcaccttaaccaacccaaggttgcttggtaccccagatattggctcaataagcaatcttttaatcaaagctagccagcagagcctggggattcaggaccagcctgtggctttaccgccaagttcaggaatgtttccacaactggggacatcacagaccccctctactgctgcaataacagcggcatctagcatctgtgtgctcccctccactcagactacgggcataacagccgcttcaccttctggggaagcagacgaacactatcagcttcagcatgtgaaccagctccttgccagcaaaactgggattcattcttcccagcgtgatcttgattctgcttcagggccccaggtatccaactttacccagacggtagacgctcctaatagcatgggactggagcagaacaaggctttatcctcagctgtgcaagccagccccacctctcctgggggttctccatcctctccatcttctggacagcggtcagcaagcccttcagtgccgggtcccactaaacccaaaccaaaaaccaaacggtttcagctgcctctagacaaagggaatggcaagaagcacaaagtttcccatttgcggaccagttcttctgaagcacacattccagaccaagaaacgacatccctgacctcaggcacagggactccaggagcagaggctgagcagcaggatacagctagcgtggagcagtcctcccagaaggagtgtgggcaacctgcagggcaagtcgctgttcttccggaagttcaggtgacccaaaatccagcaaatgaacaagaaagtgcagaacctaaaacagtggaagaagaggaaagtaatttcagctccccactgatgctttggcttcagcaagaacaaaagcggaaggaaagcattactgagaaaaaacccaagaaaggacttgtttttgaaatttccagtgatgatggctttcagatctgtgcagaaagtattgaagatgcctggaagtcattgacagataaagtccaggaagctcgatcaaatgcccgcctaaagcagctctcatttgcaggtgttaacggtttgaggatgctggggattctccatgatgcagttgtgttcctcattgagcagctgtctggtgccaagcactgtcgaaattacaaattccgtttccacaagccagaggaggccaatgaaccccccttgaaccctcacggctcagccagggctgaagtccacctcaggaagtcagcatttgacatgtttaacttcctggcttctaaacatcgtcagcctcctgaatacaaccccaatgatgaagaagaggaggaggtacagctgaagtcagctcggagggcaactagcatggatctgccaatgcccatgcgcttccggcacttaaaaaagacttctaaggaggcagttggtgtctacagacccccggccaatgcagtgagcaccatgtagctcccttgatttaaaaaaaataaaaaataaaaaaaaaaggaaaaaaaaatacaacacacacacaaaaataaaaaaaatattctaatgaatgtatctttctaaaggactgacgttcaatcaaatatctgaaaatactaaaggtcaaaaccttgtcagatgttaacttctaagttcggtttgggattttttttttttaatagaaatcaagttgtttttgtttttaaggaaaagcgggtcattgcaaagggctgggtgtaattttatgtttcatttccttcattttaaagcaatacaaggttatggagcagatggttttgtgccgaatcatgaatactagtcaagtcacacactctggaaacttgcaactttttgtttgttttggttttcaaataaatataaatatgatatatataggaactaatatagtaatgcaccatgtaacaaagcctagttcagtccatggcttttaattctcttaacactatagataaggattgtgttacagttgctagtagcggcaggaagatgtcaggctcactttcctctgattcccgaaatggggggaacctctaaccataaaggaatggtagaacagtccattcctcggatcagagaaaaatgcagacatggtgtcacctggatttttttctgcccatgaatgttgccagtcagtacctgtcctccttgtttctctatttttggttatgaatgttggggttaccacctgcatttaggggaaaattgtgttctgtgctttcctggtatcttgttccgaggtactctagttctgtctttcaaccaagaaaatagaattgtggtgtttcttttattgaacttttaacagtctctttagtaaatacaggtagttgaataattgtttcaagagctcaacagatgacaagcttcttttctagaaataagacattttttgacaactttatcatgtataacagatctgttttttttccttgtgttcttccaagcttctggttagagaaaaagagaaaaaaaaaaaaggaaaatgtgtctaaagtccatcagtgttaactccctgtgacagggatgaaggaaaatactttaatagttcaaaaaataataatgctgaaagctctctacgaaagactgaatgtaaaagtaaaaagtgtacatagttgtaaaaaaaaggagtttttaaacatgtttattttctatgcacttttttttatttaagtgatagtttaattaataaacatgtcaagtttattgctgcacatggttaagcttccttttggctttggttggagagggtggagaaaagcgggaggggcatggcctgtgacctggtcacaaagtaccttccacagtcctttactttaaggtggcatcactaaattattccctgtagcccaccttcaggtccactccacactggctctcttgactattttcttcctttattcatcagtgatgtatgttcaggacctaattaattgtggatatgaggcagggtcaagaggacaaaggaacagggcctttaccttctacatagctcccctgtttcatccaaggaggttaagtattgatttttatcggttttctcaactgtgaatataataaactgaaagcatttcagggagaagctggagaacaccttctctagctgcactccaccttaaggctgaagctggatttgtt

SEQ ID NO: 370694 - DNA, 9215 bp, Homo sapiens
cgagtgactctatgaggatccccaatgtaggccattcctcaggaggatggctcttttaaaaggaggtatccccgtcgcagtgcccgtgcacgttctaacatgttttttgggcttaccccactctatggagtaagatcctatggtgaagaagacattccattctacagcagctcaactgggaagaagcgaggcaagagatcagctgaaggacaggtggatggggccgatgacttaagcacttcagatgaagacgacttatactattacaacttcactagaacagtgatttcttcaggtggagaggaacgactggcatcccataatttatttcgggaggaggaacagtgtgatcttccaaaaatctcacagttggatggtgttgatgatgggacagagagtgatactagtgtcacagccacaacaaggaaaagcagccagattccaaaaagaaatggtaaagaaaatggaacagagaacttaaagattgatagacctgaagatgctggggagaaagaacatgtcactaagagttctgttggccacaaaaatgagccaaagatggataactgccattctgtaagcagagttaaaacacagggacaagattccttggaagctcagctcagctcattggagtcaagccgcagagtccacacaagtaccccctccgacaaaaatttactggacacctataatactgagctcctgaaatcagattcagacaataacaacagtgatgactgtgggaatatcctgccttcagacattatggactttgtactaaagaatactccatccatgcaggctttgggtgagagcccagagtcatcttcatcagaactcctgaatcttggtgaaggattgggtcttgacagtaatcgtgaaaaagacatgggtctttttgaagtattttctcagcagctgcctacaacagaacctgtggatagtagtgtctcttcctctatctcagcagaggaacagtttgagttgcctctagagctaccatctgatctgtctgtcttgaccacccggagtcccactgtccccagccagaatcccagtagactagctgttatctcagactcaggggagaagagagtaaccatcacagaaaaatctgtagcctcctctgaaagtgacccagcactgctgagcccaggagtagatccaactcctgaaggccacatgactcctgatcattttatccaaggacacatggatgcagaccacatctctagccctccttgtggttcagtagagcaaggtcatggcaacaatcaggatttaactaggaacagtagcacccctggccttcaggtacctgtttccccaactgttcccatccagaaccagaagtatgtgcccaattctactgatagtcctggcccgtctcagatttccaatgcagctgtccagaccactccaccccacctgaagccagccactgagaaactcatagttgttaaccagaacatgcagccactttatgttctccaaactcttccaaatggagtgacccaaaaaatccaattgacctcttctgttagttctacacccagtgtgatggagacaaatacttcagtattgggacccatgggaggtggtctcacccttaccacaggactaaatccaagcttgccaacttctcaatctttgttcccttctgctagcaaaggattgctacccatgtctcatcaccagcacttacattccttccctgcagctactcaaagtagtttcccaccaaacatcagcaatcctccttcaggcctgcttattggggttcagcctcctccggatccccaacttttggtttcagaatccagccagaggacagacctcagtaccacagtagccactccatcctctggactcaagaaaagacccatatctcgtctacagacccgaaagaataaaaaacttgctccctctagtaccccttcaaacattgccccttctgatgtggtttctaatatgacattgattaacttcacaccctcccagcttcctaatcatccaagtctgttagatttggggtcacttaatacttcatctcaccgaactgtccccaacatcataaaaagatctaaatctagcatcatgtattttgaaccggcacccctgttaccacagagtgtgggaggaactgctgccacagcggcaggcacatcaacaataagccaggatactagccacctcacatcagggtctgtgtctggcttggcatccagttcctctgtcttgaatgttgtatccatgcaaactaccacaacccctacaagtagtgcgtcagttccaggacacgtcaccttaaccaacccaaggttgcttggtaccccagatattggctcaataagcaatcttttaatcaaagctagccagcagagcctggggattcaggaccagcctgtggctttaccgccaagttcaggaatgtttccacaactggggacatcacagaccccctctactgctgcaataacagcggcatctagcatctgtgtgctcccctccactcagactacgggcataacagccgcttcaccttctggggaagcagacgaacactatcagcttcagcatgtgaaccagctccttgccagcaaaactgggattcattcttcccagcgtgatcttgattctgcttcagggccccaggtatccaactttacccagacggtagacgctcctaatagcatgggactggagcagaacaaggctttatcctcagctgtgcaagccagccccacctctcctgggggttctccatcctctccatcttctggacagcggtcagcaagcccttcagtgccgggtcccactaaacccaaaccaaaaaccaaacggtttcagctgcctctagacaaagggaatggcaagaagcacaaagtttcccatttgcggaccagttcttctgaagcacacattccagaccaagaaacgacatccctgacctcaggcacagggactccaggagcagaggctgagcagcaggatacagctagcgtggagcagtcctcccagaaggagtgtgggcaacctgcagggcaagtcgctgttcttccggaagttcaggtgacccaaaatccagcaaatgaacaagaaagtgcagaacctaaaacagtggaagaagaggaaagtaatttcagctccccactgatgctttggcttcagcaagaacaaaagcggaaggaaagcattactgagaaaaaacccaagaaaggacttgtttttgaaatttccagtgatgatggctttcagatctgtgcagaaagtattgaagatgcctggaagtcattgacagataaagtccaggaagctcgatcaaatgcccgcctaaagcagctctcatttgcaggtgttaacggtttgaggatgctggggattctccatgatgcagttgtgttcctcattgagcagctgtctggtgccaagcactgtcgaaattacaaattccgtttccacaagccagaggaggccaatgaaccccccttgaaccctcacggctcagccagggctgaagtccacctcaggaagtcagcatttgacatgtttaacttcctggcttctaaacatcgtcagcctcctgaatacaaccccaatgatgaagaagaggaggaggtacagctgaagtcagctcggagggcaactagcatggatctgccaatgcccatgcgcttccggcacttaaaaaagacttctaaggaggcagttggtgtctacaggtctcccatccatggccggggtcttttctgtaagagaaacattgatgcaggtgagatggtgattgagtatgccggcaacgtcatccgctccatccagactgacaagcgggaaaagtattacgacagcaagggcattggttgctatatgttccgaattgatgactcagaggtagtggatgccaccatgcatggaaatgctgcacgcttcatcaatcactcgtgtgagcctaactgctattctcgggtcatcaatattgatgggcagaagcacattgtcatctttgccatgcgtaagatctaccgaggagaggaactcacttacgactataagttccccattgaggatgccagcaacaagctgccctgcaactgtggcgccaagaaatgccggaagttcctaaactaaagctgctcttctcccccagtgttggagtgcaaggaggcggggccatccaaagcaacgctgaaggccttttccagcagctgggagctcccggattgcgtggcacagctgaggggcctctgtgatggctgagctctcttatgtcctatactcacatcagacatgtgatcatagtcccagagacagagttgaggtctcgaagaaaagatccatgatcggctttctcctggggcccctccaattgtttactgttagaaagtgggaatggggtccctagcagacttgcctggaaggagcctattatagagggttggttatgttgggagattgggcctgaatttctccacagaaataagttgccatcctcaggttggccctttcccaagcactgtaagtgagtgggtcaggcaaagccccaaatggagggttggttagattcctgacagtttgccagccaggccccacctacagcgtctgtcgaacaaacagaggtctggtggttttccctactatcctcccactcgagagttcacttctggttgggagacaggattcctagcacctccggtgtcaaaaggctgtcatggggttgtgccaattaattaccaaacattgagcctgcaggctttgagtgggagtgttgcccccaggagccttatctcagccaattacctttcttgacagtaggagcggcttccctctcccattccctcttcactcccttttcttcctttcccctgtcttcatgccactgctttcccatgcttctttcgggttgtaggggagactgactgcctgctcaaggacactccctgctgggcataggatgtgcctgcaaaaagttccctgagcctgtaagcactccaggtggggaagtggacaggagccattggtcataaccagacagaatttggaaacattttcataaagctccatggagagttttaaagaaacatatgtagcatgattttgtaggagaggaaaaagattatttaaataggatttaaatcatgcaacaacgagagtatcacagccaggatgacccttgggtcccattcctaagacatggttactttattttccccttgttaagacataggaagacttaatttttaaacggtcagtgtccagttgaaggcagaacactaatcagatttcaaggcccacaacttggggactagaccaccttatgttgagggaactctgccacctgcgtgcaacccacagctaaagtaaattcaatgacactactgccctgattactccttaggatgtggtcaaaacagcatcaaatgtttcttctcttcctttccccaagacagagtcctgaacctgttaaattaagtcattggattttactctgttctgtttacagtttactatttaaggttttataaatgtaaatatattttgtatatttttctatgagaagcacttcatagggagaagcacttatgacaaggctattttttaaaccgcggtattatcctaatttaaaagaagatcggtttttaataattttttattttcataggatgaagttagagaaaatattcagctgtacacacaaagtctggtttttcctgcccaacttccccctggaaggtgtactttttgttgtttaatgtgtagcttgtttgtgccctgttgacataaatgtttcctgggtttgctctttgacaataaatggagaaggaaggtcacccaactccattgggccactcccctccttcccctattgaagctcctcaaaaggctacagtaatatcttgatacaacagattctcttctttcccgcctctctcctttccggcgcaacttccagagtggtgggagacggcaatctttacatttccctcatctttcttacttcagagttagcaaacaacaagttgaatggcaacttgacatttttgcatcaccatctgcctcataggccactctttcctttccctctgcccaccaagtcctcatatctgcagagaacccattgatcaccttgtgccctcttttggggcagcctgttgaaactgaagcacagtctgaccactcacgataaagcagatttttctctgcctctgccacaaggtttcagagtagtgtagtccaagtagagggtggggcacccttttctcgccgcaagaagcccattcctatggaagtctagcaaagcaatacgactcagcccagcactctctgccccaggactcatggctctgctgtgccttccatcctgggctcccttctctcctgtgaccttaagaactttgtctggtggctttgctggaacattgtcactgttttcactgtcatgcagggagcccagcactgtggccaggatggcagagacttccttgtcatcatggagaagtgccagcaggggactgggaaaagcactctacccagacctcacctcccttcctccttttgcccatgaacaagatgcagtggccctaggggttccactagtgtctgctttcctttattattgcactgtgtgaggtttttttgtaaatccttgtattcctattttttttaaagaaaaaaaaaaaaccttaagctgcatttgttactgaaatgattaatgcactgatgggtcctgaattcaccttgagaaagacccaaaggccagtcagggggtggggggaactcagctaaatagacctagttactgccctgctaggccatgctgtactgtgagcccctcctcactctctaccaaccctaaaccctgaggacaggggaggaacccacagcttccttctcctgccagctgcagatggtttgccttgcctttccaccccctaattgtcaaccacaaaaatgagaaattcctcttctagctcagccttgagtccattgccaaattttcagcacacctgccagcaacttgggggaataagcgaaggtttccctacaagagggaaagaaggcaaaaacggcacagctatctccaaacacatctgagttcatttcaaaagtgaccaagggaatctccgcacaaaagtgcagattgaggaattgtgatgggtcattcccaagaatcccccaaggggcatcccaaatccctgaggagtaacagctgcaaacctggtcagttctcagtgagagccagctcacttatagctttgctgctagaacctgttgtggctgcatttcctggtggccagtgacaactgtgtaaccagaatagctgcatggcgctgaccctttggccggaacttggtctcttggctccctccttggccacccaccacctctcgcacagcccctctgtttttacaccaataacaagaattaagggggaagccctggcagctatacgttttcaaccagactcctttgccgggacccagcccgccaccctgctcgcctccgtcaaacccccggccaatgcagtgagcaccatgtagctcccttgatttaaaaaaaataaaaaataaaaaaaaaaggaaaaaaaaatacaacacacacacaaaaataaaaaaaatattctaatgaatgtatctttctaaaggactgacgttcaatcaaatatctgaaaatactaaaggtcaaaaccttgtcagatgttaacttctaagttcggtttgggattttttttttttaatagaaatcaagttgtttttgtttttaaggaaaagcgggtcattgcaaagggctgggtgtaattttatgtttcatttccttcattttaaagcaatacaaggttatggagcagatggttttgtgccgaatcatgaatactagtcaagtcacacactctggaaacttgcaactttttgtttgttttggttttcaaataaatataaatatgatatatataggaactaatatagtaatgcaccatgtaacaaagcctagttcagtccatggcttttaattctcttaacactatagataaggattgtgttacagttgctagtagcggcaggaagatgtcaggctcactttcctctgattcccgaaatggggggaacctctaaccataaaggaatggtagaacagtccattcctcggatcagagaaaaatgcagacatggtgtcacctggatttttttctgcccatgaatgttgccagtcagtacctgtcctccttgtttctctatttttggttatgaatgttggggttaccacctgcatttaggggaaaattgtgttctgtgctttcctggtatcttgttccgaggtactctagttctgtctttcaaccaagaaaatagaattgtggtgtttcttttattgaacttttaacagtctctttagtaaatacaggtagttgaataattgtttcaagagctcaacagatgacaagcttcttttctagaaataagacattttttgacaactttatcatgtataacagatctgttttttttccttgtgttcttccaagcttctggttagagaaaaagagaaaaaaaaaaaaggaaaatgtgtctaaagtccatcagtgttaactccctgtgacagggatgaaggaaaatactttaatagttcaaaaaataataatgctgaaagctctctacgaaagactgaatgtaaaagtaaaaagtgtacatagttgtaaaaaaaaggagtttttaaacatgtttattttctatgcacttttttttatttaagtgatagtttaattaataaacatgtcaagtttattgctgcacatggttaagcttccttttggctttggttggagagggtggagaaaagcgggaggggcatggcctgtgacctggtcacaaagtaccttccacagtcctttactttaaggtggcatcactaaattattccctgtagcccaccttcaggtccactccacactggctctcttgactattttcttcctttattcatcagtgatgtatgttcaggacctaattaattgtggatatgaggcagggtcaagaggacaaaggaacagggcctttaccttctacatagctcccctgtttcatccaaggaggttaagtattgatttttatcggttttctcaactgtgaatataataaactgaaagcatttcagggagaagctggagaacaccttctctagctgcactccaccttaaggctgaagctggatttgtt

SEQ ID NO: 370695 - DNA, 5145 bp, Homo sapiens
ctgcttcacttcacggggcgaacatggcgcacagctgtcggtggcgcttccccgcccgacccgggaccaccgggggcggcggcggcggggggcgccggggcctagggggcgccccgcggcaacgcgtcccggccctgctgcttccccccgggcccccggtcggcggtggcggccccggggcgcccccctcccccccggctgtggcggccgcggcggcggcggcgggaagcagcggggctggggttccagggggagcggccgccgcctcagcagcctcctcgtcgtccgcctcgtcttcgtcttcgtcatcgtcctcagcctcttcagggccggccctgctccgggtgggcccgggcttcgacgcggcgctgcaggtctcggccgccatcggcaccaacctgcgccggttccgggccgtgtttggggagagcggcgggggaggcggcagcggagaggatgagcaattcttaggttttggctcagatgaagaagtcagagtgcgaagtcccacaaggtctccttcagttaaaactagtcctcgaaaacctcgtgggagacctagaagtggctctgaccgaaattcagctatcctctcagatccatctgtgttttcccctctaaataaatcagagaccaaatctggagataagatcaagaagaaagattctaaaagtatagaaaagaagagaggaagacctcccaccttccctggagtaaaaatcaaaataacacatggaaaggacatttcagagttaccaaagggaaacaaagaagatagcctgaaaaaaattaaaaggacaccttctgctacgtttcagcaagccacaaagattaaaaaattaagagcaggtaaactctctcctctcaagtctaagtttaagacagggaagcttcaaataggaaggaagggggtacaaattgtacgacggagaggaaggcctccatcaacagaaaggataaagaccccttcgggtctcctcattaattctgaactggaaaagccccagaaagtccggaaagacaaggaaggaacacctccacttacaaaagaagataagacagttgtcagacaaagccctcgaaggattaagccagttaggattattccttcttcaaaaaggacagatgcaaccattgctaagcaactcttacagagggcaaaaaagggggctcaaaagaaaattgaaaaagaagcagctcagctgcagggaagaaaggtgaagacacaggtcaaaaatattcgacagttcatcatgcctgttgtcagtgctatctcctcgcggatcattaagacccctcggcggtttatagaggatgaggattatgaccctccaattaaaattgcccgattagagtctacaccgaatagtagattcagtgccccgtcctgtggatcttctgaaaaatcaagtgcagcttctcagcactcctctcaaatgtcttcagactcctctcgatctagtagccccagtgttgatacctccacagactctcaggcttctgaggagattcaggtacttcctgaggagcggagcgatacccctgaagttcatcctccactgcccatttcccagtccccagaaaatgagagtaatgataggagaagcagaaggtattcagtgtcggagagaagttttggatctagaacgacgaaaaaattatcaactctacaaagtgccccccagcagcagacctcctcgtctccacctccacctctgctgactccaccgccaccactgcagccagcctccagtatctctgaccacacaccttggcttatgcctccaacaatccccttagcatcaccatttttgcctgcttccactgctcctatgcaagggaagcgaaaatctattttgcgagaaccgacatttaggtggacttctttaaagcattctaggtcagagccacaatacttttcctcagcaaagtatgccaaagaaggtcttattcgcaaaccaatatttgataatttccgaccccctccactaactcccgaggacgttggctttgcatctggtttttctgcatctggtaccgctgcttcagcccgattgttttcgccactccattctggaacaaggtttgatatgcacaaaaggagccctcttctgagagctccaagatttactccaagtgaggctcactctagaatatttgagtctgtaaccttgcctagtaatcgaacttctgctggaacatcttcttcaggagtatccaatagaaaaaggaaaagaaaagtgtttagtcctattcgatctgaaccaagatctccttctcactccatgaggacaagaagtggaaggcttagtagttctgagctctcacctctcacccccccgtcttctgtctcttcctcgttaagcatttctgttagtcctcttgccactagtgccttaaacccaacttttacttttccttctcattccctgactcagtctggggaatctgcagagaaaaatcagagaccaaggaagcagactagtgctccggcagagccattttcatcaagtagtcctactcctctcttcccttggtttaccccaggctctcagactgaaagagggagaaataaagacaaggcccccgaggagctgtccaaagatcgagatgctgacaagagcgtggagaaggacaagagtagagagagagaccgggagagagaaaaggagaataagcgggagtcaaggaaagagaaaaggaaaaagggatcagaaattcagagtagttctgctttgtatcctgtgggtagggtttccaaagagaaggttgttggtgaagatgttgccacttcatcttctgccaaaaaagcaacagggcggaagaagtcttcatcacatgattctgggactgatattacttctgtgactcttggggatacaacagctgtcaaaaccaaaatacttataaagaaagggagaggaaatctggaaaaaaccaacttggacctcggcccaactgccccatccctggagaaggagaaaaccctctgcctttccactccttcatctagcactgttaaacattccacttcctccataggctccatgttggctcaggcagacaagcttccaatgactgacaagagggttgccagcctcctaaaaaaggccaaagctcagctctgcaagattgagaagagtaagagtcttaaacaaaccgaccagcccaaagcacagggtcaagaaagtgactcatcagagacctctgtgcgaggaccccggattaaacatgtctgcagaagagcagctgttgcccttggccgaaaacgagctgtgtttcctgatgacatgcccaccctgagtgccttaccatgggaagaacgagaaaagattttgtcttccatggggaatgatgacaagtcatcaattgctggctcagaagatgctgaacctcttgctccacccatcaaaccaattaaacctgtcactagaaacaaggcaccccaggaacctccagtaaagaaaggacgtcgatcgaggcggtgtgggcagtgtcccggctgccaggtgcctgaggactgtggtgtttgtactaattgcttagataagcccaagtttggtggtcgcaatataaagaagcagtgctgcaagatgagaaaatgtcagaatctacaatggatgccttccaaagcctacctgcagaagcaagctaaagctgtgaaaaagaaagagaaaaagtctaagaccagtgaaaagaaagacagcaaagagagcagtgttgtgaagaacgtggtggactctagtcagaaacctaccccatcagcaagagaggatcctgccccaaagaaaagcagtagtgagcctcctccacgaaagcccgtcgaggaaaagagtgaagaagggaatgtctcggcccctgggcctgaatccaaacaggccaccactccagcttccaggaagtcaagcaagcaggtctcccagccagcagtggtcatcccgcctcagccacctactacaggaccgccaagaaaagaagttcccaaaaccactcctagtgagcccaagaaaaagcagcctccaccaccagaatcaggtccagagcagagcaaacagaaaaaagtggctccccgcccaagtatccctgtaaaacaaaaaccaaaagaaaaggaaaaaccacctccggtcaataagcaggagaatgcaggcactttgaacatcctcagcactctctccaatggcaatagttctaagcaaaaaattccagcagatggagtccacaggatcagagtggactttaaggaggattgtgaagcagaaaatgtgtgggagatgggaggcttaggaatcttgacttctgttcctataacacccagggtggtttgctttctctgtgccagtagtgggcatgtagagtttgtgtattgccaagtctgttgtgagcccttccacaagttttgtttagaggagaacgagcgccctctggaggaccagctggaaaattggtgttgtcgtcgttgcaaattctgtcacgtttgtggaaggcaacatcaggctacaaagcagctgctggagtgtaataagtgccgaaacagctatcaccctgagtgcctgggaccaaactaccccaccaaacccacaaagaagaagaaagtctggatctgtaccaagtgtgttcgctgtaagagctgtggatccacaactccaggcaaagggtgggatgcacagtggtctcatgatttctcactgtgtcatgattgcgccaagctctttgctaaaggaaacttctgccctctctgtgacaaatgttatgatgatgatgactatgagagtaagatgatgcaatgtggaaagtgtgatcgctgggtccattccaaatgtgagaatctttcagatgagatgtatgagattctatctaatctgccagaaagtgtggcctacacttgtgtgaactgtactgagcggcaccctgcagagtggcgactggcccttgaaaaagagctgcagatttctctgaagcaagttctgacagctttgttgaattctcggactaccagccatttgctacgctaccggcaggctgccaagcctccagacttaaatcccgagacagaggagagtataccttcccgcagctcccccgaaggtggtggcctgtttggattcaggcccaggggccgagacattcccttcttcactcttttcc

SEQ ID NO: 370696 - DNA, 4657 bp, Homo sapiens
  misc_feature (4582)..(4582): n is a, c, g, or t
  misc_feature (4591)..(4591): n is a, c, g, or t
ctgcttcacttcacggggcgaacatggcgcacagctgtcggtggcgcttccccgcccgacccgggaccaccgggggcggcggcggcggggggcgccggggcctagggggcgccccgcggcaacgcgtcccggccctgctgcttccccccgggcccccggtcggcggtggcggccccggggcgcccccctcccccccggctgtggcggccgcggcggcggcggcgggaagcagcggggctggggttccagggggagcggccgccgcctcagcagcctcctcgtcgtccgcctcgtcttcgtcttcgtcatcgtcctcagcctcttcagggccggccctgctccgggtgggcccgggcttcgacgcggcgctgcaggtctcggccgccatcggcaccaacctgcgccggttccgggccgtgtttggggagagcggcgggggaggcggcagcggagaggatgagcaattcttaggttttggctcagatgaagaagtcagagtgcgaagtcccacaaggtctccttcagttaaaactagtcctcgaaaacctcgtgggagacctagaagtggctctgaccgaaattcagctatcctctcagatccatctgtgttttcccctctaaataaatcagagaccaaatctggagataagatcaagaagaaagattctaaaagtatagaaaagaagagaggaagacctcccaccttccctggagtaaaaatcaaaataacacatggaaaggacatttcagagttaccaaagggaaacaaagaagatagcctgaaaaaaattaaaaggacaccttctgctacgtttcagcaagccacaaagattaaaaaattaagagcaggtaaactctctcctctcaagtctaagtttaagacagggaagcttcaaataggaaggaagggggtacaaattgtacgacggagaggaaggcctccatcaacagaaaggataaagaccccttcgggtctcctcattaattctgaactggaaaagccccagaaagtccggaaagacaaggaaggaacacctccacttacaaaagaagataagacagttgtcagacaaagccctcgaaggattaagccagttaggattattccttcttcaaaaaggacagatgcaaccattgctaagcaactcttacagagggcaaaaaagggggctcaaaagaaaattgaaaaagaagcagctcagctgcagggaagaaaggtgaagacacaggtcaaaaatattcgacagttcatcatgcctgttgtcagtgctatctcctcgcggatcattaagacccctcggcggtttatagaggatgaggattatgaccctccaattaaaattgcccgattagagtctacaccgaatagtagattcagtgccccgtcctgtggatcttctgaaaaatcaagtgcagcttctcagcactcctctcaaatgtcttcagactcctctcgatctagtagccccagtgttgatacctccacagactctcaggcttctgaggagattcaggtacttcctgaggagcggagcgatacccctgaagttcatcctccactgcccatttcccagtccccagaaaatgagagtaatgataggagaagcagaaggtattcagtgtcggagagaagttttggatctagaacgacgaaaaaattatcaactctacaaagtgccccccagcagcagacctcctcgtctccacctccacctctgctgactccaccgccaccactgcagccagcctccagtatctctgaccacacaccttggcttatgcctccaacaatccccttagcatcaccatttttgcctgcttccactgctcctatgcaagggaagcgaaaatctattttgcgagaaccgacatttaggtggacttctttaaagcattctaggtcagagccacaatacttttcctcagcaaagtatgccaaagaaggtcttattcgcaaaccaatatttgataatttccgaccccctccactaactcccgaggacgttggctttgcatctggtttttctgcatctggtaccgctgcttcagcccgattgttttcgccactccattctggaacaaggtttgatatgcacaaaaggagccctcttctgagagctccaagatttactccaagtgaggctcactctagaatatttgagtctgtaaccttgcctagtaatcgaacttctgctggaacatcttcttcaggagtatccaatagaaaaaggaaaagaaaagtgtttagtcctattcgatctgaaccaagatctccttctcactccatgaggacaagaagtggaaggcttagtagttctgagctctcacctctcacccccccgtcttctgtctcttcctcgttaagcatttctgttagtcctcttgccactagtgccttaaacccaacttttacttttccttctcattccctgactcagtctggggaatctgcagagaaaaatcagagaccaaggaagcagactagtgctccggcagagccattttcatcaagtagtcctactcctctcttcccttggtttaccccaggctctcagactgaaagagggagaaataaagacaaggcccccgaggagctgtccaaagatcgagatgctgacaagagcgtggagaaggacaagagtagagagagagaccgggagagagaaaaggagaataagcgggagtcaaggaaagagaaaaggaaaaagggatcagaaattcagagtagttctgctttgtatcctgtgggtagggtttccaaagagaaggttgttggtgaagatgttgccacttcatcttctgccaaaaaagcaacagggcggaagaagtcttcatcacatgattctgggactgatattacttctgtgactcttggggatacaacagctgtcaaaaccaaaatacttataaagaaagggagaggaaatctggaaaaaaccaacttggacctcggcccaactgccccatccctggagaaggagaaaaccctctgcctttccactccttcatctagcactgttaaacattccacttcctccataggctccatgttggctcaggcagacaagcttccaatgactgacaagagggttgccagcctcctaaaaaaggccaaagctcagctctgcaagattgagaagagtaagagtcttaaacaaaccgaccagcccaaagcacagggtcaagaaagtgactcatcagagacctctgtgcgaggaccccggattaaacatgtctgcagaagagcagctgttgcccttggccgaaaacgagctgtgtttcctgatgacatgcccaccctgagtgccttaccatgggaagaacgagaaaagattttgtcttccatggggaatgatgacaagtcatcaattgctggctcagaagatgctgaacctcttgctccacccatcaaaccaattaaacctgtcactagaaacaaggcaccccaggaacctccagtaaagaaaggacgtcgatcgaggcggtgtgggcagtgtcccggctgccaggtgcctgaggactgtggtgtttgtactaattgcttagataagcccaagtttggtggtcgcaatataaagaagcagtgctgcaagatgagaaaatgtcagaatctacaatggatgccttccaaagcctacctgcagaagcaagctaaagctgtgaaaaagaaagagaaaaagtctaagaccagtgaaaagaaagacagcaaagagagcagtgttgtgaagaacgtggtggactctagtcagaaacctaccccatcagcaagagaggatcctgccccaaagaaaagcagtagtgagcctcctccacgaaagcccgtcgaggaaaagagtgaagaagggaatgtctcggcccctgggcctgaatccaaacaggccaccactccagcttccaggaagtcaagcaagcaggtctcccagccagcagtggtcatcccgcctcagccacctactacaggaccgccaagaaaagaagttcccaaaaccactcctagtgagcccaagaaaaagcagcctccaccaccagaatcaggtccagagcagagcaaacagaaaaaagtggctccccgcccaagtatccctgtaaaacaaaaaccaaaagaaaaggaaaaaccacctccggtcaataagcaggagaatgcaggcactttgaacatcctcagcactctctccaatggcaatagttctaagcaaaaaattccagcagatggagtccacaggatcagagtggactttaagctggagaatgctggaggagaccttaaggatggccaccaccactatgaaggagctgttgtcattctggatgctggtgctcagtacgggaaagtcatagaccgaagagtgagggaactgttcgtgcagtctgaaattttccccttggaaacaccagcatttgctataaaggaacaaggattccgtgctattatcatctctggaggacctaattctgtgtatgctgaagatgctccctggtttgatccagcaatattcactattggcaagcctgttcttggaatttgctatggtatgcagatgatgaataaggtatttggaggtactgtgcacaaaaaaagtgncagagaagntggagtgtggtggcctgtttggattcaggcccaggggccgagacattcccttcttcactcttttcc

SEQ ID NO: 370697 - DNA, 4534 bp, Homo sapiens
ctgcttcacttcacggggcgaacatggcgcacagctgtcggtggcgcttccccgcccgacccgggaccaccgggggcggcggcggcggggggcgccggggcctagggggcgccccgcggcaacgcgtcccggccctgctgcttccccccgggcccccggtcggcggtggcggccccggggcgcccccctcccccccggctgtggcggccgcggcggcggcggcgggaagcagcggggctggggttccagggggagcggccgccgcctcagcagcctcctcgtcgtccgcctcgtcttcgtcttcgtcatcgtcctcagcctcttcagggccggccctgctccgggtgggcccgggcttcgacgcggcgctgcaggtctcggccgccatcggcaccaacctgcgccggttccgggccgtgtttggggagagcggcgggggaggcggcagcggagaggatgagcaattcttaggttttggctcagatgaagaagtcagagtgcgaagtcccacaaggtctccttcagttaaaactagtcctcgaaaacctcgtgggagacctagaagtggctctgaccgaaattcagctatcctctcagatccatctgtgttttcccctctaaataaatcagagaccaaatctggagataagatcaagaagaaagattctaaaagtatagaaaagaagagaggaagacctcccaccttccctggagtaaaaatcaaaataacacatggaaaggacatttcagagttaccaaagggaaacaaagaagatagcctgaaaaaaattaaaaggacaccttctgctacgtttcagcaagccacaaagattaaaaaattaagagcaggtaaactctctcctctcaagtctaagtttaagacagggaagcttcaaataggaaggaagggggtacaaattgtacgacggagaggaaggcctccatcaacagaaaggataaagaccccttcgggtctcctcattaattctgaactggaaaagccccagaaagtccggaaagacaaggaaggaacacctccacttacaaaagaagataagacagttgtcagacaaagccctcgaaggattaagccagttaggattattccttcttcaaaaaggacagatgcaaccattgctaagcaactcttacagagggcaaaaaagggggctcaaaagaaaattgaaaaagaagcagctcagctgcagggaagaaaggtgaagacacaggtcaaaaatattcgacagttcatcatgcctgttgtcagtgctatctcctcgcggatcattaagacccctcggcggtttatagaggatgaggattatgaccctccaattaaaattgcccgattagagtctacaccgaatagtagattcagtgccccgtcctgtggatcttctgaaaaatcaagtgcagcttctcagcactcctctcaaatgtcttcagactcctctcgatctagtagccccagtgttgatacctccacagactctcaggcttctgaggagattcaggtacttcctgaggagcggagcgatacccctgaagttcatcctccactgcccatttcccagtccccagaaaatgagagtaatgataggagaagcagaaggtattcagtgtcggagagaagttttggatctagaacgacgaaaaaattatcaactctacaaagtgccccccagcagcagacctcctcgtctccacctccacctctgctgactccaccgccaccactgcagccagcctccagtatctctgaccacacaccttggcttatgcctccaacaatccccttagcatcaccatttttgcctgcttccactgctcctatgcaagggaagcgaaaatctattttgcgagaaccgacatttaggtggacttctttaaagcattctaggtcagagccacaatacttttcctcagcaaagtatgccaaagaaggtcttattcgcaaaccaatatttgataatttccgaccccctccactaactcccgaggacgttggctttgcatctggtttttctgcatctggtaccgctgcttcagcccgattgttttcgccactccattctggaacaaggtttgatatgcacaaaaggagccctcttctgagagctccaagatttactccaagtgaggctcactctagaatatttgagtctgtaaccttgcctagtaatcgaacttctgctggaacatcttcttcaggagtatccaatagaaaaaggaaaagaaaagtgtttagtcctattcgatctgaaccaagatctccttctcactccatgaggacaagaagtggaaggcttagtagttctgagctctcacctctcacccccccgtcttctgtctcttcctcgttaagcatttctgttagtcctcttgccactagtgccttaaacccaacttttacttttccttctcattccctgactcagtctggggaatctgcagagaaaaatcagagaccaaggaagcagactagtgctccggcagagccattttcatcaagtagtcctactcctctcttcccttggtttaccccaggctctcagactgaaagagggagaaataaagacaaggcccccgaggagctgtccaaagatcgagatgctgacaagagcgtggagaaggacaagagtagagagagagaccgggagagagaaaaggagaataagcgggagtcaaggaaagagaaaaggaaaaagggatcagaaattcagagtagttctgctttgtatcctgtgggtagggtttccaaagagaaggttgttggtgaagatgttgccacttcatcttctgccaaaaaagcaacagggcggaagaagtcttcatcacatgattctgggactgatattacttctgtgactcttggggatacaacagctgtcaaaaccaaaatacttataaagaaagggagaggaaatctggaaaaaaccaacttggacctcggcccaactgccccatccctggagaaggagaaaaccctctgcctttccactccttcatctagcactgttaaacattccacttcctccataggctccatgttggctcaggcagacaagcttccaatgactgacaagagggttgccagcctcctaaaaaaggccaaagctcagctctgcaagattgagaagagtaagagtcttaaacaaaccgaccagcccaaagcacagggtcaagaaagtgactcatcagagacctctgtgcgaggaccccggattaaacatgtctgcagaagagcagctgttgcccttggccgaaaacgagctgtgtttcctgatgacatgcccaccctgagtgccttaccatgggaagaacgagaaaagattttgtcttccatggggaatgatgacaagtcatcaattgctggctcagaagatgctgaacctcttgctccacccatcaaaccaattaaacctgtcactagaaacaaggcaccccaggaacctccagtaaagaaaggacgtcgatcgaggcggtgtgggcagtgtcccggctgccaggtgcctgaggactgtggtgtttgtactaattgcttagataagcccaagtttggtggtcgcaatataaagaagcagtgctgcaagatgagaaaatgtcagaatctacaatggatgccttccaaagcctacctgcagaagcaagctaaagctgtgaaaaagaaagagaaaaagtctaagaccagtgaaaagaaagacagcaaagagagcagtgttgtgaagaacgtggtggactctagtcagaaacctaccccatcagcaagagaggatcctgccccaaagaaaagcagtagtgagcctcctccacgaaagcccgtcgaggaaaagagtgaagaagggaatgtctcggcccctgggcctgaatccaaacaggccaccactccagcttccaggaagtcaagcaagcaggtctcccagccagcagtggtcatcccgcctcagccacctactacaggaccgccaagaaaagaagttcccaaaaccactcctagtgagcccaagaaaaagcagcctccaccaccagaatcaggtccagagcagagcaaacagaaaaaagtggctccccgcccaagtatccctgtaaaacaaaaaccaaaagaaaaggaaaaaccacctccggtcaataagcaggagaatgcaggcactttgaacatcctcagcactctctccaatggcaatagttctaagcaaaaaattccagcagatggagtccacaggatcagagtggactttaagacttatacaagcactagcaacaactctatatctggatcattgaagcgcttggaagatactactgcacgatttacaaatgcaaatttccaggaagtctctgcacacacctctagtggaaaagatgtttcagagactagagggtcagagggcaaagggaagaaatcttcagctcacagctcaggtcaaaggggaagaaagcctggtggtggaagaaatccaggaacgaagctggagtggtggcctgtttggattcaggcccaggggccgagacattcccttcttcactcttttcc

SEQ ID NO: 370698 - DNA, 4848 bp, Homo sapiens
ctgcttcacttcacggggcgaacatggcgcacagctgtcggtggcgcttccccgcccgacccgggaccaccgggggcggcggcggcggggggcgccggggcctagggggcgccccgcggcaacgcgtcccggccctgctgcttccccccgggcccccggtcggcggtggcggccccggggcgcccccctcccccccggctgtggcggccgcggcggcggcggcgggaagcagcggggctggggttccagggggagcggccgccgcctcagcagcctcctcgtcgtccgcctcgtcttcgtcttcgtcatcgtcctcagcctcttcagggccggccctgctccgggtgggcccgggcttcgacgcggcgctgcaggtctcggccgccatcggcaccaacctgcgccggttccgggccgtgtttggggagagcggcgggggaggcggcagcggagaggatgagcaattcttaggttttggctcagatgaagaagtcagagtgcgaagtcccacaaggtctccttcagttaaaactagtcctcgaaaacctcgtgggagacctagaagtggctctgaccgaaattcagctatcctctcagatccatctgtgttttcccctctaaataaatcagagaccaaatctggagataagatcaagaagaaagattctaaaagtatagaaaagaagagaggaagacctcccaccttccctggagtaaaaatcaaaataacacatggaaaggacatttcagagttaccaaagggaaacaaagaagatagcctgaaaaaaattaaaaggacaccttctgctacgtttcagcaagccacaaagattaaaaaattaagagcaggtaaactctctcctctcaagtctaagtttaagacagggaagcttcaaataggaaggaagggggtacaaattgtacgacggagaggaaggcctccatcaacagaaaggataaagaccccttcgggtctcctcattaattctgaactggaaaagccccagaaagtccggaaagacaaggaaggaacacctccacttacaaaagaagataagacagttgtcagacaaagccctcgaaggattaagccagttaggattattccttcttcaaaaaggacagatgcaaccattgctaagcaactcttacagagggcaaaaaagggggctcaaaagaaaattgaaaaagaagcagctcagctgcagggaagaaaggtgaagacacaggtcaaaaatattcgacagttcatcatgcctgttgtcagtgctatctcctcgcggatcattaagacccctcggcggtttatagaggatgaggattatgaccctccaattaaaattgcccgattagagtctacaccgaatagtagattcagtgccccgtcctgtggatcttctgaaaaatcaagtgcagcttctcagcactcctctcaaatgtcttcagactcctctcgatctagtagccccagtgttgatacctccacagactctcaggcttctgaggagattcaggtacttcctgaggagcggagcgatacccctgaagttcatcctccactgcccatttcccagtccccagaaaatgagagtaatgataggagaagcagaaggtattcagtgtcggagagaagttttggatctagaacgacgaaaaaattatcaactctacaaagtgccccccagcagcagacctcctcgtctccacctccacctctgctgactccaccgccaccactgcagccagcctccagtatctctgaccacacaccttggcttatgcctccaacaatccccttagcatcaccatttttgcctgcttccactgctcctatgcaagggaagcgaaaatctattttgcgagaaccgacatttaggtggacttctttaaagcattctaggtcagagccacaatacttttcctcagcaaagtatgccaaagaaggtcttattcgcaaaccaatatttgataatttccgaccccctccactaactcccgaggacgttggctttgcatctggtttttctgcatctggtaccgctgcttcagcccgattgttttcgccactccattctggaacaaggtttgatatgcacaaaaggagccctcttctgagagctccaagatttactccaagtgaggctcactctagaatatttgagtctgtaaccttgcctagtaatcgaacttctgctggaacatcttcttcaggagtatccaatagaaaaaggaaaagaaaagtgtttagtcctattcgatctgaaccaagatctccttctcactccatgaggacaagaagtggaaggcttagtagttctgagctctcacctctcacccccccgtcttctgtctcttcctcgttaagcatttctgttagtcctcttgccactagtgccttaaacccaacttttacttttccttctcattccctgactcagtctggggaatctgcagagaaaaatcagagaccaaggaagcagactagtgctccggcagagccattttcatcaagtagtcctactcctctcttcccttggtttaccccaggctctcagactgaaagagggagaaataaagacaaggcccccgaggagctgtccaaagatcgagatgctgacaagagcgtggagaaggacaagagtagagagagagaccgggagagagaaaaggagaataagcgggagtcaaggaaagagaaaaggaaaaagggatcagaaattcagagtagttctgctttgtatcctgtgggtagggtttccaaagagaaggttgttggtgaagatgttgccacttcatcttctgccaaaaaagcaacagggcggaagaagtcttcatcacatgattctgggactgatattacttctgtgactcttggggatacaacagctgtcaaaaccaaaatacttataaagaaagggagaggaaatctggaaaaaaccaacttggacctcggcccaactgccccatccctggagaaggagaaaaccctctgcctttccactccttcatctagcactgttaaacattccacttcctccataggctccatgttggctcaggcagacaagcttccaatgactgacaagagggttgccagcctcctaaaaaaggccaaagctcagctctgcaagattgagaagagtaagagtcttaaacaaaccgaccagcccaaagcacagggtcaagaaagtgactcatcagagacctctgtgcgaggaccccggattaaacatgtctgcagaagagcagctgttgcccttggccgaaaacgagctgtgtttcctgatgacatgcccaccctgagtgccttaccatgggaagaacgagaaaagattttgtcttccatggggaatgatgacaagtcatcaattgctggctcagaagatgctgaacctcttgctccacccatcaaaccaattaaacctgtcactagaaacaaggcaccccaggaacctccagtaaagaaaggacgtcgatcgaggcggtgtgggcagtgtcccggctgccaggtgcctgaggactgtggtgtttgtactaattgcttagataagcccaagtttggtggtcgcaatataaagaagcagtgctgcaagatgagaaaatgtcagaatctacaatggatgccttccaaagcctacctgcagaagcaagctaaagctgtgaaaaagaaagagaaaaagtctaagaccagtgaaaagaaagacagcaaagagagcagtgttgtgaagaacgtggtggactctagtcagaaacctaccccatcagcaagagaggatcctgccccaaagaaaagcagtagtgagcctcctccacgaaagcccgtcgaggaaaagagtgaagaagggaatgtctcggcccctgggcctgaatccaaacaggccaccactccagcttccaggaagtcaagcaagcaggtctcccagccagcagtggtcatcccgcctcagccacctactacaggaccgccaagaaaagaagttcccaaaaccactcctagtgagcccaagaaaaagcagcctccaccaccagaatcaggtccagagcagagcaaacagaaaaaagtggctccccgcccaagtatccctgtaaaacaaaaaccaaaagaaaaggaaaaaccacctccggtcaataagcaggagaatgcaggcactttgaacatcctcagcactctctccaatggcaatagttctaagcaaaaaattccagcagatggagtccacaggatcagagtggactttaaggtaaaggtgttcagtgatcataaagtatattgagtgtcaaagactttaaataaagaaaatgctactaccaaaggtgttgaaagaggaaatcagcaccaactgggggaatgaataagaactcccattagcaggtgggtttagcgctgggagagctttggtcagtgttgttaggtcactgtttgtgaactgactgcagaacatacataatgaaacattcctatccatcctgagcagtatcagaggaagtaattccttcacatggaaagtatcaaaccatgatgattccttgagtcagcaaaactgtaagagaaattcaatcccagtgtattttcgcaatatattcaatatgaattgaacaactaggtgagccttttaatagtccgtgtctgagattaaaactttttaaagcagcagttatttttggactcattgaaatgaaatactctgacattgtgatgtcacactaattttatgcttttcatccttattttccatccaaagttgtgtaattgtaaaactttcctaagtgacctttctctctccacaggtggtggcctgtttggattcaggcccaggggccgagacattcccttcttcactcttttcc

SEQ ID NO: 370699 - DNA, 5330 bp, Homo sapiens
ctgcttcacttcacggggcgaacatggcgcacagctgtcggtggcgcttccccgcccgacccgggaccaccgggggcggcggcggcggggggcgccggggcctagggggcgccccgcggcaacgcgtcccggccctgctgcttccccccgggcccccggtcggcggtggcggccccggggcgcccccctcccccccggctgtggcggccgcggcggcggcggcgggaagcagcggggctggggttccagggggagcggccgccgcctcagcagcctcctcgtcgtccgcctcgtcttcgtcttcgtcatcgtcctcagcctcttcagggccggccctgctccgggtgggcccgggcttcgacgcggcgctgcaggtctcggccgccatcggcaccaacctgcgccggttccgggccgtgtttggggagagcggcgggggaggcggcagcggagaggatgagcaattcttaggttttggctcagatgaagaagtcagagtgcgaagtcccacaaggtctccttcagttaaaactagtcctcgaaaacctcgtgggagacctagaagtggctctgaccgaaattcagctatcctctcagatccatctgtgttttcccctctaaataaatcagagaccaaatctggagataagatcaagaagaaagattctaaaagtatagaaaagaagagaggaagacctcccaccttccctggagtaaaaatcaaaataacacatggaaaggacatttcagagttaccaaagggaaacaaagaagatagcctgaaaaaaattaaaaggacaccttctgctacgtttcagcaagccacaaagattaaaaaattaagagcaggtaaactctctcctctcaagtctaagtttaagacagggaagcttcaaataggaaggaagggggtacaaattgtacgacggagaggaaggcctccatcaacagaaaggataaagaccccttcgggtctcctcattaattctgaactggaaaagccccagaaagtccggaaagacaaggaaggaacacctccacttacaaaagaagataagacagttgtcagacaaagccctcgaaggattaagccagttaggattattccttcttcaaaaaggacagatgcaaccattgctaagcaactcttacagagggcaaaaaagggggctcaaaagaaaattgaaaaagaagcagctcagctgcagggaagaaaggtgaagacacaggtcaaaaatattcgacagttcatcatgcctgttgtcagtgctatctcctcgcggatcattaagacccctcggcggtttatagaggatgaggattatgaccctccaattaaaattgcccgattagagtctacaccgaatagtagattcagtgccccgtcctgtggatcttctgaaaaatcaagtgcagcttctcagcactcctctcaaatgtcttcagactcctctcgatctagtagccccagtgttgatacctccacagactctcaggcttctgaggagattcaggtacttcctgaggagcggagcgatacccctgaagttcatcctccactgcccatttcccagtccccagaaaatgagagtaatgataggagaagcagaaggtattcagtgtcggagagaagttttggatctagaacgacgaaaaaattatcaactctacaaagtgccccccagcagcagacctcctcgtctccacctccacctctgctgactccaccgccaccactgcagccagcctccagtatctctgaccacacaccttggcttatgcctccaacaatccccttagcatcaccatttttgcctgcttccactgctcctatgcaagggaagcgaaaatctattttgcgagaaccgacatttaggtggacttctttaaagcattctaggtcagagccacaatacttttcctcagcaaagtatgccaaagaaggtcttattcgcaaaccaatatttgataatttccgaccccctccactaactcccgaggacgttggctttgcatctggtttttctgcatctggtaccgctgcttcagcccgattgttttcgccactccattctggaacaaggtttgatatgcacaaaaggagccctcttctgagagctccaagatttactccaagtgaggctcactctagaatatttgagtctgtaaccttgcctagtaatcgaacttctgctggaacatcttcttcaggagtatccaatagaaaaaggaaaagaaaagtgtttagtcctattcgatctgaaccaagatctccttctcactccatgaggacaagaagtggaaggcttagtagttctgagctctcacctctcacccccccgtcttctgtctcttcctcgttaagcatttctgttagtcctcttgccactagtgccttaaacccaacttttacttttccttctcattccctgactcagtctggggaatctgcagagaaaaatcagagaccaaggaagcagactagtgctccggcagagccattttcatcaagtagtcctactcctctcttcccttggtttaccccaggctctcagactgaaagagggagaaataaagacaaggcccccgaggagctgtccaaagatcgagatgctgacaagagcgtggagaaggacaagagtagagagagagaccgggagagagaaaaggagaataagcgggagtcaaggaaagagaaaaggaaaaagggatcagaaattcagagtagttctgctttgtatcctgtgggtagggtttccaaagagaaggttgttggtgaagatgttgccacttcatcttctgccaaaaaagcaacagggcggaagaagtcttcatcacatgattctgggactgatattacttctgtgactcttggggatacaacagctgtcaaaaccaaaatacttataaagaaagggagaggaaatctggaaaaaaccaacttggacctcggcccaactgccccatccctggagaaggagaaaaccctctgcctttccactccttcatctagcactgttaaacattccacttcctccataggctccatgttggctcaggcagacaagcttccaatgactgacaagagggttgccagcctcctaaaaaaggccaaagctcagctctgcaagattgagaagagtaagagtcttaaacaaaccgaccagcccaaagcacagggtcaagaaagtgactcatcagagacctctgtgcgaggaccccggattaaacatgtctgcagaagagcagctgttgcccttggccgaaaacgagctgtgtttcctgatgacatgcccaccctgagtgccttaccatgggaagaacgagaaaagattttgtcttccatggggaatgatgacaagtcatcaattgctggctcagaagatgctgaacctcttgctccacccatcaaaccaattaaacctgtcactagaaacaaggcaccccaggaacctccagtaaagaaaggacgtcgatcgaggcggtgtgggcagtgtcccggctgccaggtgcctgaggactgtggtgtttgtactaattgcttagataagcccaagtttggtggtcgcaatataaagaagcagtgctgcaagatgagaaaatgtcagaatctacaatggatgccttccaaagcctacctgcagaagcaagctaaagctgtgaaaaagaaagagaaaaagtctaagaccagtgaaaagaaagacagcaaagagagcagtgttgtgaagaacgtggtggactctagtcagaaacctaccccatcagcaagagaggatcctgccccaaagaaaagcagtagtgagcctcctccacgaaagcccgtcgaggaaaagagtgaagaagggaatgtctcggcccctgggcctgaatccaaacaggccaccactccagcttccaggaagtcaagcaagcaggtctcccagccagcagtggtcatcccgcctcagccacctactacaggaccgccaagaaaagaagttcccaaaaccactcctagtgagcccaagaaaaagcagcctccaccaccagaatcaggtccagagcagagcaaacagaaaaaagtggctccccgcccaagtatccctgtaaaacaaaaaccaaaagaaaaggaaaaaccacctccggtcaataagcaggagaatgcaggcactttgaacatcctcagcactctctccaatggcaatagttctaagcaaaaaattccagcagatggagtccacaggatcagagtggactttaaggaggattgtgaagcagaaaatgtgtgggagatgggaggcttaggaatcttgacttctgttcctataacacccagggtggtttgctttctctgtgccagtagtgggcatgtagagtttgtgtattgccaagtctgttgtgagcccttccacaagttttgtttagaggagaacgagcgccctctggaggaccagctggaaaattggtgttgtcgtcgttgcaaattctgtcacgtttgtggaaggcaacatcaggctacaaagcagctgctggagtgtaataagtgccgaaacagctatcaccctgagtgcctgggaccaaactaccccaccaaacccacaaagaagaagaaagtctggatctgtaccaagtgtgttcgctgtaagagctgtggatccacaactccaggcaaagggtgggatgcacagtggtctcatgatttctcactgtgtcatgattgcgccaagctctttgctaaaggaaacttctgccctctctgtgacaaatgttatgatgatgatgactatgagagtaagatgatgcaatgtggaaagtgtgatcgctgggtccattccaaatgtgagaatctttcaggtacagaaggttggagtctttttatttcagttttcttctttctaggtactactacatttattagcctctagagcactttaaacctaaaattatggttgtggatgagatattaggaggtggtgatcaagtaggaggggggaaatagagatgatcagtactgcggcgggtaggcctaggagtggtgggggcagatgtagatgggcgaagcagattgtcgttcactttggtcctcaggggttgtaataattattattatgagtgggctttgatgagggaggtaggtggtaggtggtgtataatattagtagttgggtgatgaggaatagtgtaaggagtatgggggtaattgatggtgggccatacggtagtatgaagtgggggcattaatatcagcagtagtgagagccatggtcatccccttatgagcgggcgcggtgataataggcttgcgctctaagattaaagatgtcctagaccactttttaccaggaggcaca

SEQ ID NO: 370700 - DNA, 4301 bp, Homo sapiens
ctgcttcacttcacggggcgaacatggcgcacagctgtcggtggcgcttccccgcccgacccgggaccaccgggggcggcggcggcggggggcgccggggcctagggggcgccccgcggcaacgcgtcccggccctgctgcttccccccgggcccccggtcggcggtggcggccccggggcgcccccctcccccccggctgtggcggccgcggcggcggcggcgggaagcagcggggctggggttccagggggagcggccgccgcctcagcagcctcctcgtcgtccgcctcgtcttcgtcttcgtcatcgtcctcagcctcttcagggccggccctgctccgggtgggcccgggcttcgacgcggcgctgcaggtctcggccgccatcggcaccaacctgcgccggttccgggccgtgtttggggagagcggcgggggaggcggcagcggagaggatgagcaattcttaggttttggctcagatgaagaagtcagagtgcgaagtcccacaaggtctccttcagttaaaactagtcctcgaaaacctcgtgggagacctagaagtggctctgaccgaaattcagctatcctctcagatccatctgtgttttcccctctaaataaatcagagaccaaatctggagataagatcaagaagaaagattctaaaagtatagaaaagaagagaggaagacctcccaccttccctggagtaaaaatcaaaataacacatggaaaggacatttcagagttaccaaagggaaacaaagaagatagcctgaaaaaaattaaaaggacaccttctgctacgtttcagcaagccacaaagattaaaaaattaagagcaggtaaactctctcctctcaagtctaagtttaagacagggaagcttcaaataggaaggaagggggtacaaattgtacgacggagaggaaggcctccatcaacagaaaggataaagaccccttcgggtctcctcattaattctgaactggaaaagccccagaaagtccggaaagacaaggaaggaacacctccacttacaaaagaagataagacagttgtcagacaaagccctcgaaggattaagccagttaggattattccttcttcaaaaaggacagatgcaaccattgctaagcaactcttacagagggcaaaaaagggggctcaaaagaaaattgaaaaagaagcagctcagctgcagggaagaaaggtgaagacacaggtcaaaaatattcgacagttcatcatgcctgttgtcagtgctatctcctcgcggatcattaagacccctcggcggtttatagaggatgaggattatgaccctccaattaaaattgcccgattagagtctacaccgaatagtagattcagtgccccgtcctgtggatcttctgaaaaatcaagtgcagcttctcagcactcctctcaaatgtcttcagactcctctcgatctagtagccccagtgttgatacctccacagactctcaggcttctgaggagattcaggtacttcctgaggagcggagcgatacccctgaagttcatcctccactgcccatttcccagtccccagaaaatgagagtaatgataggagaagcagaaggtattcagtgtcggagagaagttttggatctagaacgacgaaaaaattatcaactctacaaagtgccccccagcagcagacctcctcgtctccacctccacctctgctgactccaccgccaccactgcagccagcctccagtatctctgaccacacaccttggcttatgcctccaacaatccccttagcatcaccatttttgcctgcttccactgctcctatgcaagggaagcgaaaatctattttgcgagaaccgacatttaggtggacttctttaaagcattctaggtcagagccacaatacttttcctcagcaaagtatgccaaagaaggtcttattcgcaaaccaatatttgataatttccgaccccctccactaactcccgaggacgttggctttgcatctggtttttctgcatctggtaccgctgcttcagcccgattgttttcgccactccattctggaacaaggtttgatatgcacaaaaggagccctcttctgagagctccaagatttactccaagtgaggctcactctagaatatttgagtctgtaaccttgcctagtaatcgaacttctgctggaacatcttcttcaggagtatccaatagaaaaaggaaaagaaaagtgtttagtcctattcgatctgaaccaagatctccttctcactccatgaggacaagaagtggaaggcttagtagttctgagctctcacctctcacccccccgtcttctgtctcttcctcgttaagcatttctgttagtcctcttgccactagtgccttaaacccaacttttacttttccttctcattccctgactcagtctggggaatctgcagagaaaaatcagagaccaaggaagcagactagtgctccggcagagccattttcatcaagtagtcctactcctctcttcccttggtttaccccaggctctcagactgaaagagggagaaataaagacaaggcccccgaggagctgtccaaagatcgagatgctgacaagagcgtggagaaggacaagagtagagagagagaccgggagagagaaaaggagaataagcgggagtcaaggaaagagaaaaggaaaaagggatcagaaattcagagtagttctgctttgtatcctgtgggtagggtttccaaagagaaggttgttggtgaagatgttgccacttcatcttctgccaaaaaagcaacagggcggaagaagtcttcatcacatgattctgggactgatattacttctgtgactcttggggatacaacagctgtcaaaaccaaaatacttataaagaaagggagaggaaatctggaaaaaaccaacttggacctcggcccaactgccccatccctggagaaggagaaaaccctctgcctttccactccttcatctagcactgttaaacattccacttcctccataggctccatgttggctcaggcagacaagcttccaatgactgacaagagggttgccagcctcctaaaaaaggccaaagctcagctctgcaagattgagaagagtaagagtcttaaacaaaccgaccagcccaaagcacagggtcaagaaagtgactcatcagagacctctgtgcgaggaccccggattaaacatgtctgcagaagagcagctgttgcccttggccgaaaacgagctgtgtttcctgatgacatgcccaccctgagtgccttaccatgggaagaacgagaaaagattttgtcttccatggggaatgatgacaagtcatcaattgctggctcagaagatgctgaacctcttgctccacccatcaaaccaattaaacctgtcactagaaacaaggcaccccaggaacctccagtaaagaaaggacgtcgatcgaggcggtgtgggcagtgtcccggctgccaggtgcctgaggactgtggtgtttgtactaattgcttagataagcccaagtttggtggtcgcaatataaagaagcagtgctgcaagatgagaaaatgtcagaatctacaatggatgccttccaaagcctacctgcagaagcaagctaaagctgtgaaaaagaaagagaaaaagtctaagaccagtgaaaagaaagacagcaaagagagcagtgttgtgaagaacgtggtggactctagtcagaaacctaccccatcagcaagagaggatcctgccccaaagaaaagcagtagtgagcctcctccacgaaagcccgtcgaggaaaagagtgaagaagggaatgtctcggcccctgggcctgaatccaaacaggccaccactccagcttccaggaagtcaagcaagcaggtctcccagccagcagtggtcatcccgcctcagccacctactacaggaccgccaagaaaagaagttcccaaaaccactcctagtgagcccaagaaaaagcagcctccaccaccagaatcaggtccagagcagagcaaacagaaaaaagtggctccccgcccaagtatccctgtaaaacaaaaaccaaaagaaaaggaaaaaccacctccggtcaataagcaggagaatgcaggcactttgaacatcctcagcactctctccaatggcaatagttctaagcaaaaaattccagcagatggagtccacaggatcagagtggactttaaggtggtggcctgtttggattcaggcccaggggccgagacattcccttcttcactcttttcc

SEQ ID NO: 370701 - DNA, 5050 bp, Homo sapiens
ctgcttcacttcacggggcgaacatggcgcacagctgtcggtggcgcttccccgcccgacccgggaccaccgggggcggcggcggcggggggcgccggggcctagggggcgccccgcggcaacgcgtcccggccctgctgcttccccccgggcccccggtcggcggtggcggccccggggcgcccccctcccccccggctgtggcggccgcggcggcggcggcgggaagcagcggggctggggttccagggggagcggccgccgcctcagcagcctcctcgtcgtccgcctcgtcttcgtcttcgtcatcgtcctcagcctcttcagggccggccctgctccgggtgggcccgggcttcgacgcggcgctgcaggtctcggccgccatcggcaccaacctgcgccggttccgggccgtgtttggggagagcggcgggggaggcggcagcggagaggatgagcaattcttaggttttggctcagatgaagaagtcagagtgcgaagtcccacaaggtctccttcagttaaaactagtcctcgaaaacctcgtgggagacctagaagtggctctgaccgaaattcagctatcctctcagatccatctgtgttttcccctctaaataaatcagagaccaaatctggagataagatcaagaagaaagattctaaaagtatagaaaagaagagaggaagacctcccaccttccctggagtaaaaatcaaaataacacatggaaaggacatttcagagttaccaaagggaaacaaagaagatagcctgaaaaaaattaaaaggacaccttctgctacgtttcagcaagccacaaagattaaaaaattaagagcaggtaaactctctcctctcaagtctaagtttaagacagggaagcttcaaataggaaggaagggggtacaaattgtacgacggagaggaaggcctccatcaacagaaaggataaagaccccttcgggtctcctcattaattctgaactggaaaagccccagaaagtccggaaagacaaggaaggaacacctccacttacaaaagaagataagacagttgtcagacaaagccctcgaaggattaagccagttaggattattccttcttcaaaaaggacagatgcaaccattgctaagcaactcttacagagggcaaaaaagggggctcaaaagaaaattgaaaaagaagcagctcagctgcagggaagaaaggtgaagacacaggtcaaaaatattcgacagttcatcatgcctgttgtcagtgctatctcctcgcggatcattaagacccctcggcggtttatagaggatgaggattatgaccctccaattaaaattgcccgattagagtctacaccgaatagtagattcagtgccccgtcctgtggatcttctgaaaaatcaagtgcagcttctcagcactcctctcaaatgtcttcagactcctctcgatctagtagccccagtgttgatacctccacagactctcaggcttctgaggagattcaggtacttcctgaggagcggagcgatacccctgaagttcatcctccactgcccatttcccagtccccagaaaatgagagtaatgataggagaagcagaaggtattcagtgtcggagagaagttttggatctagaacgacgaaaaaattatcaactctacaaagtgccccccagcagcagacctcctcgtctccacctccacctctgctgactccaccgccaccactgcagccagcctccagtatctctgaccacacaccttggcttatgcctccaacaatccccttagcatcaccatttttgcctgcttccactgctcctatgcaagggaagcgaaaatctattttgcgagaaccgacatttaggtggacttctttaaagcattctaggtcagagccacaatacttttcctcagcaaagtatgccaaagaaggtcttattcgcaaaccaatatttgataatttccgaccccctccactaactcccgaggacgttggctttgcatctggtttttctgcatctggtaccgctgcttcagcccgattgttttcgccactccattctggaacaaggtttgatatgcacaaaaggagccctcttctgagagctccaagatttactccaagtgaggctcactctagaatatttgagtctgtaaccttgcctagtaatcgaacttctgctggaacatcttcttcaggagtatccaatagaaaaaggaaaagaaaagtgtttagtcctattcgatctgaaccaagatctccttctcactccatgaggacaagaagtggaaggcttagtagttctgagctctcacctctcacccccccgtcttctgtctcttcctcgttaagcatttctgttagtcctcttgccactagtgccttaaacccaacttttacttttccttctcattccctgactcagtctggggaatctgcagagaaaaatcagagaccaaggaagcagactagtgctccggcagagccattttcatcaagtagtcctactcctctcttcccttggtttaccccaggctctcagactgaaagagggagaaataaagacaaggcccccgaggagctgtccaaagatcgagatgctgacaagagcgtggagaaggacaagagtagagagagagaccgggagagagaaaaggagaataagcgggagtcaaggaaagagaaaaggaaaaagggatcagaaattcagagtagttctgctttgtatcctgtgggtagggtttccaaagagaaggttgttggtgaagatgttgccacttcatcttctgccaaaaaagcaacagggcggaagaagtcttcatcacatgattctgggactgatattacttctgtgactcttggggatacaacagctgtcaaaaccaaaatacttataaagaaagggagaggaaatctggaaaaaaccaacttggacctcggcccaactgccccatccctggagaaggagaaaaccctctgcctttccactccttcatctagcactgttaaacattccacttcctccataggctccatgttggctcaggcagacaagcttccaatgactgacaagagggttgccagcctcctaaaaaaggccaaagctcagctctgcaagattgagaagagtaagagtcttaaacaaaccgaccagcccaaagcacagggtcaagaaagtgactcatcagagacctctgtgcgaggaccccggattaaacatgtctgcagaagagcagctgttgcccttggccgaaaacgagctgtgtttcctgatgacatgcccaccctgagtgccttaccatgggaagaacgagaaaagattttgtcttccatggggaatgatgacaagtcatcaattgctggctcagaagatgctgaacctcttgctccacccatcaaaccaattaaacctgtcactagaaacaaggcaccccaggaacctccagtaaagaaaggacgtcgatcgaggcggtgtgggcagtgtcccggctgccaggtgcctgaggactgtggtgtttgtactaattgcttagataagcccaagtttggtggtcgcaatataaagaagcagtgctgcaagatgagaaaatgtcagaatctacaatggatgccttccaaagcctacctgcagaagcaagctaaagctgtgaaaaagaaagagaaaaagtctaagaccagtgaaaagaaagacagcaaagagagcagtgttgtgaagaacgtggtggactctagtcagaaacctaccccatcagcaagagaggatcctgccccaaagaaaagcagtagtgagcctcctccacgaaagcccgtcgaggaaaagagtgaagaagggaatgtctcggcccctgggcctgaatccaaacaggccaccactccagcttccaggaagtcaagcaagcaggtctcccagccagcagtggtcatcccgcctcagccacctactacaggaccgccaagaaaagaagttcccaaaaccactcctagtgagcccaagaaaaagcagcctccaccaccagaatcaggtccagagcagagcaaacagaaaaaagtggctccccgcccaagtatccctgtaaaacaaaaaccaaaagaaaaggaaaaaccacctccggtcaataagcaggagaatgcaggcactttgaacatcctcagcactctctccaatggcaatagttctaagcaaaaaattccagcagatggagtccacaggatcagagtggactttaaggtaaaggtgttcagtgatcataaagtatattgagtgtcaaagactttaaataaagaaaatgctactaccaaaggtgttgaaagaggaaatcagcaccaactgggggaatgaataagaactcccattagcaggtgggtttagcgctgggagagctttggtcagtgttgttaggtcactgtttgtgaactgactgcagaacatacataatgaaacattcctatccatcctgagcagtatcagaggaagtaattccttcacatggaaagtatcaaaccatgatgattccttgagtcagcaaaactgtaagagaaattcaatcccagtgtattttcgcaatatattcaatatgaattgaacaactaggtgagccttttaatagtccgtgtctgagattaaaactttttaaagcagcagttatttttggactcattgaaatgaaatactctgacattgtgatgtcacactaattttatgcttttcatccttattttccatccaaagttgtgtaattgtaaaactttcctaagtgacctttctctctccacaggaggattgtgaagcagaaaatgtgtgggagatgggaggcttaggaatcttgacttctgttcctataacacccagggtggtttgctttctctgtgccagtagtgggcatgtagagaactcgccgtgtgtgtgtcagagaatgttgctcctgtgccctgagtcaacaaagacggcccctgtgagctcaagggcagttgggaaggtgtagcgaacatcctgtaaaacgtcccatcttgattctgtttcactgaggccatctatcc

SEQ ID NO: 370702 - DNA, 1153 bp, Homo sapiens
ctgcttcacttcacggggcgaacatggcgcacagctgtcggtggcgcttccccgcccgacccgggaccaccgggggcggcggcggcggggggcgccggggcctagggggcgccccgcggcaacgcgtcccggccctgctgcttccccccgggcccccggtcggcggtggcggccccggggcgcccccctcccccccggctgtggcggccgcggcggcggcggcgggaagcagcggggctggggttccagggggagcggccgccgcctcagcagcctcctcgtcgtccgcctcgtcttcgtcttcgtcatcgtcctcagcctcttcagggccggccctgctccgggtgggcccgggcttcgacgcggcgctgcaggtctcggccgccatcggcaccaacctgcgccggttccgggccgtgtttggggagagcggcgggggaggcggcagcggagaggatgagcaattcttaggttttggctcagatgaagaagtcagagtgcgaagtcccacaaggtctccttcaggtacggccaattaagtgcatggtgccttttaagttttgtttgttaggagattgtggcttcctcttgccttctttacatgtaaaggatgctctaccatacttgggttaggaaatggctgatgagctagacttctttttatttatttatttatttattattgttatactttaagttttagggtacatgtgcacaatgtgcaagttagttacatatgtatacatgtgccatgatggtgcgctgcacccactaactcgtcatctagcattaggtatatctcccaatgctatccctcccccctccccccagctagacttctttatgggactcttatctatcaggccacattgggtttattctttctctctgggaactacttggggcatgggaagtaggtttccacagaattactgggaaatctggtaggcaaagtgaaggtaacctagtaagagtatcctcagatttacacattttgtgttatgtggtagtgtatatgtctttgggaataatttggccattattttttttggatgaaatttggtccactattgtcaaagaaccaaaaacaaaatattggcattatgtgaaacatttttacctgattcttgaaaggctgtattaaaataaaaaa

SEQ ID NO: 370703 - DNA, 269 bp, Homo sapiens
gtcctgtggatcttctgaaaaatcaagtgcagctcttctcagcactcctctcaaatgtcttcagactcctctcgatctagtagccccagtgttgatacctccacagactctcaggcttctgaggagattcaggtacttcctgaggagcggagcgatacccctgaagttcatcctccactgcccatttcccagtccccagaaaatgagagtaatgataggagaagcagaaggtattcagtgtcggagagaagttttggatctagaacgac

SEQ ID NO: 370704 - DNA, 1829 bp, Homo sapiens
aggtgtaatgatagccactctgagcagaactgacagcatgaaggcactcctggccctgccgctgctgctgcttctctccacgcccccgtgtgccccccaggtctccgggatccgaggagatgctctggagaggttttgccttcagcaacccctggactgtgacgacatctatgcccagggctaccagtcagacggcgtgtacctcatctacccctcgggccccagtgtgcctgtgcccgtcttctgtgacatgaccaccgagggcgggaagtggacggttttccagaagagattcaatggctcagtaagtttcttccgcggctggaatgactacaagctgggcttcggccgtgctgatggagagtactggctggggctgcagaacatgcacctcctgacactgaagcagaagtatgagctgcgagtggacttggaggactttgagaacaacacggcctatgccaagtacgctgacttctccatctccccgaacgcggtcagcgcagaggaggatggctacaccctctttgtggcaggctttgaggatggcggggcaggtgactccctgtcctaccacagtggccagaagttctctaccttcgaccgggaccaggacctctttgtgcagaactgcgcagctctctcctcaggagccttctggttccgcagctgccactttgccaacctcaatggcttctacctaggtggctcccacctctcttatgccaatggcatcaactgggcccagtggaagggcttctactactccctcaaacgcactgagatgaaaatccgccgggcctgaagggctggccccctcaggcacctttcctcccctggacacccatggtctccatgagtgctccctctgctgcccctgatgcatgcttctgctgattcccgagcaccaactccttacaagggggccttgtggctctcagccatgccacatccctgtcacacacccagggcatccattcctaagccagacccggctcccctacacctgaagttacactgccagcagttccccaggcctcttccgagaggcacatggttctagcctggacctggctgggctccatgagaatgagttgcctccaccctgtcccaacagctgacagccaggagccactctcccagctgcaggcctttgtggtccatcttgtcctgcttcctcactgtggacccctgtctgggccaccctagtgtgctaagctgagcagtgcagtgtgaacagggcccatggtgtattctaggccacagcccagcactcctctgggctgctctcaaaccatgtcccatcttcagcatccctcccaccaacttactcccctgtggtgagtaccgtggaaccccagcccacctcactatcatactcagcttcccctgatggcccatcccagcccctgaagctctatgccaagaacacagctaccgcacaccaccctgaaacagccacagccaaggtaggcatgcatatgaggtcttccccataccctctgggtgttgagaggtttagccacatgagggagcagaggacaatctctgcagggctgggagtgggtagggactgaaggtctcaataaaccttcagaacctgaatgaactggcttcatacacacaaacatatttgtttatcccccaaatgtaggcacctggctcctccttgctcccctgctgatggtgtcctaccccgaactccaaaaattacacctggagtcaggtgcagaagggaaccttgtatttcacaggcctcattttgatggcaaaaagacagtgtaataataacataataataataaaaatataatactgaaaaggaaaat

SEQ ID NO: 370705 - DNA, 1937 bp, Homo sapiens
ggcagacacccagccactctgagcagaactgacagcatgaaggtacggggcccagggtcgggggactcatagcatgggggaactgagcccactccagaggcccctggccacagagggcactatgaaggcacaaggagttctcttgaaactcgcactcctggccctgccgctgctgctgcttctctccacgcccccgtgtgccccccaggtctccgggatccgaggagatgctctggagaggttttgccttcagcaacccctggactgtgacgacatctatgcccagggctaccagtcagacggcgtgtacctcatctacccctcgggccccagtgtgcctgtgcccgtcttctgtgacatgaccaccgagggcgggaagtggacggttttccagaagagattcaatggctcagtaagtttcttccgcggctggaatgactacaagctgggcttcggccgtgctgatggagagtactggctggggctgcagaacatgcacctcctgacactgaagcagaagtatgagctgcgagtggacttggaggactttgagaacaacacggcctatgccaagtacgctgacttctccatctccccgaacgcggtcagcgcagaggaggatggctacaccctctttgtggcaggctttgaggatggcggggcaggtgactccctgtcctaccacagtggccagaagttctctaccttcgaccgggaccaggacctctttgtgcagaactgcgcagctctctcctcaggagccttctggttccgcagctgccactttgccaacctcaatggcttctacctaggtggctcccacctctcttatgccaatggcatcaactgggcccagtggaagggcttctactactccctcaaacgcactgagatgaaaatccgccgggcctgaagggctggccccctcaggcacctttcctcccctggacacccatggtctccatgagtgctccctctgctgcccctgatgcatgcttctgctgattcccgagcaccaactccttacaagggggccttgtggctctcagccatgccacatccctgtcacacacccagggcatccattcctaagccagacccggctcccctacacctgaagttacactgccagcagttccccaggcctcttccgagaggcacatggttctagcctggacctggctgggctccatgagaatgagttgcctccaccctgtcccaacagctgacagccaggagccactctcccagctgcaggcctttgtggtccatcttgtcctgcttcctcactgtggacccctgtctgggccaccctagtgtgctaagctgagcagtgcagtgtgaacagggcccatggtgtattctaggccacagcccagcactcctctgggctgctctcaaaccatgtcccatcttcagcatccctcccaccaacttactcccctgtggtgagtaccgtggaaccccagcccacctcactatcatactcagcttcccctgatggcccatcccagcccctgaagctctatgccaagaacacagctaccgcacaccaccctgaaacagccacagccaaggtaggcatgcatatgaggtcttccccataccctctgggtgttgagaggtttagccacatgagggagcagaggacaatctctgcagggctgggagtgggtagggactgaaggtctcaataaaccttcagaacctgaatgaactggcttcatacacacaaacatatttgtttatcccccaaatgtaggcacctggctcctccttgctcccctgctgatggtgtcctaccccgaactccaaaaattacacctggagtcaggtgcagaagggaaccttgtatttcacaggcctcattttgatggcaaaaagacagtgtaataataacataataataataaaaatataatactgaaaaggaaaat

SEQ ID NO: 370706 - DNA, 1163 bp, Homo sapiens
  misc_feature (11)..(11): n is a, c, g, or t
  misc_feature (21)..(21): n is a, c, g, or t
  misc_feature (32)..(33): n is a, c, g, or t
  misc_feature (57)..(57): n is a, c, g, or t
atttcggcacnaggaagatgngagggagggtnngacattgagtacttcccccagcangatggggtgggaggattcaggagatgagagggagggtggacattgagtacttccccgagcaggatggggtgggaggattcaggagatgagagggagggtggacattgagtacttcccccagcaggatggggtgggaggattcaggagatgagagggagggtggacattgagtacttcccgagcaccaactccttacaagggggccttgtggctctcagccatgccacatccctgtcacacacccagggcatccattcctaagccagacccggctcccctacacctgaagttacactgccagcagttccccaggcctcttccgagaggcacatggttctagcctggacctggctgggctccatgagaatgagttgcctccaccctgtcccaacagctgacagccaggagccactctcccagctgcaggcctttgtggtccatcttgtcctgcttcctcactgtggacccctgtctgggccaccctagtgtgctaagctgagcagtgcagtgtgaacagggcccatggtgtattctaggccacagcccagcactcctctgggctgctctcaaaccatgtcccatcttcagcatccctcccaccaacttactcccctgtggtgagtaccgtggaaccccagcccacctcactatcatactcagcttcccctgatggcccatcccagcccctgaagctctatgccaagaacacagctaccgcacaccaccctgaaacagccacagccaaggtaggcatgcatatgaggtcttccccataccctctgggtgttgagaggtttagccacatgagggagcagaggacaatctctgcagggctgggagtgggtagggactgaaggtctcaataaaccttcagaacctgaatgaactggcttcatacacacaaacatatttgtttatcccccaaatgtaggcacctggctcctccttgctcccctgctgatggtgtcctaccccgaactccaaaaattacacctggagtcaggtgcagaagggaaccttgtatttcacaggcctcattttgatggcaaaaagacagtgtaataataacataataataataaaaatataatactgaaaaggaaaat

SEQ ID NO: 370707 - DNA, 1225 bp, Homo sapiens
aggtgtaatgatagccactctgagcagaactgacagcatgaaggcactcctggccctgccgctgctgctgcttctctccacgcccccgtgtgccccccaggtctccgggatccgaggagatgctctggagaggttttgccttcagcaacccctggactgtgacgacatctatgcccagggctaccagtcagacggcgtgtacctcatctacccctcgggccccagtgtgcctgtgcccgtcttctgtgacatgaccaccgagggcgggaagtggacggttttccagaagagattcaatggctcagtaagtttcttccgcggctggaatgactacaagctgggcttcggccgtgctgatggagagtactggctggggctgcagaacatgcacctcctgacactgaagcagaagtatgagctgcgagtggacttggaggactttgagaacaacacggcctatgccaagtacgctgacttctccatctccccgaacgcggtcagcgcagaggaggatggctacaccctctttgtggcaggctttgaggatggcggggcaggtgactccctgtcctaccacagtggccagaagttctctaccttcgaccgggaccaggacctctttgtgcagaactgcgcagctctctcctcaggagccttctggttccgcagctgccactttgccaacctcaatggcttctacctaggtggctcccacctctcttatgccaatggcatcaactgggcccagtggaagggcttctactactccctcaaacgcactgagatgaaaatccgccgggcctgaagggctggccccctcaggcacctttcctcccctggacacccatggtctccatgagtgctccctctgatgcatatgaggtcttccccataccctctgggtgttgagaggtttagccacatgagggagcagaggacaatctctgcagggctgggagtgggtagggactgaaggtctcaataaaccttcagaacctgaatgaactggcttcatacacacaaacatatttgtttatcccccaaatgtaggcacctggctcctccttgctcccctgctgatggtgtcctaccccgaactccaaaaattacacctggagtcaggtgcagaagggaaccttgtatttcacaggcctcattttgatggcaaaaagacagtgtaataataacataataataataaaaatataatactgaaaaggaaaat

SEQ ID NO: 370708 - DNA, 1828 bp, Homo sapiens
ggcagacacccagccactctgagcagaactgacagcatgaaggcactcctggccctgccgctgctgctgcttctctccacgcccccgtgtgccccccaggtctccgggatccgaggagatgctctggagaggttttgccttcagcaacccctggactgtgacgacatctatgcccagggctaccagtcagacggcgtgtacctcatctacccctcgggccccagtgtgcctgtgcccgtcttctgtgacatgaccaccgagggcgggaagtggacggttttccagaagagattcaatggctcagtaagtttcttccgcggctggaatgactacaagctgggcttcggccgtgctgatggagagtactggctggggctgcagaacatgcacctcctgacactgaagcagaagtatgagctgcgagtggacttggaggactttgagaacaacacggcctatgccaagtacgctgacttctccatctccccgaacgcggtcagcgcagaggaggatggctacaccctctttgtggcaggctttgaggatggcggggcaggtgactccctgtcctaccacagtggccagaagttctctaccttcgaccgggaccaggacctctttgtgcagaactgcgcagctctctcctcaggagccttctggttccgcagctgccactttgccaacctcaatggcttctacctaggtggctcccacctctcttatgccaatggcatcaactgggcccagtggaagggcttctactactccctcaaacgcactgagatgaaaatccgccgggcctgaagggctggccccctcaggcacctttcctcccctggacacccatggtctccatgagtgctccctctgctgcccctgatgcatgcttctgctgattcccgagcaccaactccttacaagggggccttgtggctctcagccatgccacatccctgtcacacacccagggcatccattcctaagccagacccggctcccctacacctgaagttacactgccagcagttccccaggcctcttccgagaggcacatggttctagcctggacctggctgggctccatgagaatgagttgcctccaccctgtcccaacagctgacagccaggagccactctcccagctgcaggcctttgtggtccatcttgtcctgcttcctcactgtggacccctgtctgggccaccctagtgtgctaagctgagcagtgcagtgtgaacagggcccatggtgtattctaggccacagcccagcactcctctgggctgctctcaaaccatgtcccatcttcagcatccctcccaccaacttactcccctgtggtgagtaccgtggaaccccagcccacctcactatcatactcagcttcccctgatggcccatcccagcccctgaagctctatgccaagaacacagctaccgcacaccaccctgaaacagccacagccaaggtaggcatgcatatgaggtcttccccataccctctgggtgttgagaggtttagccacatgagggagcagaggacaatctctgcagggctgggagtgggtagggactgaaggtctcaataaaccttcagaacctgaatgaactggcttcatacacacaaacatatttgtttatcccccaaatgtaggcacctggctcctccttgctcccctgctgatggtgtcctaccccgaactccaaaaattacacctggagtcaggtgcagaagggaaccttgtatttcacaggcctcattttgatggcaaaaagacagtgtaataataacataataataataaaaatataatactgaaaaggaaaat

SEQ ID NO: 370709 - DNA, 1604 bp, Homo sapiens
aggtgtaatgatagccactctgagcagaactgacagcatgaaggcactcctggccctgccgctgctgctgcttctctccacgcccccgtgtgccccccaggtctccgggatccgaggagatgctctggagaggttttgccttcagcaacccctggactgtgacgacatctatgcccagggctaccagtcagacggcgtgtacctcatctacccctcgggccccagtgtgcctgtgcccgtcttctgtgacatgaccaccgagggcgggaagtggacggttttccagaagagattcaatggctcagtaagtttcttccgcggctggaatgactacaagctgggcttcggccgtgctgatggagagtactggctggggctgcagaacatgcacctcctgacactgaagcagaagtatgagctgcgagtggacttggaggactttgagaacaacacggcctatgccaagtacgctgacttctccatctccccgaacgcggtcagcgcagaggaggatggctacaccctctttgtggcaggctttgaggatggcggggcaggtgactccctgtcctaccacagtggccagaagttctctaccttcgaccgggaccaggacctctttgtgcagaactgcgcagctctctcctcaggagccttctggttccgcagctgccactttgccaacctcaatggcttctacctaggtggctcccacctctcttatgccaatggcatcaactgggcccagtggaagggcttctactactccctcaaacgcactgagatgaaaatccgccgggcctgaagggctggccccctcaggcacctttcctcccctggacacccatggtctccatgagtgctccctctgctgcccctgatgcatgcttctgctgattcccgagcaccaactccttacaagggggccttgtggctctcagccatgccacatccctgtcacacacccagggcatccattcctaagccagacccggctcccctacacctgaagttacactgccagcagttccccaggcctcttccgagaggcacatggttctagcctggacctggctgggctccatgagaatgagttgcctccaccctgtcccaacagctgacagccaggagccactctcccagctgcaggcctttgtggtccatcttgtcctgcttcctcactgtggacccctgtctgggccaccctagtgtgctaagctgagcagtgcagtgtgaacagggcccatggtgtattctaggccacagcccagcactcctctgggctgctctcaaaccatgtcccatcttcagcatccctcccaccaacttactcccctgtggtgagtaccgtggaaccccagcccacctcactatcatactcagcttcccctgatggcccatcccagcccctgaagctctatgccaagaacacagctaccgcacaccaccctgaaacagccacagccaaggtaggcatgcatatgaggtcttccccataccctctgggtgttgagaggtttagccacatgagggagcagaggacaatctctgcagggctgggagtgggtagggactgaaggtctcaataaaccttcagaacctga

SEQ ID NO: 370710 - DNA, 1734 bp, Homo sapiens
aggtgtaatgatagccactctgagcagaactgacagcatgaaggcactcctggccctgccgctgctgctgcttctctccacgcccccgtgtgccccccaggtctccgggatccgaggagatgctctggagaggttttgccttcagcaacccctggactgtgacgacatctatgcccagggctaccagtcagacggcgtgtacctcatctacccctcgggccccagtgtgcctgtgcccgtcttctgtgacatgaccaccgagggcgggaagtggacggttttccagaagagattcaatggctcagtaagtttcttccgcggctggaatgactacaagctgggcttcggccgtgctgatggagagtactggctggggctgcagaacatgcacctcctgacactgaagcagaagtatgagctgcgagtggacttggaggactttgagaacaacacggcctatgccaagtacgctgacttctccatctccccgaacgcggtcagcgcagaggaggatggctacaccctctttgtggcaggctttgaggatggcggggcaggtgactccctgtcctaccacagtggccagaagttctctaccttcgaccgggaccaggacctctttgtgcagaactgcgcagctctctcctcaggagccttctggttccgcagctgccactttgccaacctcaatggcttctacctaggtggctcccacctctcttatgccaatggcatcaactgggcccagtggaagggcttctactactccctcaaacgcactgagatgaaaatccgccgggcctgaagggctggccccctcaggcacctttcctcccctggacacccatggtctccatgagtgctccctctgctgcccctgatgcatgcttctgctgattcccgagcaccaactccttacaagggggccttgtggctctcagccatgccacatccctgtcacacacccagggcatccattcctaagccagacccggctcccctacacctgaagttacactgccagcagttccccaggcctcttccgagaggcacatggttctagcctggacctggctgggctccatgagaatgagttgcctccaccctgtcccaacagctgacagccaggagccactctcccagctgcaggcctttgtggtccatcttgtcctgcttcctcactgtggacccctgtctgggccaccctagtgtgctaagctgagcagtgcagtgtgaacagggcccatggtgtattctaggccacagcccagcactcctctgggctgctctcaaaccatgtcccatcttcagcatccctcccaccaacttactcccctgtggtgagtaccgtggaaccccagcccacctcactatcatactcagcttcccctgatggcccatcccagcccctgaagctctatgccaagaacacagctaccgcacaccaccctgaaacagccacagccaaggtaggcggactgaaggtctcaataaaccttcagaacctgaatgaactggcttcatacacacaaacatatttgtttatcccccaaatgtaggcacctggctcctccttgctcccctgctgatggtgtcctaccccgaactccaaaaattacacctggagtcaggtgcagaagggaaccttgtatttcacaggcctcattttgatggcaaaaagacagtgtaataataacataataataataaaaatataatactgaaaaggaaaat

SEQ ID NO: 370711 - DNA, 1151 bp, Homo sapiens
ggcagctgcccggggaggcggccagcgagctggggccgcgcaatgtcgcacggagccgggctcgtccgcaccacgtgcagcagcggcagcgcgctcggacccggggccggcgcggcccagcccagcgcgagccccttggaggggctgctggacctcagctacccccgcacccacgcggccctgctgaaagtggcgcaaatggtcaccctgctgattgccttcatctgtgtgcggagctccctgtggaccaactacagcgcctacagctactttgaagtggtcaccatttgcgacttgataatgatcctcgccttttacctggtccacctcttccgcttctaccgcgtgctcacctgtatcagctggcccctgtcggaacttctgcactatttaatcggtaccctgctcctcctcatcgcctccattgtggcagcttccaagagttacaaccagagcggactggtagccggagcgatctttggtttcatggccaccttcctctgcatggcaagcatatggctgtcctataagatctcgtgtgtaacccagtccacagatgcagccgtctgatgaggccacaacccctaggcccctcaggagctttgcagagaggaggacgtgtactccaggcgaggcctctggacctgtgttcctgtgccaaagtcctgtcaggctggtgggcaccaggaaaggcctgcaccctcttcctgctctcccaggaagccagctccctgagctcctgagccagccggaaactcttcctccagccttccggggagaacatccctcccattctgggaaaggaaagcagcctccagggaaatgttttctgccttcctgcttctagaaccacctcaggtactgatgaaccccacttagcacagctgaaggggtttgtgaatactcccgcctaaatcccttctacttcactcctcaggggagtgaagtgccttaagaaacaaagccctgtcctaatttatctagcttgtcagtccggtcttagagataccctctttcctgaagtgaggcgtgcctgtagaaacactatgtggtcagcctgtccccaaggagatcttgtgtctcctctccatctctgcctttgttaccagtgtgcatgtgtttgtgtgttttttaataaaatattgactcgg

SEQ ID NO: 370712 - DNA, 1524 bp, Homo sapiens
ggcagctgcccggggaggcggccagcgagctggggccgcgcaatgtcgcacggagccgggctcgtccgcaccacgtgcagcagcggcagcgcgctcggacccggggccggcgcggcccagcccagcgcgagccccttggaggggctgctggacctcagctacccccgcacccacgcggccctgctgaaagtggcgcaaatggtcaccctgctgattgccttcatctgtgtgcggagctccctgtggaccaactacagcgcctacagctactttgaagtggtcaccatttgcgacttgataatgatcctcgccttttacctggtccacctcttccgcttctaccgcgtgctcacctgtatcagctggcccctgtcggaacttctgcactatttaatcggtaccctgctcctcctcatcgcctccattgtggcagcttccaagagttacaaccagagcggactggtagccggagcgatctttggtttcatggccaccttcctctgcatggcaagcatatggctgtcctataagatctcgtgtgtaacccagtccacagatgcagccgtctgatgaggccacaacccctaggcccctcaggagctttgcagagaggaggacgtgtactccaggcgaggcctctggacctgtgttcctgtgccaaagtcctgtcaggctggtgggcaccaggaaaggcctgcaccctcttcctgctctcccaggaagccagctccctgagctcctgagccagccggaaactcttcctccagccttccggggagaacatccctcccattctgggaaaggaaagcagcctccagggaaatgttttctgccttcctgcttctagaaccacctcaggtactgatgaaccccacttagcacagctgaaggggtttgtgaatactcccgcctaaatcccttctacttcactcctcaggggagtgaagtgccttaagaaacaaagccctgtcctaatttatctagcttgtcagtccggtcttagagataccctctttcctgaagtgaggcgtgcctgtagaaacactatgtggtcagcctgtccccaaggagatcttgtgtctcctctccatctctgcctttgttaccagtgtgcatgtgtttgtgtgttttttaataaaatattgactcggaaaaaaaaaaaaaaaaaaaaaaaaaaaaaaactgtgtgtgtggggcggcattgggccctggagaaaaagtctcttcaagaacccattgcggttgggggcgggggggccccagtgttgggttaggtgtgaccttgggcaaaagagggtgtccccaagagaacaccccgcggcacatacgacacatggtgtcggtggctttcctcacccaaaaataaaaaaaagcgccccgggggggacacaacgcgacgcgtctcctgggaaaaccaatccccgaaaggggaggtctcagagaggcaccacaccgggctcccaaccacacgggatccccaagggcgaagcccaaaaataagaatagccgcgacggatggggagc

SEQ ID NO: 370713 - DNA, 1174 bp, Homo sapiens
ggcagctgcccggggaggcggccagcgagctggggccgcgcaatgtcgcacggagccgggctcgtccgcaccacgtgcagcagcggcagcgcgctcggacccggggccggcgcggcccagcccagcgcgagccccttggaggggctgctggacctcagctacccccgcacccacgcggccctgctgaaagtggcgcaaatggtcaccctgctgattgccttcatctgtgtgcggagctccctgtggaccaactacagcgcctacagctactttgaagtggtcaccatttgcgacttgataatgatcctcgccttttacctggtccacctcttccgcttctaccgcgtgctcacctgtatcagctggcccctgtcggaacttctgcactatttaatcggtaccctgctcctcctcatcgcctccattgtggcagcttccaagagttacaaccagagcggactggtagccggagcgatctttggtttcatggccaccttcctctgcatggcaagcatatggctgtcctataagatctcgtgtgtaacccagtccacagatgcagccgtctgatgaggccacaacccctaggcccctcaggagctttgcagagaggaggacgtgtactccaggcgaggcctctggacctgtgttcctgtgccaaagtcctgtcaggctggtgggcaccaggaaaggcctgcaccctcttcctgctctcccaggaagccagctccctgagctcctgagccagccggaaactcttcctccagccttccggggagaacatccctcccattctgggaaaggaaagcagcctccagggaaatgttttctgccttcctgcttctagaaccacctcaggtactgatgaaccccacttagcacagctgaaggggtttgtgaatactcccgcctaaatcccttctacttcactcctcaggggagtgaagtgccttaagaaacaaagccctgtcctaatttatctagcttgtcagtccggtcttagagataccctctttcctgaagtgaggcgtgcctgtagaaacactatgtggtcagcctgtccccaaggagatcttgtgtctcctctccatctctgcctttgttaccagtgtgcatgtgtttgtgtgttttttaataaaatattgactcggccagttgcacaaggatttcttat

SEQ ID NO: 370714 - DNA, 1052 bp, Homo sapiens
ggcagctgcccggggaggcggccagcgagctggggccgcgcaatgtcgcacggagccgggctcgtccgcaccacgtgcagcagcggcagcgcgctcggacccggggccggcgcggcccagcccagcgcgagccccttggaggggctgctggacctcagctacccccgcacccacgcggccctgctgaaagtggcgcaaatggtcaccctgctgattgccttcatctgtgtgcggagctccctgtggaccaactacagcgcctacagctactttgaagtggtcaccatttgcgacttgataatgatcctcgccttttacctggtccacctcttccgcttctaccgcgtgctcacctgtatcagctggcccctgtcgatctttggtttcatggccaccttcctctgcatggcaagcatatggctgtcctataagatctcgtgtgtaacccagtccacagatgcagccgtctgatgaggccacaacccctaggcccctcaggagctttgcagagaggaggacgtgtactccaggcgaggcctctggacctgtgttcctgtgccaaagtcctgtcaggctggtgggcaccaggaaaggcctgcaccctcttcctgctctcccaggaagccagctccctgagctcctgagccagccggaaactcttcctccagccttccggggagaacatccctcccattctgggaaaggaaagcagcctccagggaaatgttttctgccttcctgcttctagaaccacctcaggtactgatgaaccccacttagcacagctgaaggggtttgtgaatactcccgcctaaatcccttctacttcactcctcaggggagtgaagtgccttaagaaacaaagccctgtcctaatttatctagcttgtcagtccggtcttagagataccctctttcctgaagtgaggcgtgcctgtagaaacactatgtggtcagcctgtccccaaggagatcttgtgtctcctctccatctctgcctttgttaccagtgtgcatgtgtttgtgtgttttttaataaaatattgactcgg

SEQ ID NO: 370715 - DNA, 1477 bp, Homo sapiens
ggcagctgcccggggaggcggccagcgagctggggccgcgcaatgtcgcacggagccgggctcgtccgcaccacgtgcagcagcggcagcgcgctcggacccggggccggcgcggcccagcccagcgcgagccccttggaggggctgctggacctcagctacccccgcacccacgcggccctgctgaaagtggcgcaaatggtcaccctgctgattgccttcatctgtgtgcggagctccctgtggaccaactacagcgcctacagctactttgaagtggtcaccatttgcgacttgataatgatcctcgccttttacctggtccacctcttccgcttctaccgcgtgctcacctgtatcagctggcccctgtcggaacttctgcactatttaatcggtaccctgctcctcctcatcgcctccattgtggcagcttccaagagttacaaccagagcggactggtagccggagcggataatcaaagtccattggcttagccccagcttgcttgtaaatgtaaacccagaccaggcactgaagctgccaagagtgaagaccgagaggcctggctgccagccctgacctggcccaacctggaggactggggccagtggctgggcctcgcggggcttcctctctgcacctgatccaggatgaggtggttgggttagatgactctccaagctcctttctggccagagacatgaagggaacaagcacagagatgagaagcagacaggattgcccgagtaattagccctatggcctgtgaacttcctctcccctctctccactgcagatctttggtttcatggccaccttcctctgcatggcaagcatatggctgtcctataagatctcgtgtgtaacccagtccacagatgcagccgtctgatgaggccacaacccctaggcccctcaggagctttgcagagaggaggacgtgtactccaggcgaggcctctggacctgtgttcctgtgccaaagtcctgtcaggctggtgggcaccaggaaaggcctgcaccctcttcctgctctcccaggaagccagctccctgagctcctgagccagccggaaactcttcctccagccttccggggagaacatccctcccattctgggaaaggaaagcagcctccagggaaatgttttctgccttcctgcttctagaaccacctcaggtactgatgaaccccacttagcacagctgaaggggtttgtgaatactcccgcctaaatcccttctacttcactcctcaggggagtgaagtgccttaagaaacaaagccctgtcctaatttatctagcttgtcagtccggtcttagagataccctctttcctgaagtgaggcgtgcctgtagaaacactatgtggtcagcctgtccccaaggagatcttgtgtctcctctccatctctgcctttgttaccagtgtgcatgtgtttgtgtgttttttaataaaatattgactcgg

SEQ ID NO: 370716 - DNA, 1361 bp, Homo sapiens
ctcgaccatttgatgagcctcccacaggcactcttcgtctcccagcacccgaatctcatctacaagtgagggggctgggctaggtcagccttcctcacacttgagcgctggatgaccctgagaaagggaaagggtgctgccttgacttagttgagtctaatattgtttaatatgtacaaacgtaaacctagatgtaaaggcctcggcttctggctctaatacggctatgaagccagaatggaacagaaagtcattacaaatgaaatgcgaacaacgccactacaccacaaatcatgggaacgttcagatttttttaacccaaattaaaatttcatccttttcttctcttttggtccaggataatcaaagtccattggcttagccccagcttgcttgtaaatgtaaacccagaccaggcactgaagctgccaagagtgaagaccgagaggcctggctgccagccctgacctggcccaacctggaggactggggccagtggctgggcctcgcggggcttcctctctgcacctgatccaggatgaggtggttgggttagatgactctccaagctcctttctggccagagacatgaagggaacaagcacagagatgagaagcagacaggattgcccgagtaattagccctatggcctgtgaacttcctctcccctctctccactgcagatctttggtttcatggccaccttcctctgcatggcaagcatatggctgtcctataagatctcgtgtgtaacccagtccacagatgcagccgtctgatgaggccacaacccctaggcccctcaggagctttgcagagaggaggacgtgtactccaggcgaggcctctggacctgtgttcctgtgccaaagtcctgtcaggctggtgggcaccaggaaaggcctgcaccctcttcctgctctcccaggaagccagctccctgagctcctgagccagccggaaactcttcctccagccttccggggagaacatccctcccattctgggaaaggaaagcagcctccagggaaatgttttctgccttcctgcttctagaaccacctcaggtactgatgaaccccacttagcacagctgaaggggtttgtgaatactcccgcctaaatcccttctacttcactcctcaggggagtgaagtgccttaagaaacaaagccctgtcctaatttatctagcttgtcagtccggtcttagagataccctctttcctgaagtgaggcgtgcctgtagaaacactatgtggtcagcctgtccccaaggagatcttgtgtctcctctccatctctgcctttgttaccagtgtgcatgtgtttgtgtgttttttaataaaatattgactcgg

SEQ ID NO: 370717 - DNA, 2771 bp, Homo sapiens
ggcagctgcccggggaggcggccagcgagctggggccgcgcaatgtcgcacggagccgggctcgtccgcaccacgtgcagcagcggcagcgcgctcggacccggggccggcgcggcccagcccagcgcgagccccttggaggggctgctggacctcagctacccccgcacccacgcggccctgctgaaagtggcgcaaatggtcaccctgctgattgccttcatctgtgtgcggagctccctgtggaccaactacagcgcctacagctactttgaagtggtcaccatttgcgacttgataatgatcctcgccttttacctggtccacctcttccgcttctaccgcgtgctcacctgtatcagctggcccctgtcggaacttctgcactatttaatcggtaccctgctcctcctcatcgcctccattgtggcagcttccaagagttacaaccagagcggactggtagccggagcgatctttggtttcatggccaccttcctctgcatggcaagcatatggctgtcctataagatctcgtgtgtaacccagtccacagatgcagccgtctgatgaggccacaacccctaggcccctcaggagctttgcagagaggaggacgtgtactccaggcgaggcctctggacctgtgttcctgtgccaaagtcctgtcaggctggtgggcaccaggaaaggcctgcaccctcttcctgctctcccaggaagccagctccctgagctcctgagccagccggaaactcttcctccagccttccggggagaacatccctcccattctgggaaaggaaagcagcctccagggaaatgttttctgccttcctgcttctagaaccacctcagacaaactagagcaatgcctatgtaagaacaaggactctcaagatcctgctacacagtattcacaatcaaaagggcccaagattcaggaccacctaaagacaactgacaaaaagtgtcagagccagaggcaacctctgctagatgaagcagcagcacatgactccatttctatctgataaggagacagagaagaggcatctcgaacagatgaaaaaccaaaggctggtgtcctaaaaaaaacagattggcttcaaagaaaacactaaggaagacccacagagctgtattaattttagtaaaaataatcatatgccaacaggggaattgaaccactttctaaatcatagtatgaactcatctcttcagatacttggtaagtggtcaaagcttgtttttataattactttcactgtcttgggcaaaaagtctttcttatctttggtccttaggtgtggtatcagtttcttccatttttttatgtgttacaaaacaatcttttttttacttgacatcaacaaccaaggtgcagtataaacacgaagttgctgatattgttgcttttatacacataaaataccaacatctcccatacattttataggctatacgaaggtctcaaagaattaataaccgttatccaaaaatattataacatttaaggctgagtgaaatacagtaaagcctggtaatatatgttaaggaaaaaaacctagaccaacattttaaatattggtttcttaaatatgttaaattcccattaacagaacataatctaagcatcaaaacaaacagctaagcaaattaatttaaaaataaaacaatttctaagtagatgaatataatcacgatgtttatacagctataaagcataatttggaagctaagcctagtaaaagaatgacctgtaacagaatgacagaatcatttatcaaccgttgagctgtgtgatttaaaaacaattgttttctcctcctcccaccaaaatctccatttgagataagtttcaattattatttaaaaaaaaattttttttaacttatctggcctactttgtggtgactgacacaatattgataaaactgccttcttgaccttccccttgctctccaaaagaagtggtttaaacaattaacaaattttacaagagcttctgccagggctcaggcaccacaatgcagggtcactaccttaggtaacatctgctccccagagtctttaggcattaagtggctcagtgagggcttcagccctagtggtattttcaggttttctcagctgggactcctgtcgtttttcatacagcatagtgataaagtcaagtaggaacataaaacttgctataaatccaaacacctgaggaaaaaaaggaggaaaggttatatgagaattttggaatataatcttacatttcctacttggcttggagaatgtttcatataaacaagatgttcatgaattttatcttatacacgactactctttaatggtaaaaaaaatttttttaagtcatcaaaaaatggaaagaagttataaaagaaaaacttccagaataatggctattagtcaaagtctcacaaaatattaatgttctgccttatgtgtgcatgtttatatgtggagggctaatatatgaaagtagggttaacagataaacattaaatcctataaaatgatacaaaacaaaaatatttgcatggttagattgacccacagatgcgataaggaaaatacgtgactaggcaactcagcctaggtgaaaatgaaaaaagttattaatatcaaaacagaaattccattttgaagatactattaggttaaattacttaaataatgttccagttgtcacactgcaatgacacagtgacatgacgccactacctacttcctcttccttaaatcacttcctcaactgt

SEQ ID NO: 370718 - DNA, 982 bp, Homo sapiens
cacctcggcctccccaagtgctgggattacaggtcaccctgctgattgccttcatctgtgtgcggagctccctgtggaccaactacagcgcctacagctactttgaagtggtcaccatttgcgacttgataatgatcctcgccttttacctggtccacctcttccgcttctaccgcgtgctcacctgtatcagctggcccctgtcggaacttctgcactatttaatcggtaccctgctcctcctcatcgcctccattgtggcagcttccaagagttacaaccagagcggactggtagccggagcgatctttggtttcatggccaccttcctctgcatggcaagcatatggctgtcctataagatctcgtgtgtaacccagtccacagatgcagccgtctgatgaggccacaacccctaggcccctcaggagctttgcagagaggaggacgtgtactccaggcgaggcctctggacctgtgttcctgtgccaaagtcctgtcaggctggtgggcaccaggaaaggcctgcaccctcttcctgctctcccaggaagccagctccctgagctcctgagccagccggaaactcttcctccagccttccggggagaacatccctcccattctgggaaaggaaagcagcctccagggaaatgttttctgccttcctgcttctagaaccacctcaggtactgatgaaccccacttagcacagctgaaggggtttgtgaatactcccgcctaaatcccttctacttcactcctcaggggagtgaagtgccttaagaaacaaagccctgtcctaatttatctagcttgtcagtccggtcttagagataccctctttcctgaagtgaggcgtgcctgtagaaacactatgtggtcagcctgtccccaaggagatcttgtgtctcctctccatctctgcctttgttaccagtgtgcatgtgtttgtgtgttttttaataaaatattgactcgg

SEQ ID NO: 370719 - DNA, 970 bp, Homo sapiens
ggcagctgcccggggaggcggccagcgagctggggccgcgcaatgtcgcacggagccgggctcgtccgcaccacgtgcagcagcggcagcgcgctcggacccggggccggcgcggcccagcccagcgcgagccccttggaggggctgctggacctcagctacccccgcacccacgcggccctgctgaaagtggcgcaaatggtcaccctgctgattgccttcatctgtgtgcggagctccctgtggaccaactacagcgcctacagctactttgaagtggtcaccatttgcgacttgataatgatcctcgccttttacctggtccacctcttccgcttctaccgcgtgctcacctgtatcagctggcccctgtcgatgcagccgtctgatgaggccacaacccctaggcccctcaggagctttgcagagaggaggacgtgtactccaggcgaggcctctggacctgtgttcctgtgccaaagtcctgtcaggctggtgggcaccaggaaaggcctgcaccctcttcctgctctcccaggaagccagctccctgagctcctgagccagccggaaactcttcctccagccttccggggagaacatccctcccattctgggaaaggaaagcagcctccagggaaatgttttctgccttcctgcttctagaaccacctcaggtactgatgaaccccacttagcacagctgaaggggtttgtgaatactcccgcctaaatcccttctacttcactcctcaggggagtgaagtgccttaagaaacaaagccctgtcctaatttatctagcttgtcagtccggtcttagagataccctctttcctgaagtgaggcgtgcctgtagaaacactatgtggtcagcctgtccccaaggagatcttgtgtctcctctccatctctgcctttgttaccagtgtgcatgtgtttgtgtgttttttaataaaatattgactcgg

SEQ ID NO: 370720 - DNA, 9362 bp, Homo sapiens
  misc_feature (7538)..(7538): n is a, c, g, or t
gcggggcactttgaagaatcacgtgtgttgaggccctcttaaagagataggcacctacttttccctccaccctaaacaccgccctgagggcggcggcgaccgtggtaattgcaactgctcaggggcagggcttgccccagcgccgagtagtggcaacggcgtggttgcgtcgggggtgcctgggagcctggagtcccgggggcctgaaatcggcagcttcccgggcagacactctctccctcaggaagaggtgccgccgagtcagcgcggggcagtgtgagcgccccgaggtgctttctcagttgaggagaggtggggttacagggcacaggtgacagggccggagaaagatggagcagcccggggcggcggcgtcgggagcgggaggcggcagcgaggaacccggtgggggccggagcaacaagcggagcgcggggaaccgggccgccaatgaagaggaaacgaaaaacaaacccaaattgaacattcaaataaaaactttggcagatgatgtgcgtgaccgaattacaagttttagaaaatctactgtcaaaaaagaaaaacctcttattcaacatcctattgattctcaagtcgcgatgagtgagtttcctgcagctcagccattatatgatgaacgatctttgaatttgtcagaaaaggaagtattggatctctttgaaaaaatgatggaggacatgaaccttaacgaagagaaaaaagctcctttacgaaacaaagactttaccaccaaacgtgagatggttgtccagtatatttctgccactgccaaatctgggtgggctgaaaaacagcaaacatgaatgcaccctgtcttcacaagaatatgttcatgaattacgatcgggtatatcagatgagaaacttcttaattgcctagaatccctcagggtttctttaaccagcaatccggtcagctgggttaacaactttggccatgaaggtcttggactcttattggatgagctggaaaagcttctggacaaaaaacagcaagaaaatattgacaagaagaatcagtataaacttattcaatgcctcaaagcatttatgaataataagtttggattacaaaggattctaggagatgaaagaagtcttttactattggcaagagcaattgaccccaaacaacccaacatgatgactgaaatagtaaaaatactttctgctatttgcattgttggagaagagaacattctagataaacttttaggggctataacaacagcagcagaaagaaataacagggaacgattttcaccaattgtggaaggtttagaaaatcaggaagccttgcaattacaggtggcctgcatgcagtttataaatgcccttgtcacttctccttatgagcttgattttcgaatacatttaaggaatgaattcctccgttcaggactaaaaacaatgttaccagatctaaaagaaaaagagaatgatgagcttgatattcagttgaaagtatttgatgaaaacaaagaagatgacctaactgaattatcacaccgtctcaatgacattcgagcagaaatggatgatatgaatgaagtctaccatcttctatataatatgctgaaggacactgctgctgaaaattacttcttatctattctacaacattttttgcttatcagaaatgattattatatcaggccacaatattataaaataattgaggaatgtgtttcacagatagtgctacactgcagtggtatggatccagacttcaaatacaggcaaagattagacatcgatttaactcatctgatagattcttgtgtgaacaaggcgaaagttgaagaaagtgaacaaaaagctgcagagttttcaaagaagttcgatgaagaattcacagctcgacaggaagctcaagcagagcttcaaaaaagagatgagaaaatcaaagaacttgaagcagaaatccagcaacttcgaacccaggcacaagtactctcaagttcatcaggaattccaggtcctcctgcagcacctccattgccaggtgtagggccgcctccaccaccacccgcgccacctctacccggaggagctcctcttcctcctccaccacctcctttacctggaatgatggggataccaccaccacccccaccaccacttttatttgggggacctcctccaccaccaccccttggaggagttcctcctcccccaggaatatcacttaatctaccttatggaatgaagcagaaaaaaatgtataaacctgaagtgtccatgaagagaatcaattggtcaaagattgaacccacagaattatctgagaactgtttctggttaagagtcaaagaagacaagtttgagaatccagatctctttgccaaattggcattgaattttgctactcagataaaagttcaaaagaacgcagaagcattagaagaaaagaagactgggcctacaaagaagaaagtgaaagaactgagaattttggatcccaaaacagctcagaatctgtccatctttctgggatcatatcgcatgccatatgaagacataagaaacgttattctggaggttaatgaagacatgctgagtgaggctttaattcagaaccttgtgaaacatcttcctgagcagaagatactcaacgaattagcagagcttaagaatgaatatgatgacctctgtgagcctgaacaatttggagttgtgatgagctctgtgaaaatgttacagcctcgtctcagtagtatcctgttcaagctcacatttgaagaacacataaacaacatcaaaccaagcatcatagcagtaactcttgcctgtgaagaactgaagaaaagtgaaagctttaacagacttttagagttagttcttcttgttggaaactacatgaactcaggctcaagaaatgcccagtctttgggatttaagatcaacttcctttgtaagatcagagatactaaatcagcggatcaaaaaacaacccttttgcattttattgccgacatttgtgaggaaaaatatcgagatatcctaaaatttcctgaagaactggaacacgtagaaagtgcaagcaaagtttcagctcaaattctcaagagcaaccttgcatcaatggaacaacaaattgttcatctggaacgtgacatcaagaaattcccccaagcagaaaatcaacacgataagtttgtggaaaagatgaccagctttacaaagactgcccgagaacagtatgaaaaactctccaccatgcacaacaacatgatgaagctctatgagaatcttggagaatacttcatttttgactcaaagacagtgagcatagaagagttctttggtgatctcaacaacttccgaactttgtttttggaagcagtgagagaaaacaataagagaagagaaatggaagagaagaccaggagggcaaaacttgcaaaagagaaagctgaacaagaaaagttagaacgccagaagaaaaagaaacaactcattgatataaacaaagagggtgatgagactggtgtgatggataatcttctagaagccctacaatcaggtgcagcattcagagaccgtcgaaagcggattccaaggaatccagataacagacgagtacctttggaaaggtcacgctctcgccacaatggagctatctcatctaagtgattcctgatgccaaagaatatgaaaatatttaagtaaaaacaaaatgatgcattttgagaagaacaaagtgtgcactcagcggctggaaaggaaataagtgcatttctgcaaagatcaagataagctggatgaagtagtgtgcatttgtaatactattgcaagactcctcccacaattattctaatctgaacacagttatcaggattacaaaatgtgttccattttagtgtaaagatgtgtatcatttgtaattgtgtgtgacctgactgtgatgatggaagtgtaagaaattgaagagttctaaggctttcaaaaacactcagtcaaaaatttaaaatcttaaatgtgtaagtcacccccaccaaaaacaaaagagaagaaaaagaatagaaagaattatccagtgtcagcttccaatccctagtacatacatatataatagaaaagggccaagaaaaatatgcatcttgatttggagagaggctaatattatgcacactgtaagagaagccattttggaaattcacgaaagtactgctccaccccagttgagttatttagaattttatctcaagtgaaagctgatggattcatctgctttggctgaaattaaacttatcattagtctagctagcatttcagcatgatattgcaagcacttctcattgctaaaaataaataaaccaaagtttaaccgaatcagttagggaaagtgatttaaactttatttaaagaggtattttctaattatgcacagatatctactttatacaaatactttatatggctatttttgagaaaaccctcacattttaatgtttatgctagggatgaacctggaaaattctattacgtttatttagatttcaaaggcaaatattgattcctatgctctgtggtttatttcttttttctattgcttctttctcccttgagtcccttgaaggcagggaaatagacttctagaaaacctgagaggaaaaagaattctttttacaggaggcagcagaaaactgtctgaaaggtcaattgttttatctccctttccactctctttccaatttcactttggtggtctgaagaagaaaaagaaattttatgtatgtatgtgtaaatatgtgtatatatttctatctcttgctacaataattccaactaagtgaacttcttctcaattatcatcatacttacttaccttatattaacaaattaagatgatgctgccaaaacaagtctagcagggaaaacaggttctacatttttcttaaataaattagggagtaaaagttatacttaacttgtctgtctattattttaaaatatgcattgaaataatgtggtataacttctctggagtgcaattttaagtctaattcatgcagatgattgattgtgattattgtaagaaatttcttacatgtatatttcttatgttagaaaatactgtttctactcattcaaagcacattgtagatattcagagagaagaacaaatggctggcttggcaaatccccatctgagataaagtaaacaagtgaccagcagcccacagataattcctttatatagatgtataatgattcaaactgctgcctttgcctccagtgcatccttacttaggtattatacttctttaaaaagctctgaagctgctacaatagaaaaatcaaaaagggtaacagtatctgaaatttcacagtcctatccgatctgaaaacacacatacacaaatgcacacacatgcacacacacatttcagggacatagcagtaacactgttttttaacaacaacaaaagtttaggttctaatttatgtaaatacctagtatgtgtatttttgactttacaaagtctttcttttctgaaatcttcgtggtatggcttttttaattcttttgacagcttatcagtctgtaggagaatgatcttgaaatgttaaccctgactaaaatttgggagcatatgccttgctatattatcaagctggtcaaggtagaaatactgatatgtatcatcaccttttccagatacaaacttgccttattttctagtttgtgaacaagaacgaatgaagtactattattgataacttacttatatatttttatttagagcaatcccacatgcttttcacaaacattaaaaaaaaaaacctttcagggtctttcatgaagttccaatagttgagtgagttaaaaggtttgtttcccagatttgtaatggtcctgctctagccatttgcagttttgttttagatgattggaaagtatatcaccaaaaaaagtatatagtgacatttttagtatgaaaccaaattacactaaggtcttttgttggccatattactgccacacatgagaagcaccatttatgcagattttcttcagaatatttttaaaaggtacagaatccttaaaatattaacaactaattgcatccattatctcctttggctgctgtaacaaattaccaccaataatatgatggcttaacacaacagaaacttatttgcttacatttttgaagggcagcaaagccatggctccctccagaggctctagaggagaatctttccttgccacgtccaccttttggtggctattggcattttttggcttatggccacatttctctttctgctgtgtcttcacatcaccctcctctgtatacctaatctgcctctgcctctgtttaataaggatccttatgatgacttttagggactacccagattactccaggataatctcctcacctcatgagtcttaacttaattacatctgcaaggcccccttctccaaataagataaattcatggttttggggattaggatgtggctatgtcttttaggaagccactcttagcccaccagagtctgccctttggcccaaaatttatgtctgtctcatgtgtaaaagacattcatcccatcctaacattaccaaaagtctcaacccattatatcaatcctaagtccaaaatttcattcaaatatcatcggttcaaaagttccaaagcttatcatttagatcatctaaatcaggtatgagtgaaactctgggtatggtctttcctgaggccaaatcctcttcctctgagaaccagtgaaacagaaaagttaatctgctttcaaattacaatggtgggaacaggcataggataacagttacagacatttctgtctcaaaaaggagagaatggaaattggaatggagtctcctgtcccaatcattttcaaaatctagccaggcaaatttctgttctatttcaaggcctggcagtaatcctctttctcagggctccaccctttgggcctgtagctcttctttcttggactatggattgggcctctgcctctgtgcctatgggttgcacttcttcctctgttcccacacttgggcctctgcctctgtacctgcagctctgctctcgggatggtgcttcctttatcttgaagggtggcacatgtttgcagctgagaagttttatcaacgggtttcctacctgtagaattctggcagtctcacaatcttctttcatttttttctgtctctgtcccttttaggcccagttggaagtgtttctgatggtagaacattctcaaaaatcttgtgggtcttctacgtatgtcacattgattcacacattcagaaaagagggtcctcacagatttttcctgaacaaccccatctctattcttggcttctgttgaaacagtcaaataaatccacaagttaatgcctaacctcttcagcactagccaaaggttgtcaagacacacccttgggcttatctacagagcacacttttctaacagtgaatctcctaattttagcatctttttttttttttttacaatcattcagattgtgaattcnaggctcagaattacccagtcatcagatactgattccttttgtccacttatatagttattttctctttaaaaaaaaattttttttaatgtattagagatgaggtctcactctgtcacccaggctgcagtgtagtggtgcaaacatagctccctgtaacctcaaactcccaggctcaagggatcctcctgcatcagccttccaagtagctgggtctacaggtgcataccaccatgcctggctaattttttgcatttttttgtagagacttgatcttgctatgttgtccaggctgctctcgaactcctagcctcaagcaatccacccatcttggcctcctaaagtgccggattacaggtgtaagccaccatgcccagcctgttttgtcaatgtatctgttttctgtcttattttactataagcactaagaagaaactaagctatatctctaacactagacttgaaaatttcctcagctaaacatccaagttcatcatttattcaacttttcacactactgtagtagacaatttagatagataaactttttgccactatatgacaaggattccctttcttccattttccaataaaatcttcatttccttctaaaccatcactagaaatgcctttaacattcatactactaccatctggtaaaggcaatctagttttttctatcacatccaccaaaattcttctagtctctacccattatccaattccaaagcctttttcacattttaagacatttgttacagaagtacccaatccgtcccagttccacaatctgcattagattcccatggctgctgtaacaaattaccctctagcccagtggcttaaaacaatagaaatttattatcttgttgttttggaggccaaaagtccaaaattgaggggttggcagggctgaacgtcttctggagactctaagggaaacactcttcccgtgtcttccagtttcttgtggctgccatcattccttggtttgtgactgcatctccctctcctctgtcttcacatcacttcccctctgtatatataatctacctctgcctctctcttataaggacacttgtgacgggacttagggcccatccagattacccatgataattcccttattccaagattcttaattatatctgaaaggaccttttttccaaataaggtactatcacaggttccagggagtaggatattgaatatcttttttggggagggggcaccatgcagctcactacactattcattgcacacaaatgaatttttcactttttaagatgcattcttggtgctcaaaccagatcgaagtttgtctctaaaagctattgtctgcacaggctgctgcatgctctgttgttaaatggatggacaggctattctaaattttggttgatacttttgctactatgggcaattaacttgaaaaaaataatcgatcccaactctgtgctctgatgtacctcttctgccccttttatgacacctttgaccaaatgccttctatggttcacagtgcaggcacaaaactacctctgatacagaagggttctttacaagcttattttacataccgtgaatccctcacctaaagggagaggtgaaagcaaagactgctttgaatgggtattgagggagattgtgtccataccaagccaccctgaagaagtatttcacttgcagtagaactgtggatttgtgctgtcatttcaccttggaataaacacctatctctaagcaggaccaagaatgacttgcaatctatatgtaatggctacttacttattcaataaagttaagatatacgttaaaaaaaaagct

SEQ ID NO: 370721 - DNA, 3741 bp, Homo sapiens
gcggggcactttgaagaatcacgtgtgttgaggccctcttaaagagataggcacctacttttccctccaccctaaacaccgccctgagggcggcggcgaccgtggtaattgcaactgctcaggggcagggcttgccccagcgccgagtagtggcaacggcgtggttgcgtcgggggtgcctgggagcctggagtcccgggggcctgaaatcggcagcttcccgggcagacactctctccctcaggaagaggtgccgccgagtcagcgcggggcagtgtgagcgccccgaggtgctttctcagttgaggagaggtggggttacagggcacaggtgacagggccggagaaagatggagcagcccggggcggcggcgtcgggagcgggaggcggcagcgaggaacccggtgggggccggagcaacaagcggagcgcggggaaccgggccgccaatgaagaggaaacgaaaaacaaacccaaattgaacattcaaataaaaactttggcagatgatgtgcgtgaccgaattacaagttttagaaaatctactgtcaaaaaagaaaaacctcttattcaacatcctattgattctcaagtcgcgatgagtgagtttcctgcagctcagccattatatgatgaacgatctttgaatttgtcagaaaaggaagtattggatctctttgaaaaaatgatggaggacatgaaccttaacgaagagaaaaaagctcctttacgaaacaaagactttaccaccaaacgtgagatggttgtccagtatatttctgccactgccaaatctgggtgggctgaaaaacagcaaacatgaatgcaccctgtcttcacaagaatatgttcatgaattacgatcgggtatatcagatgagaaacttcttaattgcctagaatccctcagggtttctttaaccagcaatccggtcagctgggttaacaactttggccatgaaggtcttggactcttattggatgagctggaaaagcttctggacaaaaaacagcaagaaaatattgacaagaagaatcagtataaacttattcaatgcctcaaagcatttatgaataataagtttggattacaaaggattctaggagatgaaagaagtcttttactattggcaagagcaattgaccccaaacaacccaacatgatgactgaaatagtaaaaatactttctgctatttgcattgttggagaagagaacattctagataaacttttaggggctataacaacagcagcagaaagaaataacagggaacgattttcaccaattgtggaaggtttagaaaatcaggaagccttgcaattacaggtggcctgcatgcagtttataaatgcccttgtcacttctccttatgagcttgattttcgaatacatttaaggaatgaattcctccgttcaggactaaaaacaatgttaccagatctaaaagaaaaagagaatgatgagcttgatattcagttgaaagtatttgatgaaaacaaagaagatgacctaactgaattatcacaccgtctcaatgacattcgagcagaaatggatgatatgaatgaagtctaccatcttctatataatatgctgaaggacactgctgctgaaaattacttcttatctattctacaacattttttgcttatcagaaatgattattatatcaggccacaatattataaaataattgaggaatgtgtttcacagatagtgctacactgcagtggtatggatccagacttcaaatacaggcaaagattagacatcgatttaactcatctgatagattcttgtgtgaacaaggcgaaagttgaagaaagtgaacaaaaagctgcagagttttcaaagaagttcgatgaagaattcacagctcgacaggaagctcaagcagagcttcaaaaaagagatgagaaaatcaaagaacttgaagcagaaatccagcaacttcgaacccaggcacaagtactctcaagttcatcaggaattccaggtcctcctgcagcacctccattgccaggtgtagggccgcctccaccaccacccgcgccacctctacccggaggagctcctcttcctcctccaccacctcctttacctggaatgatggggataccaccaccacccccaccaccacttttatttgggggacctcctccaccaccaccccttggaggagttcctcctcccccaggaatatcacttaatctaccttatggaatgaagcagaaaaaaatgtataaacctgaagtgtccatgaagagaatcaattggtcaaagattgaacccacagaattatctgagaactgtttctggttaagagtcaaagaagacaagtttgagaatccagatctctttgccaaattggcattgaattttgctactcagataaaagttcaaaagaacgcagaagcattagaagaaaagaagactgggcctacaaagaagaaagtgaaagaactgagaattttggatcccaaaacagctcagaatctgtccatctttctgggatcatatcgcatgccatatgaagacataagaaacgttattctggaggttaatgaagacatgctgagtgaggctttaattcagaaccttgtgaaacatcttcctgagcagaagatactcaacgaattagcagagcttaagaatgaatatgatgacctctgtgagcctgaacaatttggagttgtgatgagctctgtgaaaatgttacagcctcgtctcagtagtatcctgttcaagctcacatttgaagaacacataaacaacatcaaaccaagcatcatagcagtaactcttgcctgtgaagaactgaagaaaagtgaaagctttaacagacttttagagttagttcttcttgttggaaactacatgaactcaggctcaagaaatgcccagtctttgggatttaagatcaacttcctttgtaagatcagagatactaaatcagcggatcaaaaaacaacccttttgcattttattgccgacatttgtgaggaaaaatatcgagatatcctaaaatttcctgaagaactggaacacgtagaaagtgcaagcaaagtttcagctcaaattctcaagagcaaccttgcatcaatggaacaacaaattgttcatctggaacgtgacatcaagaaattcccccaagcagaaaatcaacacgataagtttgtggaaaagatgaccagctttacaaagactgcccgagaacagtatgaaaaactctccaccatgcacaacaacatgatgaagctctatgagaatcttggagaatacttcatttttgactcaaagacagtgagcatagaagagttctttggtgatctcaacaacttccgaactttgtttttggaagcagtgagagaaaacaataagagaagagaaatggaagagaagaccaggagggcaaaacttgcaaaagagaaagctgaacaagaaaagttagaacgccagaagaaaaagaaacaactcattgatataaacaaagagggtgatgagactggtgtgatggataatcttctagaagccctacaatcaggtgcagcattcagagaccgtcgaaagcggattccaaggaatccagtggtaaatcatccctgtgcaacaagggctaatccaagatcagctacataaacggcctgagtgctgttttaaacaggattgggtgatggtacaacatgactttttaagataatcaagtagtaaaagtttctagtggaaacatgaaaaaca

SEQ ID NO: 370722 - DNA, 970 bp, Homo sapiens
gcggggcactttgaagaatcacgtgtgttgaggccctcttaaagagataggcacctacttttccctccaccctaaacaccgccctgagggcggcggcgaccgtggtaattgcaactgctcaggggcagggcttgccccagcgccgagtagtggcaacggcgtggttgcgtcgggggtgcctgggagcctggagtcccgggggcctgaaatcggcagcttcccgggcagacactctctccctcaggaagaggtgccgccgagtcagcgcggggcagtgtgagcgccccgaggtgctttctcagttgaggagaggtggggttacagggcacaggtgacagggccggagaaagatggagcagcccggggcggcggcgtcgggagcgggaggcggcagcgaggaacccggtgggggccggagcaacaagcggagcgcggggaaccgggccgccaatgaagaggaaacgaaaaacaaacccaaattgcgtgaccgaattacaagttttagaaaatctactgtcaaaaaagaaaaaaaaaaaaaaacaaaaaaacactgggtgggcgaccctgggccctcagaagaagtttcctaaacccatctgcgttgaggggcgcggggcgccaatggggtaggagcaccgtgggcagaaggtggtccacagagaacccggggcgccatgaaaaagggcggagggagatccccacgcaaatataaaacaacacggcccgggggaaacacagaagctttctggacacaatgcaggaatgggggagacccgagggagggcacaaaagggaggggacaccctacacacggggaggggctcacaaaagagggaacgtcccagcatatccaaattgaaggccggacgtcgggggaggggagaaagagaaagcgacgcaagcacccgacgagcaacaatcgagacagagaccaagaggcgagcacgagatcgtaggagtcacagccacg

SEQ ID NO: 370723 - DNA, 9380 bp, Homo sapiens
  misc_feature (7556)..(7556): n is a, c, g, or t
gcggggcactttgaagaatcacgtgtgttgaggccctcttaaagagataggcacctacttttccctccaccctaaacaccgccctgagggcggcggcgaccgtggtaattgcaactgctcaggggcagggcttgccccagcgccgagtagtggcaacggcgtggttgcgtcgggggtgcctgggagcctggagtcccgggggcctgaaatcggcagcttcccgggcagacactctctccctcaggaagaggtgccgccgagtcagcgcggggcagtgtgagcgccccgaggtgctttctcagttgaggagaggtggggttacagggcacaggtgacagggccggagaaagatggagcagcccggggcggcggcgtcgggagcgggaggcggcagcgaggaacccggtgggggccggagcaacaagcggagcgcggggaaccgggccgccaatgaagaggaaacgaaaaacaaacccaaattgaacattcaaataaaaactttggcagatgatgtgcgtgaccgaattacaagttttagaaaatctactgtcaaaaaagaaaaacctcttattcaacatcctattgattctcaagtcgcgatgagtgagtttcctgcagctcagccattatatgatgaacgatctttgaatttgtcagaaaaggaagtattggatctctttgaaaaaatgatggaggacatgaaccttaacgaagagaaaaaagctcctttacgaaacaaagactttaccaccaaacgtgagatggttgtccagtatatttctgccactgccaaatctatagttggaagtaaagttgggtgggctgaaaaacagcaaacatgaatgcaccctgtcttcacaagaatatgttcatgaattacgatcgggtatatcagatgagaaacttcttaattgcctagaatccctcagggtttctttaaccagcaatccggtcagctgggttaacaactttggccatgaaggtcttggactcttattggatgagctggaaaagcttctggacaaaaaacagcaagaaaatattgacaagaagaatcagtataaacttattcaatgcctcaaagcatttatgaataataagtttggattacaaaggattctaggagatgaaagaagtcttttactattggcaagagcaattgaccccaaacaacccaacatgatgactgaaatagtaaaaatactttctgctatttgcattgttggagaagagaacattctagataaacttttaggggctataacaacagcagcagaaagaaataacagggaacgattttcaccaattgtggaaggtttagaaaatcaggaagccttgcaattacaggtggcctgcatgcagtttataaatgcccttgtcacttctccttatgagcttgattttcgaatacatttaaggaatgaattcctccgttcaggactaaaaacaatgttaccagatctaaaagaaaaagagaatgatgagcttgatattcagttgaaagtatttgatgaaaacaaagaagatgacctaactgaattatcacaccgtctcaatgacattcgagcagaaatggatgatatgaatgaagtctaccatcttctatataatatgctgaaggacactgctgctgaaaattacttcttatctattctacaacattttttgcttatcagaaatgattattatatcaggccacaatattataaaataattgaggaatgtgtttcacagatagtgctacactgcagtggtatggatccagacttcaaatacaggcaaagattagacatcgatttaactcatctgatagattcttgtgtgaacaaggcgaaagttgaagaaagtgaacaaaaagctgcagagttttcaaagaagttcgatgaagaattcacagctcgacaggaagctcaagcagagcttcaaaaaagagatgagaaaatcaaagaacttgaagcagaaatccagcaacttcgaacccaggcacaagtactctcaagttcatcaggaattccaggtcctcctgcagcacctccattgccaggtgtagggccgcctccaccaccacccgcgccacctctacccggaggagctcctcttcctcctccaccacctcctttacctggaatgatggggataccaccaccacccccaccaccacttttatttgggggacctcctccaccaccaccccttggaggagttcctcctcccccaggaatatcacttaatctaccttatggaatgaagcagaaaaaaatgtataaacctgaagtgtccatgaagagaatcaattggtcaaagattgaacccacagaattatctgagaactgtttctggttaagagtcaaagaagacaagtttgagaatccagatctctttgccaaattggcattgaattttgctactcagataaaagttcaaaagaacgcagaagcattagaagaaaagaagactgggcctacaaagaagaaagtgaaagaactgagaattttggatcccaaaacagctcagaatctgtccatctttctgggatcatatcgcatgccatatgaagacataagaaacgttattctggaggttaatgaagacatgctgagtgaggctttaattcagaaccttgtgaaacatcttcctgagcagaagatactcaacgaattagcagagcttaagaatgaatatgatgacctctgtgagcctgaacaatttggagttgtgatgagctctgtgaaaatgttacagcctcgtctcagtagtatcctgttcaagctcacatttgaagaacacataaacaacatcaaaccaagcatcatagcagtaactcttgcctgtgaagaactgaagaaaagtgaaagctttaacagacttttagagttagttcttcttgttggaaactacatgaactcaggctcaagaaatgcccagtctttgggatttaagatcaacttcctttgtaagatcagagatactaaatcagcggatcaaaaaacaacccttttgcattttattgccgacatttgtgaggaaaaatatcgagatatcctaaaatttcctgaagaactggaacacgtagaaagtgcaagcaaagtttcagctcaaattctcaagagcaaccttgcatcaatggaacaacaaattgttcatctggaacgtgacatcaagaaattcccccaagcagaaaatcaacacgataagtttgtggaaaagatgaccagctttacaaagactgcccgagaacagtatgaaaaactctccaccatgcacaacaacatgatgaagctctatgagaatcttggagaatacttcatttttgactcaaagacagtgagcatagaagagttctttggtgatctcaacaacttccgaactttgtttttggaagcagtgagagaaaacaataagagaagagaaatggaagagaagaccaggagggcaaaacttgcaaaagagaaagctgaacaagaaaagttagaacgccagaagaaaaagaaacaactcattgatataaacaaagagggtgatgagactggtgtgatggataatcttctagaagccctacaatcaggtgcagcattcagagaccgtcgaaagcggattccaaggaatccagataacagacgagtacctttggaaaggtcacgctctcgccacaatggagctatctcatctaagtgattcctgatgccaaagaatatgaaaatatttaagtaaaaacaaaatgatgcattttgagaagaacaaagtgtgcactcagcggctggaaaggaaataagtgcatttctgcaaagatcaagataagctggatgaagtagtgtgcatttgtaatactattgcaagactcctcccacaattattctaatctgaacacagttatcaggattacaaaatgtgttccattttagtgtaaagatgtgtatcatttgtaattgtgtgtgacctgactgtgatgatggaagtgtaagaaattgaagagttctaaggctttcaaaaacactcagtcaaaaatttaaaatcttaaatgtgtaagtcacccccaccaaaaacaaaagagaagaaaaagaatagaaagaattatccagtgtcagcttccaatccctagtacatacatatataatagaaaagggccaagaaaaatatgcatcttgatttggagagaggctaatattatgcacactgtaagagaagccattttggaaattcacgaaagtactgctccaccccagttgagttatttagaattttatctcaagtgaaagctgatggattcatctgctttggctgaaattaaacttatcattagtctagctagcatttcagcatgatattgcaagcacttctcattgctaaaaataaataaaccaaagtttaaccgaatcagttagggaaagtgatttaaactttatttaaagaggtattttctaattatgcacagatatctactttatacaaatactttatatggctatttttgagaaaaccctcacattttaatgtttatgctagggatgaacctggaaaattctattacgtttatttagatttcaaaggcaaatattgattcctatgctctgtggtttatttcttttttctattgcttctttctcccttgagtcccttgaaggcagggaaatagacttctagaaaacctgagaggaaaaagaattctttttacaggaggcagcagaaaactgtctgaaaggtcaattgttttatctccctttccactctctttccaatttcactttggtggtctgaagaagaaaaagaaattttatgtatgtatgtgtaaatatgtgtatatatttctatctcttgctacaataattccaactaagtgaacttcttctcaattatcatcatacttacttaccttatattaacaaattaagatgatgctgccaaaacaagtctagcagggaaaacaggttctacatttttcttaaataaattagggagtaaaagttatacttaacttgtctgtctattattttaaaatatgcattgaaataatgtggtataacttctctggagtgcaattttaagtctaattcatgcagatgattgattgtgattattgtaagaaatttcttacatgtatatttcttatgttagaaaatactgtttctactcattcaaagcacattgtagatattcagagagaagaacaaatggctggcttggcaaatccccatctgagataaagtaaacaagtgaccagcagcccacagataattcctttatatagatgtataatgattcaaactgctgcctttgcctccagtgcatccttacttaggtattatacttctttaaaaagctctgaagctgctacaatagaaaaatcaaaaagggtaacagtatctgaaatttcacagtcctatccgatctgaaaacacacatacacaaatgcacacacatgcacacacacatttcagggacatagcagtaacactgttttttaacaacaacaaaagtttaggttctaatttatgtaaatacctagtatgtgtatttttgactttacaaagtctttcttttctgaaatcttcgtggtatggcttttttaattcttttgacagcttatcagtctgtaggagaatgatcttgaaatgttaaccctgactaaaatttgggagcatatgccttgctatattatcaagctggtcaaggtagaaatactgatatgtatcatcaccttttccagatacaaacttgccttattttctagtttgtgaacaagaacgaatgaagtactattattgataacttacttatatatttttatttagagcaatcccacatgcttttcacaaacattaaaaaaaaaaacctttcagggtctttcatgaagttccaatagttgagtgagttaaaaggtttgtttcccagatttgtaatggtcctgctctagccatttgcagttttgttttagatgattggaaagtatatcaccaaaaaaagtatatagtgacatttttagtatgaaaccaaattacactaaggtcttttgttggccatattactgccacacatgagaagcaccatttatgcagattttcttcagaatatttttaaaaggtacagaatccttaaaatattaacaactaattgcatccattatctcctttggctgctgtaacaaattaccaccaataatatgatggcttaacacaacagaaacttatttgcttacatttttgaagggcagcaaagccatggctccctccagaggctctagaggagaatctttccttgccacgtccaccttttggtggctattggcattttttggcttatggccacatttctctttctgctgtgtcttcacatcaccctcctctgtatacctaatctgcctctgcctctgtttaataaggatccttatgatgacttttagggactacccagattactccaggataatctcctcacctcatgagtcttaacttaattacatctgcaaggcccccttctccaaataagataaattcatggttttggggattaggatgtggctatgtcttttaggaagccactcttagcccaccagagtctgccctttggcccaaaatttatgtctgtctcatgtgtaaaagacattcatcccatcctaacattaccaaaagtctcaacccattatatcaatcctaagtccaaaatttcattcaaatatcatcggttcaaaagttccaaagcttatcatttagatcatctaaatcaggtatgagtgaaactctgggtatggtctttcctgaggccaaatcctcttcctctgagaaccagtgaaacagaaaagttaatctgctttcaaattacaatggtgggaacaggcataggataacagttacagacatttctgtctcaaaaaggagagaatggaaattggaatggagtctcctgtcccaatcattttcaaaatctagccaggcaaatttctgttctatttcaaggcctggcagtaatcctctttctcagggctccaccctttgggcctgtagctcttctttcttggactatggattgggcctctgcctctgtgcctatgggttgcacttcttcctctgttcccacacttgggcctctgcctctgtacctgcagctctgctctcgggatggtgcttcctttatcttgaagggtggcacatgtttgcagctgagaagttttatcaacgggtttcctacctgtagaattctggcagtctcacaatcttctttcatttttttctgtctctgtcccttttaggcccagttggaagtgtttctgatggtagaacattctcaaaaatcttgtgggtcttctacgtatgtcacattgattcacacattcagaaaagagggtcctcacagatttttcctgaacaaccccatctctattcttggcttctgttgaaacagtcaaataaatccacaagttaatgcctaacctcttcagcactagccaaaggttgtcaagacacacccttgggcttatctacagagcacacttttctaacagtgaatctcctaattttagcatctttttttttttttttacaatcattcagattgtgaattcnaggctcagaattacccagtcatcagatactgattccttttgtccacttatatagttattttctctttaaaaaaaaattttttttaatgtattagagatgaggtctcactctgtcacccaggctgcagtgtagtggtgcaaacatagctccctgtaacctcaaactcccaggctcaagggatcctcctgcatcagccttccaagtagctgggtctacaggtgcataccaccatgcctggctaattttttgcatttttttgtagagacttgatcttgctatgttgtccaggctgctctcgaactcctagcctcaagcaatccacccatcttggcctcctaaagtgccggattacaggtgtaagccaccatgcccagcctgttttgtcaatgtatctgttttctgtcttattttactataagcactaagaagaaactaagctatatctctaacactagacttgaaaatttcctcagctaaacatccaagttcatcatttattcaacttttcacactactgtagtagacaatttagatagataaactttttgccactatatgacaaggattccctttcttccattttccaataaaatcttcatttccttctaaaccatcactagaaatgcctttaacattcatactactaccatctggtaaaggcaatctagttttttctatcacatccaccaaaattcttctagtctctacccattatccaattccaaagcctttttcacattttaagacatttgttacagaagtacccaatccgtcccagttccacaatctgcattagattcccatggctgctgtaacaaattaccctctagcccagtggcttaaaacaatagaaatttattatcttgttgttttggaggccaaaagtccaaaattgaggggttggcagggctgaacgtcttctggagactctaagggaaacactcttcccgtgtcttccagtttcttgtggctgccatcattccttggtttgtgactgcatctccctctcctctgtcttcacatcacttcccctctgtatatataatctacctctgcctctctcttataaggacacttgtgacgggacttagggcccatccagattacccatgataattcccttattccaagattcttaattatatctgaaaggaccttttttccaaataaggtactatcacaggttccagggagtaggatattgaatatcttttttggggagggggcaccatgcagctcactacactattcattgcacacaaatgaatttttcactttttaagatgcattcttggtgctcaaaccagatcgaagtttgtctctaaaagctattgtctgcacaggctgctgcatgctctgttgttaaatggatggacaggctattctaaattttggttgatacttttgctactatgggcaattaacttgaaaaaaataatcgatcccaactctgtgctctgatgtacctcttctgccccttttatgacacctttgaccaaatgccttctatggttcacagtgcaggcacaaaactacctctgatacagaagggttctttacaagcttattttacataccgtgaatccctcacctaaagggagaggtgaaagcaaagactgctttgaatgggtattgagggagattgtgtccataccaagccaccctgaagaagtatttcacttgcagtagaactgtggatttgtgctgtcatttcaccttggaataaacacctatctctaagcaggaccaagaatgacttgcaatctatatgtaatggctacttacttattcaataaagttaagatatacgttaaaaaaaaagct

SEQ ID NO: 370724 - DNA, 9347 bp, Homo sapiens
  misc_feature (7523)..(7523): n is a, c, g, or t
gcggggcactttgaagaatcacgtgtgttgaggccctcttaaagagataggcacctacttttccctccaccctaaacaccgccctgagggcggcggcgaccgtggtaattgcaactgctcaggggcagggcttgccccagcgccgagtagtggcaacggcgtggttgcgtcgggggtgcctgggagcctggagtcccgggggcctgaaatcggcagcttcccgggcagacactctctccctcaggaagaggtgccgccgagtcagcgcggggcagtgtgagcgccccgaggtgctttctcagttgaggagaggtggggttacagggcacaggtgacagggccggagaaagatggagcagcccggggcggcggcgtcgggagcgggaggcggcagcgaggaacccggtgggggccggagcaacaagcggagcgcggggaaccgggccgccaatgaagaggaaacgaaaaacaaacccaaattgcgtgaccgaattacaagttttagaaaatctactgtcaaaaaagaaaaacctcttattcaacatcctattgattctcaagtcgcgatgagtgagtttcctgcagctcagccattatatgatgaacgatctttgaatttgtcagaaaaggaagtattggatctctttgaaaaaatgatggaggacatgaaccttaacgaagagaaaaaagctcctttacgaaacaaagactttaccaccaaacgtgagatggttgtccagtatatttctgccactgccaaatctatagttggaagtaaagttgggtgggctgaaaaacagcaaacatgaatgcaccctgtcttcacaagaatatgttcatgaattacgatcgggtatatcagatgagaaacttcttaattgcctagaatccctcagggtttctttaaccagcaatccggtcagctgggttaacaactttggccatgaaggtcttggactcttattggatgagctggaaaagcttctggacaaaaaacagcaagaaaatattgacaagaagaatcagtataaacttattcaatgcctcaaagcatttatgaataataagtttggattacaaaggattctaggagatgaaagaagtcttttactattggcaagagcaattgaccccaaacaacccaacatgatgactgaaatagtaaaaatactttctgctatttgcattgttggagaagagaacattctagataaacttttaggggctataacaacagcagcagaaagaaataacagggaacgattttcaccaattgtggaaggtttagaaaatcaggaagccttgcaattacaggtggcctgcatgcagtttataaatgcccttgtcacttctccttatgagcttgattttcgaatacatttaaggaatgaattcctccgttcaggactaaaaacaatgttaccagatctaaaagaaaaagagaatgatgagcttgatattcagttgaaagtatttgatgaaaacaaagaagatgacctaactgaattatcacaccgtctcaatgacattcgagcagaaatggatgatatgaatgaagtctaccatcttctatataatatgctgaaggacactgctgctgaaaattacttcttatctattctacaacattttttgcttatcagaaatgattattatatcaggccacaatattataaaataattgaggaatgtgtttcacagatagtgctacactgcagtggtatggatccagacttcaaatacaggcaaagattagacatcgatttaactcatctgatagattcttgtgtgaacaaggcgaaagttgaagaaagtgaacaaaaagctgcagagttttcaaagaagttcgatgaagaattcacagctcgacaggaagctcaagcagagcttcaaaaaagagatgagaaaatcaaagaacttgaagcagaaatccagcaacttcgaacccaggcacaagtactctcaagttcatcaggaattccaggtcctcctgcagcacctccattgccaggtgtagggccgcctccaccaccacccgcgccacctctacccggaggagctcctcttcctcctccaccacctcctttacctggaatgatggggataccaccaccacccccaccaccacttttatttgggggacctcctccaccaccaccccttggaggagttcctcctcccccaggaatatcacttaatctaccttatggaatgaagcagaaaaaaatgtataaacctgaagtgtccatgaagagaatcaattggtcaaagattgaacccacagaattatctgagaactgtttctggttaagagtcaaagaagacaagtttgagaatccagatctctttgccaaattggcattgaattttgctactcagataaaagttcaaaagaacgcagaagcattagaagaaaagaagactgggcctacaaagaagaaagtgaaagaactgagaattttggatcccaaaacagctcagaatctgtccatctttctgggatcatatcgcatgccatatgaagacataagaaacgttattctggaggttaatgaagacatgctgagtgaggctttaattcagaaccttgtgaaacatcttcctgagcagaagatactcaacgaattagcagagcttaagaatgaatatgatgacctctgtgagcctgaacaatttggagttgtgatgagctctgtgaaaatgttacagcctcgtctcagtagtatcctgttcaagctcacatttgaagaacacataaacaacatcaaaccaagcatcatagcagtaactcttgcctgtgaagaactgaagaaaagtgaaagctttaacagacttttagagttagttcttcttgttggaaactacatgaactcaggctcaagaaatgcccagtctttgggatttaagatcaacttcctttgtaagatcagagatactaaatcagcggatcaaaaaacaacccttttgcattttattgccgacatttgtgaggaaaaatatcgagatatcctaaaatttcctgaagaactggaacacgtagaaagtgcaagcaaagtttcagctcaaattctcaagagcaaccttgcatcaatggaacaacaaattgttcatctggaacgtgacatcaagaaattcccccaagcagaaaatcaacacgataagtttgtggaaaagatgaccagctttacaaagactgcccgagaacagtatgaaaaactctccaccatgcacaacaacatgatgaagctctatgagaatcttggagaatacttcatttttgactcaaagacagtgagcatagaagagttctttggtgatctcaacaacttccgaactttgtttttggaagcagtgagagaaaacaataagagaagagaaatggaagagaagaccaggagggcaaaacttgcaaaagagaaagctgaacaagaaaagttagaacgccagaagaaaaagaaacaactcattgatataaacaaagagggtgatgagactggtgtgatggataatcttctagaagccctacaatcaggtgcagcattcagagaccgtcgaaagcggattccaaggaatccagataacagacgagtacctttggaaaggtcacgctctcgccacaatggagctatctcatctaagtgattcctgatgccaaagaatatgaaaatatttaagtaaaaacaaaatgatgcattttgagaagaacaaagtgtgcactcagcggctggaaaggaaataagtgcatttctgcaaagatcaagataagctggatgaagtagtgtgcatttgtaatactattgcaagactcctcccacaattattctaatctgaacacagttatcaggattacaaaatgtgttccattttagtgtaaagatgtgtatcatttgtaattgtgtgtgacctgactgtgatgatggaagtgtaagaaattgaagagttctaaggctttcaaaaacactcagtcaaaaatttaaaatcttaaatgtgtaagtcacccccaccaaaaacaaaagagaagaaaaagaatagaaagaattatccagtgtcagcttccaatccctagtacatacatatataatagaaaagggccaagaaaaatatgcatcttgatttggagagaggctaatattatgcacactgtaagagaagccattttggaaattcacgaaagtactgctccaccccagttgagttatttagaattttatctcaagtgaaagctgatggattcatctgctttggctgaaattaaacttatcattagtctagctagcatttcagcatgatattgcaagcacttctcattgctaaaaataaataaaccaaagtttaaccgaatcagttagggaaagtgatttaaactttatttaaagaggtattttctaattatgcacagatatctactttatacaaatactttatatggctatttttgagaaaaccctcacattttaatgtttatgctagggatgaacctggaaaattctattacgtttatttagatttcaaaggcaaatattgattcctatgctctgtggtttatttcttttttctattgcttctttctcccttgagtcccttgaaggcagggaaatagacttctagaaaacctgagaggaaaaagaattctttttacaggaggcagcagaaaactgtctgaaaggtcaattgttttatctccctttccactctctttccaatttcactttggtggtctgaagaagaaaaagaaattttatgtatgtatgtgtaaatatgtgtatatatttctatctcttgctacaataattccaactaagtgaacttcttctcaattatcatcatacttacttaccttatattaacaaattaagatgatgctgccaaaacaagtctagcagggaaaacaggttctacatttttcttaaataaattagggagtaaaagttatacttaacttgtctgtctattattttaaaatatgcattgaaataatgtggtataacttctctggagtgcaattttaagtctaattcatgcagatgattgattgtgattattgtaagaaatttcttacatgtatatttcttatgttagaaaatactgtttctactcattcaaagcacattgtagatattcagagagaagaacaaatggctggcttggcaaatccccatctgagataaagtaaacaagtgaccagcagcccacagataattcctttatatagatgtataatgattcaaactgctgcctttgcctccagtgcatccttacttaggtattatacttctttaaaaagctctgaagctgctacaatagaaaaatcaaaaagggtaacagtatctgaaatttcacagtcctatccgatctgaaaacacacatacacaaatgcacacacatgcacacacacatttcagggacatagcagtaacactgttttttaacaacaacaaaagtttaggttctaatttatgtaaatacctagtatgtgtatttttgactttacaaagtctttcttttctgaaatcttcgtggtatggcttttttaattcttttgacagcttatcagtctgtaggagaatgatcttgaaatgttaaccctgactaaaatttgggagcatatgccttgctatattatcaagctggtcaaggtagaaatactgatatgtatcatcaccttttccagatacaaacttgccttattttctagtttgtgaacaagaacgaatgaagtactattattgataacttacttatatatttttatttagagcaatcccacatgcttttcacaaacattaaaaaaaaaaacctttcagggtctttcatgaagttccaatagttgagtgagttaaaaggtttgtttcccagatttgtaatggtcctgctctagccatttgcagttttgttttagatgattggaaagtatatcaccaaaaaaagtatatagtgacatttttagtatgaaaccaaattacactaaggtcttttgttggccatattactgccacacatgagaagcaccatttatgcagattttcttcagaatatttttaaaaggtacagaatccttaaaatattaacaactaattgcatccattatctcctttggctgctgtaacaaattaccaccaataatatgatggcttaacacaacagaaacttatttgcttacatttttgaagggcagcaaagccatggctccctccagaggctctagaggagaatctttccttgccacgtccaccttttggtggctattggcattttttggcttatggccacatttctctttctgctgtgtcttcacatcaccctcctctgtatacctaatctgcctctgcctctgtttaataaggatccttatgatgacttttagggactacccagattactccaggataatctcctcacctcatgagtcttaacttaattacatctgcaaggcccccttctccaaataagataaattcatggttttggggattaggatgtggctatgtcttttaggaagccactcttagcccaccagagtctgccctttggcccaaaatttatgtctgtctcatgtgtaaaagacattcatcccatcctaacattaccaaaagtctcaacccattatatcaatcctaagtccaaaatttcattcaaatatcatcggttcaaaagttccaaagcttatcatttagatcatctaaatcaggtatgagtgaaactctgggtatggtctttcctgaggccaaatcctcttcctctgagaaccagtgaaacagaaaagttaatctgctttcaaattacaatggtgggaacaggcataggataacagttacagacatttctgtctcaaaaaggagagaatggaaattggaatggagtctcctgtcccaatcattttcaaaatctagccaggcaaatttctgttctatttcaaggcctggcagtaatcctctttctcagggctccaccctttgggcctgtagctcttctttcttggactatggattgggcctctgcctctgtgcctatgggttgcacttcttcctctgttcccacacttgggcctctgcctctgtacctgcagctctgctctcgggatggtgcttcctttatcttgaagggtggcacatgtttgcagctgagaagttttatcaacgggtttcctacctgtagaattctggcagtctcacaatcttctttcatttttttctgtctctgtcccttttaggcccagttggaagtgtttctgatggtagaacattctcaaaaatcttgtgggtcttctacgtatgtcacattgattcacacattcagaaaagagggtcctcacagatttttcctgaacaaccccatctctattcttggcttctgttgaaacagtcaaataaatccacaagttaatgcctaacctcttcagcactagccaaaggttgtcaagacacacccttgggcttatctacagagcacacttttctaacagtgaatctcctaattttagcatctttttttttttttttacaatcattcagattgtgaattcnaggctcagaattacccagtcatcagatactgattccttttgtccacttatatagttattttctctttaaaaaaaaattttttttaatgtattagagatgaggtctcactctgtcacccaggctgcagtgtagtggtgcaaacatagctccctgtaacctcaaactcccaggctcaagggatcctcctgcatcagccttccaagtagctgggtctacaggtgcataccaccatgcctggctaattttttgcatttttttgtagagacttgatcttgctatgttgtccaggctgctctcgaactcctagcctcaagcaatccacccatcttggcctcctaaagtgccggattacaggtgtaagccaccatgcccagcctgttttgtcaatgtatctgttttctgtcttattttactataagcactaagaagaaactaagctatatctctaacactagacttgaaaatttcctcagctaaacatccaagttcatcatttattcaacttttcacactactgtagtagacaatttagatagataaactttttgccactatatgacaaggattccctttcttccattttccaataaaatcttcatttccttctaaaccatcactagaaatgcctttaacattcatactactaccatctggtaaaggcaatctagttttttctatcacatccaccaaaattcttctagtctctacccattatccaattccaaagcctttttcacattttaagacatttgttacagaagtacccaatccgtcccagttccacaatctgcattagattcccatggctgctgtaacaaattaccctctagcccagtggcttaaaacaatagaaatttattatcttgttgttttggaggccaaaagtccaaaattgaggggttggcagggctgaacgtcttctggagactctaagggaaacactcttcccgtgtcttccagtttcttgtggctgccatcattccttggtttgtgactgcatctccctctcctctgtcttcacatcacttcccctctgtatatataatctacctctgcctctctcttataaggacacttgtgacgggacttagggcccatccagattacccatgataattcccttattccaagattcttaattatatctgaaaggaccttttttccaaataaggtactatcacaggttccagggagtaggatattgaatatcttttttggggagggggcaccatgcagctcactacactattcattgcacacaaatgaatttttcactttttaagatgcattcttggtgctcaaaccagatcgaagtttgtctctaaaagctattgtctgcacaggctgctgcatgctctgttgttaaatggatggacaggctattctaaattttggttgatacttttgctactatgggcaattaacttgaaaaaaataatcgatcccaactctgtgctctgatgtacctcttctgccccttttatgacacctttgaccaaatgccttctatggttcacagtgcaggcacaaaactacctctgatacagaagggttctttacaagcttattttacataccgtgaatccctcacctaaagggagaggtgaaagcaaagactgctttgaatgggtattgagggagattgtgtccataccaagccaccctgaagaagtatttcacttgcagtagaactgtggatttgtgctgtcatttcaccttggaataaacacctatctctaagcaggaccaagaatgacttgcaatctatatgtaatggctacttacttattcaataaagttaagatatacgttaaaaaaaaagct

SEQ ID NO: 370725 - DNA, 9327 bp, Homo sapiens
  misc_feature (7503)..(7503): n is a, c, g, or t
gcggggcactttgaagaatcacgtgtgttgaggccctcttaaagagataggcacctacttttccctccaccctaaacaccgccctgagggcggcggcgaccgtggtaattgcaactgctcaggggcagggcttgccccagcgccgagtagtggcaacggcgtggttgcgtcgggggtgcctgggagcctggagtcccgggggcctgaaatcggcagcttcccgggcagacactctctccctcaggaagaggtgccgccgagtcagcgcggggcagtgtgagcgccccgaggtgctttctcagttgaggagaggtggggttacagggcacaggtgacagggccggagaaagatggagcagcccggggcggcggcgtcgggagcgggaggcggcagcgaggaacccggtgggggccggagcaacaagcggagcgcggggaaccgggccgccaatgaagaggaaacgaaaaacaaacccaaattgaacattcaaataaaaactttggcagatgatgtgcgtgaccgaattacaagttttagaaaatctactgtcaaaaaagaaaaacctcttattcaacatcctattgattctcaagtcgcgatgagtgagtttcctgcagctcagccattatatgatgaacgatctttgaatttgtcagaaaaggaagtattggatctctttgaaaaaatgatgaggacatgaaccttaacgaagagcagtatatctctgtcactgacaaatctatagtttgaagtaaagttacgggtgggctgaaaaacagcaaacatgaatgcaccctgtcttcacaagaatatgttcatgaattacgatcgggtatatcagatgagaaacttcttaattgcctagaatccctcagggtttctttaaccagcaatccggtcagctgggttaacaactttggccatgaaggtcttggactcttattggatgagctggaaaagcttctggacaaaaaacagcaagaaaatattgacaagaagaatcagtataaacttattcaatgcctcaaagcatttatgaataataagtttggattacaaaggattctaggagatgaaagaagtcttttactattggcaagagcaattgaccccaaacaacccaacatgatgactgaaatagtaaaaatactttctgctatttgcattgttggagaagagaacattctagataaacttttaggggctataacaacagcagcagaaagaaataacagggaacgattttcaccaattgtggaaggtttagaaaatcaggaagccttgcaattacaggtggcctgcatgcagtttataaatgcccttgtcacttctccttatgagcttgattttcgaatacatttaaggaatgaattcctccgttcaggactaaaaacaatgttaccagatctaaaagaaaaagagaatgatgagcttgatattcagttgaaagtatttgatgaaaacaaagaagatgacctaactgaattatcacaccgtctcaatgacattcgagcagaaatggatgatatgaatgaagtctaccatcttctatataatatgctgaaggacactgctgctgaaaattacttcttatctattctacaacattttttgcttatcagaaatgattattatatcaggccacaatattataaaataattgaggaatgtgtttcacagatagtgctacactgcagtggtatggatccagacttcaaatacaggcaaagattagacatcgatttaactcatctgatagattcttgtgtgaacaaggcgaaagttgaagaaagtgaacaaaaagctgcagagttttcaaagaagttcgatgaagaattcacagctcgacaggaagctcaagcagagcttcaaaaaagagatgagaaaatcaaagaacttgaagcagaaatccagcaacttcgaacccaggcacaagtactctcaagttcatcaggaattccaggtcctcctgcagcacctccattgccaggtgtagggccgcctccaccaccacccgcgccacctctacccggaggagctcctcttcctcctccaccacctcctttacctggaatgatggggataccaccaccacccccaccaccacttttatttgggggacctcctccaccaccaccccttggaggagttcctcctcccccaggaatatcacttaatctaccttatggaatgaagcagaaaaaaatgtataaacctgaagtgtccatgaagagaatcaattggtcaaagattgaacccacagaattatctgagaactgtttctggttaagagtcaaagaagacaagtttgagaatccagatctctttgccaaattggcattgaattttgctactcagataaaagttcaaaagaacgcagaagcattagaagaaaagaagactgggcctacaaagaagaaagtgaaagaactgagaattttggatcccaaaacagctcagaatctgtccatctttctgggatcatatcgcatgccatatgaagacataagaaacgttattctggaggttaatgaagacatgctgagtgaggctttaattcagaaccttgtgaaacatcttcctgagcagaagatactcaacgaattagcagagcttaagaatgaatatgatgacctctgtgagcctgaacaatttggagttgtgatgagctctgtgaaaatgttacagcctcgtctcagtagtatcctgttcaagctcacatttgaagaacacataaacaacatcaaaccaagcatcatagcagtaactcttgcctgtgaagaactgaagaaaagtgaaagctttaacagacttttagagttagttcttcttgttggaaactacatgaactcaggctcaagaaatgcccagtctttgggatttaagatcaacttcctttgtaagatcagagatactaaatcagcggatcaaaaaacaacccttttgcattttattgccgacatttgtgaggaaaaatatcgagatatcctaaaatttcctgaagaactggaacacgtagaaagtgcaagcaaagtttcagctcaaattctcaagagcaaccttgcatcaatggaacaacaaattgttcatctggaacgtgacatcaagaaattcccccaagcagaaaatcaacacgataagtttgtggaaaagatgaccagctttacaaagactgcccgagaacagtatgaaaaactctccaccatgcacaacaacatgatgaagctctatgagaatcttggagaatacttcatttttgactcaaagacagtgagcatagaagagttctttggtgatctcaacaacttccgaactttgtttttggaagcagtgagagaaaacaataagagaagagaaatggaagagaagaccaggagggcaaaacttgcaaaagagaaagctgaacaagaaaagttagaacgccagaagaaaaagaaacaactcattgatataaacaaagagggtgatgagactggtgtgatggataatcttctagaagccctacaatcaggtgcagcattcagagaccgtcgaaagcggattccaaggaatccagataacagacgagtacctttggaaaggtcacgctctcgccacaatggagctatctcatctaagtgattcctgatgccaaagaatatgaaaatatttaagtaaaaacaaaatgatgcattttgagaagaacaaagtgtgcactcagcggctggaaaggaaataagtgcatttctgcaaagatcaagataagctggatgaagtagtgtgcatttgtaatactattgcaagactcctcccacaattattctaatctgaacacagttatcaggattacaaaatgtgttccattttagtgtaaagatgtgtatcatttgtaattgtgtgtgacctgactgtgatgatggaagtgtaagaaattgaagagttctaaggctttcaaaaacactcagtcaaaaatttaaaatcttaaatgtgtaagtcacccccaccaaaaacaaaagagaagaaaaagaatagaaagaattatccagtgtcagcttccaatccctagtacatacatatataatagaaaagggccaagaaaaatatgcatcttgatttggagagaggctaatattatgcacactgtaagagaagccattttggaaattcacgaaagtactgctccaccccagttgagttatttagaattttatctcaagtgaaagctgatggattcatctgctttggctgaaattaaacttatcattagtctagctagcatttcagcatgatattgcaagcacttctcattgctaaaaataaataaaccaaagtttaaccgaatcagttagggaaagtgatttaaactttatttaaagaggtattttctaattatgcacagatatctactttatacaaatactttatatggctatttttgagaaaaccctcacattttaatgtttatgctagggatgaacctggaaaattctattacgtttatttagatttcaaaggcaaatattgattcctatgctctgtggtttatttcttttttctattgcttctttctcccttgagtcccttgaaggcagggaaatagacttctagaaaacctgagaggaaaaagaattctttttacaggaggcagcagaaaactgtctgaaaggtcaattgttttatctccctttccactctctttccaatttcactttggtggtctgaagaagaaaaagaaattttatgtatgtatgtgtaaatatgtgtatatatttctatctcttgctacaataattccaactaagtgaacttcttctcaattatcatcatacttacttaccttatattaacaaattaagatgatgctgccaaaacaagtctagcagggaaaacaggttctacatttttcttaaataaattagggagtaaaagttatacttaacttgtctgtctattattttaaaatatgcattgaaataatgtggtataacttctctggagtgcaattttaagtctaattcatgcagatgattgattgtgattattgtaagaaatttcttacatgtatatttcttatgttagaaaatactgtttctactcattcaaagcacattgtagatattcagagagaagaacaaatggctggcttggcaaatccccatctgagataaagtaaacaagtgaccagcagcccacagataattcctttatatagatgtataatgattcaaactgctgcctttgcctccagtgcatccttacttaggtattatacttctttaaaaagctctgaagctgctacaatagaaaaatcaaaaagggtaacagtatctgaaatttcacagtcctatccgatctgaaaacacacatacacaaatgcacacacatgcacacacacatttcagggacatagcagtaacactgttttttaacaacaacaaaagtttaggttctaatttatgtaaatacctagtatgtgtatttttgactttacaaagtctttcttttctgaaatcttcgtggtatggcttttttaattcttttgacagcttatcagtctgtaggagaatgatcttgaaatgttaaccctgactaaaatttgggagcatatgccttgctatattatcaagctggtcaaggtagaaatactgatatgtatcatcaccttttccagatacaaacttgccttattttctagtttgtgaacaagaacgaatgaagtactattattgataacttacttatatatttttatttagagcaatcccacatgcttttcacaaacattaaaaaaaaaaacctttcagggtctttcatgaagttccaatagttgagtgagttaaaaggtttgtttcccagatttgtaatggtcctgctctagccatttgcagttttgttttagatgattggaaagtatatcaccaaaaaaagtatatagtgacatttttagtatgaaaccaaattacactaaggtcttttgttggccatattactgccacacatgagaagcaccatttatgcagattttcttcagaatatttttaaaaggtacagaatccttaaaatattaacaactaattgcatccattatctcctttggctgctgtaacaaattaccaccaataatatgatggcttaacacaacagaaacttatttgcttacatttttgaagggcagcaaagccatggctccctccagaggctctagaggagaatctttccttgccacgtccaccttttggtggctattggcattttttggcttatggccacatttctctttctgctgtgtcttcacatcaccctcctctgtatacctaatctgcctctgcctctgtttaataaggatccttatgatgacttttagggactacccagattactccaggataatctcctcacctcatgagtcttaacttaattacatctgcaaggcccccttctccaaataagataaattcatggttttggggattaggatgtggctatgtcttttaggaagccactcttagcccaccagagtctgccctttggcccaaaatttatgtctgtctcatgtgtaaaagacattcatcccatcctaacattaccaaaagtctcaacccattatatcaatcctaagtccaaaatttcattcaaatatcatcggttcaaaagttccaaagcttatcatttagatcatctaaatcaggtatgagtgaaactctgggtatggtctttcctgaggccaaatcctcttcctctgagaaccagtgaaacagaaaagttaatctgctttcaaattacaatggtgggaacaggcataggataacagttacagacatttctgtctcaaaaaggagagaatggaaattggaatggagtctcctgtcccaatcattttcaaaatctagccaggcaaatttctgttctatttcaaggcctggcagtaatcctctttctcagggctccaccctttgggcctgtagctcttctttcttggactatggattgggcctctgcctctgtgcctatgggttgcacttcttcctctgttcccacacttgggcctctgcctctgtacctgcagctctgctctcgggatggtgcttcctttatcttgaagggtggcacatgtttgcagctgagaagttttatcaacgggtttcctacctgtagaattctggcagtctcacaatcttctttcatttttttctgtctctgtcccttttaggcccagttggaagtgtttctgatggtagaacattctcaaaaatcttgtgggtcttctacgtatgtcacattgattcacacattcagaaaagagggtcctcacagatttttcctgaacaaccccatctctattcttggcttctgttgaaacagtcaaataaatccacaagttaatgcctaacctcttcagcactagccaaaggttgtcaagacacacccttgggcttatctacagagcacacttttctaacagtgaatctcctaattttagcatctttttttttttttttacaatcattcagattgtgaattcnaggctcagaattacccagtcatcagatactgattccttttgtccacttatatagttattttctctttaaaaaaaaattttttttaatgtattagagatgaggtctcactctgtcacccaggctgcagtgtagtggtgcaaacatagctccctgtaacctcaaactcccaggctcaagggatcctcctgcatcagccttccaagtagctgggtctacaggtgcataccaccatgcctggctaattttttgcatttttttgtagagacttgatcttgctatgttgtccaggctgctctcgaactcctagcctcaagcaatccacccatcttggcctcctaaagtgccggattacaggtgtaagccaccatgcccagcctgttttgtcaatgtatctgttttctgtcttattttactataagcactaagaagaaactaagctatatctctaacactagacttgaaaatttcctcagctaaacatccaagttcatcatttattcaacttttcacactactgtagtagacaatttagatagataaactttttgccactatatgacaaggattccctttcttccattttccaataaaatcttcatttccttctaaaccatcactagaaatgcctttaacattcatactactaccatctggtaaaggcaatctagttttttctatcacatccaccaaaattcttctagtctctacccattatccaattccaaagcctttttcacattttaagacatttgttacagaagtacccaatccgtcccagttccacaatctgcattagattcccatggctgctgtaacaaattaccctctagcccagtggcttaaaacaatagaaatttattatcttgttgttttggaggccaaaagtccaaaattgaggggttggcagggctgaacgtcttctggagactctaagggaaacactcttcccgtgtcttccagtttcttgtggctgccatcattccttggtttgtgactgcatctccctctcctctgtcttcacatcacttcccctctgtatatataatctacctctgcctctctcttataaggacacttgtgacgggacttagggcccatccagattacccatgataattcccttattccaagattcttaattatatctgaaaggaccttttttccaaataaggtactatcacaggttccagggagtaggatattgaatatcttttttggggagggggcaccatgcagctcactacactattcattgcacacaaatgaatttttcactttttaagatgcattcttggtgctcaaaccagatcgaagtttgtctctaaaagctattgtctgcacaggctgctgcatgctctgttgttaaatggatggacaggctattctaaattttggttgatacttttgctactatgggcaattaacttgaaaaaaataatcgatcccaactctgtgctctgatgtacctcttctgccccttttatgacacctttgaccaaatgccttctatggttcacagtgcaggcacaaaactacctctgatacagaagggttctttacaagcttattttacataccgtgaatccctcacctaaagggagaggtgaaagcaaagactgctttgaatgggtattgagggagattgtgtccataccaagccaccctgaagaagtatttcacttgcagtagaactgtggatttgtgctgtcatttcaccttggaataaacacctatctctaagcaggaccaagaatgacttgcaatctatatgtaatggctacttacttattcaataaagttaagatatacgttaaaaaaaaagct

SEQ ID NO: 370726 - DNA, 5830 bp, Homo sapiens
  misc_feature (25)..(25): n is a, c, g, or t
  misc_feature (4006)..(4006): n is a, c, g, or t
aatagataatatgatatattttgtntgtgggatgattttattaataattttcgttgccctataacagacgagtacctttggaaaggtcacgctctcgccacaatggagctatctcatctaagtgattcctgatgccaaagaatatgaaaatatttaagtaaaaacaaaatgatgcattttgagaagaacaaagtgtgcactcagcggctggaaaggaaataagtgcatttctgcaaagatcaagataagctggatgaagtagtgtgcatttgtaatactattgcaagactcctcccacaattattctaatctgaacacagttatcaggattacaaaatgtgttccattttagtgtaaagatgtgtatcatttgtaattgtgtgtgacctgactgtgatgatggaagtgtaagaaattgaagagttctaaggctttcaaaaacactcagtcaaaaatttaaaatcttaaatgtgtaagtcacccccaccaaaaacaaaagagaagaaaaagaatagaaagaattatccagtgtcagcttccaatccctagtacatacatatataatagaaaagggccaagaaaaatatgcatcttgatttggagagaggctaatattatgcacactgtaagagaagccattttggaaattcacgaaagtactgctccaccccagttgagttatttagaattttatctcaagtgaaagctgatggattcatctgctttggctgaaattaaacttatcattagtctagctagcatttcagcatgatattgcaagcacttctcattgctaaaaataaataaaccaaagtttaaccgaatcagttagggaaagtgatttaaactttatttaaagaggtattttctaattatgcacagatatctactttatacaaatactttatatggctatttttgagaaaaccctcacattttaatgtttatgctagggatgaacctggaaaattctattacgtttatttagatttcaaaggcaaatattgattcctatgctctgtggtttatttcttttttctattgcttctttctcccttgagtcccttgaaggcagggaaatagacttctagaaaacctgagaggaaaaagaattctttttacaggaggcagcagaaaactgtctgaaaggtcaattgttttatctccctttccactctctttccaatttcactttggtggtctgaagaagaaaaagaaattttatgtatgtatgtgtaaatatgtgtatatatttctatctcttgctacaataattccaactaagtgaacttcttctcaattatcatcatacttacttaccttatattaacaaattaagatgatgctgccaaaacaagtctagcagggaaaacaggttctacatttttcttaaataaattagggagtaaaagttatacttaacttgtctgtctattattttaaaatatgcattgaaataatgtggtataacttctctggagtgcaattttaagtctaattcatgcagatgattgattgtgattattgtaagaaatttcttacatgtatatttcttatgttagaaaatactgtttctactcattcaaagcacattgtagatattcagagagaagaacaaatggctggcttggcaaatccccatctgagataaagtaaacaagtgaccagcagcccacagataattcctttatatagatgtataatgattcaaactgctgcctttgcctccagtgcatccttacttaggtattatacttctttaaaaagctctgaagctgctacaatagaaaaatcaaaaagggtaacagtatctgaaatttcacagtcctatccgatctgaaaacacacatacacaaatgcacacacatgcacacacacatttcagggacatagcagtaacactgttttttaacaacaacaaaagtttaggttctaatttatgtaaatacctagtatgtgtatttttgactttacaaagtctttcttttctgaaatcttcgtggtatggcttttttaattcttttgacagcttatcagtctgtaggagaatgatcttgaaatgttaaccctgactaaaatttgggagcatatgccttgctatattatcaagctggtcaaggtagaaatactgatatgtatcatcaccttttccagatacaaacttgccttattttctagtttgtgaacaagaacgaatgaagtactattattgataacttacttatatatttttatttagagcaatcccacatgcttttcacaaacattaaaaaaaaaaacctttcagggtctttcatgaagttccaatagttgagtgagttaaaaggtttgtttcccagatttgtaatggtcctgctctagccatttgcagttttgttttagatgattggaaagtatatcaccaaaaaaagtatatagtgacatttttagtatgaaaccaaattacactaaggtcttttgttggccatattactgccacacatgagaagcaccatttatgcagattttcttcagaatatttttaaaaggtacagaatccttaaaatattaacaactaattgcatccattatctcctttggctgctgtaacaaattaccaccaataatatgatggcttaacacaacagaaacttatttgcttacatttttgaagggcagcaaagccatggctccctccagaggctctagaggagaatctttccttgccacgtccaccttttggtggctattggcattttttggcttatggccacatttctctttctgctgtgtcttcacatcaccctcctctgtatacctaatctgcctctgcctctgtttaataaggatccttatgatgacttttagggactacccagattactccaggataatctcctcacctcatgagtcttaacttaattacatctgcaaggcccccttctccaaataagataaattcatggttttggggattaggatgtggctatgtcttttaggaagccactcttagcccaccagagtctgccctttggcccaaaatttatgtctgtctcatgtgtaaaagacattcatcccatcctaacattaccaaaagtctcaacccattatatcaatcctaagtccaaaatttcattcaaatatcatcggttcaaaagttccaaagcttatcatttagatcatctaaatcaggtatgagtgaaactctgggtatggtctttcctgaggccaaatcctcttcctctgagaaccagtgaaacagaaaagttaatctgctttcaaattacaatggtgggaacaggcataggataacagttacagacatttctgtctcaaaaaggagagaatggaaattggaatggagtctcctgtcccaatcattttcaaaatctagccaggcaaatttctgttctatttcaaggcctggcagtaatcctctttctcagggctccaccctttgggcctgtagctcttctttcttggactatggattgggcctctgcctctgtgcctatgggttgcacttcttcctctgttcccacacttgggcctctgcctctgtacctgcagctctgctctcgggatggtgcttcctttatcttgaagggtggcacatgtttgcagctgagaagttttatcaacgggtttcctacctgtagaattctggcagtctcacaatcttctttcatttttttctgtctctgtcccttttaggcccagttggaagtgtttctgatggtagaacattctcaaaaatcttgtgggtcttctacgtatgtcacattgattcacacattcagaaaagagggtcctcacagatttttcctgaacaaccccatctctattcttggcttctgttgaaacagtcaaataaatccacaagttaatgcctaacctcttcagcactagccaaaggttgtcaagacacacccttgggcttatctacagagcacacttttctaacagtgaatctcctaattttagcatctttttttttttttttacaatcattcagattgtgaattcnaggctcagaattacccagtcatcagatactgattccttttgtccacttatatagttattttctctttaaaaaaaaattttttttaatgtattagagatgaggtctcactctgtcacccaggctgcagtgtagtggtgcaaacatagctccctgtaacctcaaactcccaggctcaagggatcctcctgcatcagccttccaagtagctgggtctacaggtgcataccaccatgcctggctaattttttgcatttttttgtagagacttgatcttgctatgttgtccaggctgctctcgaactcctagcctcaagcaatccacccatcttggcctcctaaagtgccggattacaggtgtaagccaccatgcccagcctgttttgtcaatgtatctgttttctgtcttattttactataagcactaagaagaaactaagctatatctctaacactagacttgaaaatttcctcagctaaacatccaagttcatcatttattcaacttttcacactactgtagtagacaatttagatagataaactttttgccactatatgacaaggattccctttcttccattttccaataaaatcttcatttccttctaaaccatcactagaaatgcctttaacattcatactactaccatctggtaaaggcaatctagttttttctatcacatccaccaaaattcttctagtctctacccattatccaattccaaagcctttttcacattttaagacatttgttacagaagtacccaatccgtcccagttccacaatctgcattagattcccatggctgctgtaacaaattaccctctagcccagtggcttaaaacaatagaaatttattatcttgttgttttggaggccaaaagtccaaaattgaggggttggcagggctgaacgtcttctggagactctaagggaaacactcttcccgtgtcttccagtttcttgtggctgccatcattccttggtttgtgactgcatctccctctcctctgtcttcacatcacttcccctctgtatatataatctacctctgcctctctcttataaggacacttgtgacgggacttagggcccatccagattacccatgataattcccttattccaagattcttaattatatctgaaaggaccttttttccaaataaggtactatcacaggttccagggagtaggatattgaatatcttttttggggagggggcaccatgcagctcactacactattcattgcacacaaatgaatttttcactttttaagatgcattcttggtgctcaaaccagatcgaagtttgtctctaaaagctattgtctgcacaggctgctgcatgctctgttgttaaatggatggacaggctattctaaattttggttgatacttttgctactatgggcaattaacttgaaaaaaataatcgatcccaactctgtgctctgatgtacctcttctgccccttttatgacacctttgaccaaatgccttctatggttcacagtgcaggcacaaaactacctctgatacagaagggttctttacaagcttattttacataccgtgaatccctcacctaaagggagaggtgaaagcaaagactgctttgaatgggtattgagggagattgtgtccataccaagccaccctgaagaagtatttcacttgcagtagaactgtggatttgtgctgtcatttcaccttggaataaacacctatctctaagcaggaccaagaatgacttgcaatctatatgtaatggctacttacttattcaataaagttaagatatacgttaaaaaaaaagct

SEQ ID NO: 370727 - DNA, 1061 bp, Homo sapiens
gcggggcactttgaagaatcacgtgtgttgaggccctcttaaagagataggcacctacttttccctccaccctaaacaccgccctgagggcggcggcgaccgtggtaattgcaactgctcaggggcagggcttgccccagcgccgagtagtggcaacggcgtggttgcgtcgggggtgcctgggagcctggagtcccgggggcctgaaatcggcagcttcccgggcagacactctctccctcaggaagaggtgccgccgagtcagcgcggggcagtgtgagcgccccgaggtgctttctcagttgaggagaggtggggttacagggcacaggtgacagggccggagaaagatggagcagcccggggcggcggcgtcgggagcgggaggcggcagcgaggaacccggtgggggccggagcaacaagcggagcgcggggaaccgggccgccaatgaagaggaaacgaaaaacaaacccaaattgaacattcaaataaaaactttggcagatgatgtgcgtgaccgaattacaagttttagaaaatctactgtcaaaaaagaaaaacctcttattcaacatcctattgattctcaagtcgcgatgagtgagtttcctgcagctcagccattatatgatgaacgatctttgaatttgtcagaaaaggaagtattggatctctttgaaaaaatgatggaggacatgaaccttaacgaagagaaaaaagctcctttacgaaacaaagactttaccaccaaacgtgagatggttgtccagtatatttctgccactgccaaatctatagttggaagtaaagttgggtgggctgaaaaacagcaaacatgaatgcaccctgtcttcacaagaatatgttcatgaattacgatcgggtatatcagatgagaaacttcttaattgcctagaatccctcagggtttctttaaccagcaatccggtcagtggggttaacaactttggccatgaagggcttggactcttttttggaagagccgggaaaaactttggggccaaaacaaaggaggaaaatttgggccaggaaaaata

SEQ ID NO: 370728 - DNA, 304 bp, Homo sapiens
tttatacgttttattcacaatttattgtagttcatttttaggtcaaattttggaggggcggggaagggcggatactctggtaccataacagaaccacagtcagaaatgtactgtcctagttaatcactttcataattgttaatgcatgtttaaaaattctaatactaaaacactaaacttttatacttttatttctttttagaaccttgtgaaacatcttcctgagcagaagatactcaacgaattagcagagcttaagaatgaatatgatgacctctgtgagcctgaacaatttggagttgtg

SEQ ID NO: 370729 - DNA, 404 bp, Homo sapiens
aatacgcagttcattcctttattatgtgacacgtttatcatgacctgcatgataactaatgaaataaatatgagatttgtgtattatctgtggcctaatttgttgaacttctcattttaagttacagtagcacaatcctaaatcagtattataaatgagctgtttatggttttgtcttattcagtgttctaggtgcattatgtttttttatttatacatttcaaataatttttctctttatttcttcttttctgcagtggtaaatcatccctgtgcaacaagggctaatccaagatcagctacataaacggcctgagtgctgttttaaacaggattgggtgatggtacaacatgactttttaagataatcaagtagtaaaagtttctagtggaaacatgaaaaa

SEQ ID NO: 370730 - DNA, 5821 bp, Homo sapiens
  misc_feature (3997)..(3997): n is a, c, g, or t
cattcgtaatatatattaccttttattaaattatttattcttaaaaacacaataacagacgagtacctttggaaaggtcacgctctcgccacaatggagctatctcatctaagtgattcctgatgccaaagaatatgaaaatatttaagtaaaaacaaaatgatgcattttgagaagaacaaagtgtgcactcagcggctggaaaggaaataagtgcatttctgcaaagatcaagataagctggatgaagtagtgtgcatttgtaatactattgcaagactcctcccacaattattctaatctgaacacagttatcaggattacaaaatgtgttccattttagtgtaaagatgtgtatcatttgtaattgtgtgtgacctgactgtgatgatggaagtgtaagaaattgaagagttctaaggctttcaaaaacactcagtcaaaaatttaaaatcttaaatgtgtaagtcacccccaccaaaaacaaaagagaagaaaaagaatagaaagaattatccagtgtcagcttccaatccctagtacatacatatataatagaaaagggccaagaaaaatatgcatcttgatttggagagaggctaatattatgcacactgtaagagaagccattttggaaattcacgaaagtactgctccaccccagttgagttatttagaattttatctcaagtgaaagctgatggattcatctgctttggctgaaattaaacttatcattagtctagctagcatttcagcatgatattgcaagcacttctcattgctaaaaataaataaaccaaagtttaaccgaatcagttagggaaagtgatttaaactttatttaaagaggtattttctaattatgcacagatatctactttatacaaatactttatatggctatttttgagaaaaccctcacattttaatgtttatgctagggatgaacctggaaaattctattacgtttatttagatttcaaaggcaaatattgattcctatgctctgtggtttatttcttttttctattgcttctttctcccttgagtcccttgaaggcagggaaatagacttctagaaaacctgagaggaaaaagaattctttttacaggaggcagcagaaaactgtctgaaaggtcaattgttttatctccctttccactctctttccaatttcactttggtggtctgaagaagaaaaagaaattttatgtatgtatgtgtaaatatgtgtatatatttctatctcttgctacaataattccaactaagtgaacttcttctcaattatcatcatacttacttaccttatattaacaaattaagatgatgctgccaaaacaagtctagcagggaaaacaggttctacatttttcttaaataaattagggagtaaaagttatacttaacttgtctgtctattattttaaaatatgcattgaaataatgtggtataacttctctggagtgcaattttaagtctaattcatgcagatgattgattgtgattattgtaagaaatttcttacatgtatatttcttatgttagaaaatactgtttctactcattcaaagcacattgtagatattcagagagaagaacaaatggctggcttggcaaatccccatctgagataaagtaaacaagtgaccagcagcccacagataattcctttatatagatgtataatgattcaaactgctgcctttgcctccagtgcatccttacttaggtattatacttctttaaaaagctctgaagctgctacaatagaaaaatcaaaaagggtaacagtatctgaaatttcacagtcctatccgatctgaaaacacacatacacaaatgcacacacatgcacacacacatttcagggacatagcagtaacactgttttttaacaacaacaaaagtttaggttctaatttatgtaaatacctagtatgtgtatttttgactttacaaagtctttcttttctgaaatcttcgtggtatggcttttttaattcttttgacagcttatcagtctgtaggagaatgatcttgaaatgttaaccctgactaaaatttgggagcatatgccttgctatattatcaagctggtcaaggtagaaatactgatatgtatcatcaccttttccagatacaaacttgccttattttctagtttgtgaacaagaacgaatgaagtactattattgataacttacttatatatttttatttagagcaatcccacatgcttttcacaaacattaaaaaaaaaaacctttcagggtctttcatgaagttccaatagttgagtgagttaaaaggtttgtttcccagatttgtaatggtcctgctctagccatttgcagttttgttttagatgattggaaagtatatcaccaaaaaaagtatatagtgacatttttagtatgaaaccaaattacactaaggtcttttgttggccatattactgccacacatgagaagcaccatttatgcagattttcttcagaatatttttaaaaggtacagaatccttaaaatattaacaactaattgcatccattatctcctttggctgctgtaacaaattaccaccaataatatgatggcttaacacaacagaaacttatttgcttacatttttgaagggcagcaaagccatggctccctccagaggctctagaggagaatctttccttgccacgtccaccttttggtggctattggcattttttggcttatggccacatttctctttctgctgtgtcttcacatcaccctcctctgtatacctaatctgcctctgcctctgtttaataaggatccttatgatgacttttagggactacccagattactccaggataatctcctcacctcatgagtcttaacttaattacatctgcaaggcccccttctccaaataagataaattcatggttttggggattaggatgtggctatgtcttttaggaagccactcttagcccaccagagtctgccctttggcccaaaatttatgtctgtctcatgtgtaaaagacattcatcccatcctaacattaccaaaagtctcaacccattatatcaatcctaagtccaaaatttcattcaaatatcatcggttcaaaagttccaaagcttatcatttagatcatctaaatcaggtatgagtgaaactctgggtatggtctttcctgaggccaaatcctcttcctctgagaaccagtgaaacagaaaagttaatctgctttcaaattacaatggtgggaacaggcataggataacagttacagacatttctgtctcaaaaaggagagaatggaaattggaatggagtctcctgtcccaatcattttcaaaatctagccaggcaaatttctgttctatttcaaggcctggcagtaatcctctttctcagggctccaccctttgggcctgtagctcttctttcttggactatggattgggcctctgcctctgtgcctatgggttgcacttcttcctctgttcccacacttgggcctctgcctctgtacctgcagctctgctctcgggatggtgcttcctttatcttgaagggtggcacatgtttgcagctgagaagttttatcaacgggtttcctacctgtagaattctggcagtctcacaatcttctttcatttttttctgtctctgtcccttttaggcccagttggaagtgtttctgatggtagaacattctcaaaaatcttgtgggtcttctacgtatgtcacattgattcacacattcagaaaagagggtcctcacagatttttcctgaacaaccccatctctattcttggcttctgttgaaacagtcaaataaatccacaagttaatgcctaacctcttcagcactagccaaaggttgtcaagacacacccttgggcttatctacagagcacacttttctaacagtgaatctcctaattttagcatctttttttttttttttacaatcattcagattgtgaattcnaggctcagaattacccagtcatcagatactgattccttttgtccacttatatagttattttctctttaaaaaaaaattttttttaatgtattagagatgaggtctcactctgtcacccaggctgcagtgtagtggtgcaaacatagctccctgtaacctcaaactcccaggctcaagggatcctcctgcatcagccttccaagtagctgggtctacaggtgcataccaccatgcctggctaattttttgcatttttttgtagagacttgatcttgctatgttgtccaggctgctctcgaactcctagcctcaagcaatccacccatcttggcctcctaaagtgccggattacaggtgtaagccaccatgcccagcctgttttgtcaatgtatctgttttctgtcttattttactataagcactaagaagaaactaagctatatctctaacactagacttgaaaatttcctcagctaaacatccaagttcatcatttattcaacttttcacactactgtagtagacaatttagatagataaactttttgccactatatgacaaggattccctttcttccattttccaataaaatcttcatttccttctaaaccatcactagaaatgcctttaacattcatactactaccatctggtaaaggcaatctagttttttctatcacatccaccaaaattcttctagtctctacccattatccaattccaaagcctttttcacattttaagacatttgttacagaagtacccaatccgtcccagttccacaatctgcattagattcccatggctgctgtaacaaattaccctctagcccagtggcttaaaacaatagaaatttattatcttgttgttttggaggccaaaagtccaaaattgaggggttggcagggctgaacgtcttctggagactctaagggaaacactcttcccgtgtcttccagtttcttgtggctgccatcattccttggtttgtgactgcatctccctctcctctgtcttcacatcacttcccctctgtatatataatctacctctgcctctctcttataaggacacttgtgacgggacttagggcccatccagattacccatgataattcccttattccaagattcttaattatatctgaaaggaccttttttccaaataaggtactatcacaggttccagggagtaggatattgaatatcttttttggggagggggcaccatgcagctcactacactattcattgcacacaaatgaatttttcactttttaagatgcattcttggtgctcaaaccagatcgaagtttgtctctaaaagctattgtctgcacaggctgctgcatgctctgttgttaaatggatggacaggctattctaaattttggttgatacttttgctactatgggcaattaacttgaaaaaaataatcgatcccaactctgtgctctgatgtacctcttctgccccttttatgacacctttgaccaaatgccttctatggttcacagtgcaggcacaaaactacctctgatacagaagggttctttacaagcttattttacataccgtgaatccctcacctaaagggagaggtgaaagcaaagactgctttgaatgggtattgagggagattgtgtccataccaagccaccctgaagaagtatttcacttgcagtagaactgtggatttgtgctgtcatttcaccttggaataaacacctatctctaagcaggaccaagaatgacttgcaatctatatgtaatggctacttacttattcaataaagttaagatatacgttaaaaaaaaagct

SEQ ID NO: 370731 - DNA, 3718 bp, Homo sapiens
gcttattgatgggtctgctcatttcctgcataggaagaaatcggtgacattgggtggatacagttcccagccaatcgccccgagttccctcgcccactggggaaagaggcagagcttccgctagtctttcatcttcaaaggaaatcaagcttctaaaaagcgggccctgccgaattggctaatagctactccttttctccactaggggagcgttcgcaaggggtgtggggaggtggccagcgcttgccaatcagaggaggccagggctgtcccctagcgggcggtgaccaatcgccggggccggccagagcgcgcttccttagtaggtggatggtggtcggagcgccgactcccttctcgtcgtcgccattttgagctggtgactgtggccggctgggagtaggcggcagtgagtttccctgggagggcagcgcgcttggcgcttctcccctccccccgatctgcctccagtctcggacttggttgttgcgcgctccggctccggctgagctgggagagttggaggaggtggcggcgggcagaggtgatgtctgggagcccttccttgacagcccgggccgagaagagtccctgcaggaagcatcacccaggctggcagatcatggtagcagcagcgggggtggctgggaagtgaaacggagccagcggctgaggaggggccccagcagcccccgaaggccctatcaggacatggagtatgaaagacgtggtggtcgtggtgacaggactggccgctatggagccactgaccgctcgcaggatgatggtggggagaaccgcagccgagaccacgactaccgggacatggactaccgttcatatcctcgcgagtatggcagccaggagggcaagcatgactatgacgactcatctgaggagcagagtgcggaggattcctacgaggcctccccgggctccgagactcagcgtaggcggcggcggcggcacaggcacagccccaccggcccgccaggcttcccccgagacggcgactatcgggaccaggactatcggaccgagcaaggggaggaggaggaggaggaggaggatgaggaggaggaggagaaggccagtaacatcgtcatgctgaggatgctgccacaggcagccactgaggatgacatccgtggccagctgcagtcgcacggcgtgcaagcacgggaggttcggctgatgcggaacaaatcttcaggtcagagccggggcttcgccttcgtcgagtttagtcacttgcaggacgctacacgatggatggaagccaatcagcactccctcaacatcctgggccagaaggtgtcgatgcactacagtgaccccaagcccaagatcaatgaggactggctgtgcaataagtgtggcgtccagaacttcaaacgccgagagaagtgcttcaaatgtggcgtgcccaagtcagaggcagagcagaagctgcccctcggcacgaggctggatcagcagacactgccactgggtggccgggagctgagccagggcctgcttcccctgccgcagccctaccaggcccagggagtcctggcctcccaagccctgtcacagggctcggagccaagctcagagaacgccaatgacaccatcattttgcgcaacctgaacccacacagcaccatggattccatcctgggggccctggcaccctacgcggtgctgtcctcctccaacgtgcgcgtcataaaggacaagcagacccaactgaaccgcggctttgccttcatccagctctccaccatcgtggaggcagcccagctgctgcagatcctgcaggccctgcacccaccactcactatcgacggcaagaccatcaatgttgagtttgccaagggttctaagagggacatggcctccaatgaaggcagtcgcatcagtgctgcctctgtggccagcactgccattgctgcggcccagtgggccatctcacaggcctcccaaggtggggagggtacctgggccacctccgaggagccgccggtcgactacagctactaccaacaggatgagggctatggcaacagccagggcacagagtcttccctctatgcccatggctacctcaagggcaccaagggccctggcatcactggaaccaaaggggatcccactggagcaggtcccgaggcctccctagagcctggggccgactctgtgtcgatgcaggctttctctcgcgcccagcctggtgctgctcctggcatctaccaacaatcagccgaggcgagcagtagccagggcactgctgccaacagccagtcgtataccatcatgtcacccgctgtgctcaaatctgagctccagagccctacccatcctagttctgctctcccaccggctaccagccccactgcccaggaatcctacagccagtaccctgttcccgacgtctctacctaccagtacgatgagacctccggctactactatgacccccagaccggcctctactatgaccccaactcccagtattactacaatgctcagagccagcagtacctgtactgggatggggagaggcggacctatgttcccgccctggagcagtcggccgacggacataaggagacaggggcaccctcgaaggagggcaaagagaagaaggagaagcacaagaccaagacagctcaacagattgccaaggacatggaacgctgggcccgcagtctcaacaaacaaaaagaaaacttcaaaaatagcttccagcctatcagctccctgcgagatgacgagaggcgggagtcagccactgcagatgctggctatgccatcctcgagaagaagggagcactagccgagagacagcacaccagcatggatctcccgaaattggccagtgacgaccgcccaagccctccgcgaggactggtggcagcctacagcggggagagtgacagtgaggaggagcaggagcgtgggggccctgagcgggaggagaagctcaccgactggcagaagctggcctgtctgctctgccgacgccagttccccagcaaagaggcgctcatccggcaccagcagctctcagggctccacaagcaaaaccttgagattcaccggcgagcccacttgtcagaaaacgagctagaagcactagagaagaatgacatggagcaaatgaagtaccgggaccgtgcagctgaacgcagagaaaagtatggcatccccgagccgccagagcccaagaggaggaagtacggcggcatatccacagcctctgtagacttcgagcagcctactcgggacgggctgggcagtgacaacattggcagtcggatgctgcaggccatgggctggaaagagggcagcggcctgggccgcaagaagcagggcattgtaacgcctatcgaggcccaaacacgggtgcggggctccggcctgggtgcacggggcagctcctacggggtcacctcaaccgagtcctacaaggagacactgcacaagacaatggtgacccgcttcaacgaggcccagtgagcagcttcaagagcaacttctccacatgttgggtgtccatcctggggcagggaaggacagagtgttggatggctgggacggggccttgctcttgtcggccagcccactccccagccagagagggcttgaccaaatcaaattgaggtggtgacttttgttggaaaattgggctgggatcacgtcctgttttgtaataaaagctgaaaagtctgca

SEQ ID NO: 370732 - DNA, 249 bp, Homo sapiens
ccaacatgtggagaagttgggtgtccaccctgccccaggatggacacccaacatgtggagaagttgggtgtccatcctggggcagggaaggacagagtgttggatggctgggacggggccttgctcttgtcggccagcccactccccagccagagagggcttgaccaaatcaaattgaggtggtgacttttgttggaaaattgggctgggatcacgtcctgttttgtaataaaagctgaaaagtctgca

SEQ ID NO: 370733 - DNA, 3664 bp, Homo sapiens
gcttattgatgggtctgctcatttcctgcataggaagaaatcggtgacattgggtggatacagttcccagccaatcgccccgagttccctcgcccactggggaaagaggcagagcttccgctagtctttcatcttcaaaggaaatcaagcttctaaaaagcgggccctgccgaattggctaatagctactccttttctccactaggggagcgttcgcaaggggtgtggggaggtggccagcgcttgccaatcagaggaggccagggctgtcccctagcgggcggtgaccaatcgccggggccggccagagcgcgcttccttagtaggtggatggtggtcggagcgccgactcccttctcgtcgtcgccattttgagctggtgactgtggccggctgggagtaggcggcagtgagtttccctgggagggcagcgcgcttggcgcttctcccctccccccgatctgcctccagtctcggacttggttgttgcgcgctccggctccggctgagctgggagagttggaggaggtggcggcgggcagaggtgatgtctgggagcccttccttgacagcccgggccgagaagagtccctgcaggaagcatcacccaggctggcagatcatggtagcagcagcccccgaaggccctatcaggacatggagtatgaaagacgtggtggtcgtggtgacaggactggccgctatggagccactgaccgctcgcaggatgatggtggggagaaccgcagccgagaccacgactaccgggacatggactaccgttcatatcctcgcgagtatggcagccaggagggcaagcatgactatgacgactcatctgaggagcagagtgcggaggattcctacgaggcctccccgggctccgagactcagcgtaggcggcggcggcggcacaggcacagccccaccggcccgccaggcttcccccgagacggcgactatcgggaccaggactatcggaccgagcaaggggaggaggaggaggaggaggaggatgaggaggaggaggagaaggccagtaacatcgtcatgctgaggatgctgccacaggcagccactgaggatgacatccgtggccagctgcagtcgcacggcgtgcaagcacgggaggttcggctgatgcggaacaaatcttcaggtcagagccggggcttcgccttcgtcgagtttagtcacttgcaggacgctacacgatggatggaagccaatcagcactccctcaacatcctgggccagaaggtgtcgatgcactacagtgaccccaagcccaagatcaatgaggactggctgtgcaataagtgtggcgtccagaacttcaaacgccgagagaagtgcttcaaatgtggcgtgcccaagtcagaggcagagcagaagctgcccctcggcacgaggctggatcagcagacactgccactgggtggccgggagctgagccagggcctgcttcccctgccgcagccctaccaggcccagggagtcctggcctcccaagccctgtcacagggctcggagccaagctcagagaacgccaatgacaccatcattttgcgcaacctgaacccacacagcaccatggattccatcctgggggccctggcaccctacgcggtgctgtcctcctccaacgtgcgcgtcataaaggacaagcagacccaactgaaccgcggctttgccttcatccagctctccaccatcgtggaggcagcccagctgctgcagatcctgcaggccctgcacccaccactcactatcgacggcaagaccatcaatgttgagtttgccaagggttctaagagggacatggcctccaatgaaggcagtcgcatcagtgctgcctctgtggccagcactgccattgctgcggcccagtgggccatctcacaggcctcccaaggtggggagggtacctgggccacctccgaggagccgccggtcgactacagctactaccaacaggatgagggctatggcaacagccagggcacagagtcttccctctatgcccatggctacctcaagggcaccaagggccctggcatcactggaaccaaaggggatcccactggagcaggtcccgaggcctccctagagcctggggccgactctgtgtcgatgcaggctttctctcgcgcccagcctggtgctgctcctggcatctaccaacaatcagccgaggcgagcagtagccagggcactgctgccaacagccagtcgtataccatcatgtcacccgctgtgctcaaatctgagctccagagccctacccatcctagttctgctctcccaccggctaccagccccactgcccaggaatcctacagccagtaccctgttcccgacgtctctacctaccagtacgatgagacctccggctactactatgacccccagaccggcctctactatgaccccaactcccagtattactacaatgctcagagccagcagtacctgtactgggatggggagaggcggacctatgttcccgccctggagcagtcggccgacggacataaggagacaggggcaccctcgaaggagggcaaagagaagaaggagaagcacaagaccaagacagctcaacagattgccaaggacatggaacgctgggcccgcagtctcaacaaacaaaaagaaaacttcaaaaatagcttccagcctatcagctccctgcgagatgacgagaggcgggagtcagccactgcagatgctggctatgccatcctcgagaagaagggagcactagccgagagacagcacaccagcatggatctcccgaaattggccagtgacgaccgcccaagccctccgcgaggactggtggcagcctacagcggggagagtgacagtgaggaggagcaggagcgtgggggccctgagcgggaggagaagctcaccgactggcagaagctggcctgtctgctctgccgacgccagttccccagcaaagaggcgctcatccggcaccagcagctctcagggctccacaagcaaaaccttgagattcaccggcgagcccacttgtcagaaaacgagctagaagcactagagaagaatgacatggagcaaatgaagtaccgggaccgtgcagctgaacgcagagaaaagtatggcatccccgagccgccagagcccaagaggaggaagtacggcggcatatccacagcctctgtagacttcgagcagcctactcgggacgggctgggcagtgacaacattggcagtcggatgctgcaggccatgggctggaaagagggcagcggcctgggccgcaagaagcagggcattgtaacgcctatcgaggcccaaacacgggtgcggggctccggcctgggtgcacggggcagctcctacggggtcacctcaaccgagtcctacaaggagacactgcacaagacaatggtgacccgcttcaacgaggcccagtgagcagcttcaagagcaacttctccacatgttgggtgtccatcctggggcagggaaggacagagtgttggatggctgggacggggccttgctcttgtcggccagcccactccccagccagagagggcttgaccaaatcaaattgaggtggtgacttttgttggaaaattgggctgggatcacgtcctgttttgtaataaaagctgaaaagtctgca

SEQ ID NO: 370734 - DNA, 3695 bp, Homo sapiens
gcttattgatgggtctgctcatttcctgcataggaagaaatcggtgacattgggtggatacagttcccagccaatcgccccgagttccctcgcccactggggaaagaggcagagcttccgctagtctttcatcttcaaaggaaatcaagcttctaaaaagcgggccctgccgaattggctaatagctactccttttctccactaggggagcgttcgcaaggggtgtggggaggtggccagcgcttgccaatcagaggaggccagggctgtcccctagcgggcggtgaccaatcgccggggccggccagagcgcgcttccttagtaggtggatggtggtcggagcgccgactcccttctcgtcgtcgccattttgagctggtgactgtggccggctgggagtaggcggcagtgagtttccctgggagggcagcgcgcttggcgcttctcccctccccccgatctgcctccagtctcggacttggttgttgcgcgctccggctccggctgagctgggagagttggaggaggtggcggcgggcagaggtgatgtctgggagcccttccttgacagcccgggccgagaagagtccctgcaggaagcatcacccaggctggcagatcatggtagcagcagcgggggtggctgggaagtgaaacggagccagcggctgaggaggggccccagcagcccccgaaggccctatcaggacatggagtatgaaagacgtggtggtcgtggtgacaggactggccgctatggagccactgaccgctcgcaggatgatggtggggagaaccgcagccgagaccacgactaccgggacatggactaccgttcatatcctcgcgagtatggcagccaggagggcaagcatgactatgacgactcatctgaggagcagagtgcggaggattcctacgaggcctccccgggctccgagactcagcgtaggcggcggcggcggcacaggcttcccccgagacggcgactatcgggaccaggactatcggaccgagcaaggggaggaggaggaggaggaggaggatgaggaggaggaggagaaggccagtaacatcgtcatgctgaggatgctgccacaggcagccactgaggatgacatccgtggccagctgcagtcgcacggcgtgcaagcacgggaggttcggctgatgcggaacaaatcttcaggtcagagccggggcttcgccttcgtcgagtttagtcacttgcaggacgctacacgatggatggaagccaatcagcactccctcaacatcctgggccagaaggtgtcgatgcactacagtgaccccaagcccaagatcaatgaggactggctgtgcaataagtgtggcgtccagaacttcaaacgccgagagaagtgcttcaaatgtggcgtgcccaagtcagaggcagagcagaagctgcccctcggcacgaggctggatcagcagacactgccactgggtggccgggagctgagccagggcctgcttcccctgccgcagccctaccaggcccagggagtcctggcctcccaagccctgtcacagggctcggagccaagctcagagaacgccaatgacaccatcattttgcgcaacctgaacccacacagcaccatggattccatcctgggggccctggcaccctacgcggtgctgtcctcctccaacgtgcgcgtcataaaggacaagcagacccaactgaaccgcggctttgccttcatccagctctccaccatcgtggaggcagcccagctgctgcagatcctgcaggccctgcacccaccactcactatcgacggcaagaccatcaatgttgagtttgccaagggttctaagagggacatggcctccaatgaaggcagtcgcatcagtgctgcctctgtggccagcactgccattgctgcggcccagtgggccatctcacaggcctcccaaggtggggagggtacctgggccacctccgaggagccgccggtcgactacagctactaccaacaggatgagggctatggcaacagccagggcacagagtcttccctctatgcccatggctacctcaagggcaccaagggccctggcatcactggaaccaaaggggatcccactggagcaggtcccgaggcctccctagagcctggggccgactctgtgtcgatgcaggctttctctcgcgcccagcctggtgctgctcctggcatctaccaacaatcagccgaggcgagcagtagccagggcactgctgccaacagccagtcgtataccatcatgtcacccgctgtgctcaaatctgagctccagagccctacccatcctagttctgctctcccaccggctaccagccccactgcccaggaatcctacagccagtaccctgttcccgacgtctctacctaccagtacgatgagacctccggctactactatgacccccagaccggcctctactatgaccccaactcccagtattactacaatgctcagagccagcagtacctgtactgggatggggagaggcggacctatgttcccgccctggagcagtcggccgacggacataaggagacaggggcaccctcgaaggagggcaaagagaagaaggagaagcacaagaccaagacagctcaacagattgccaaggacatggaacgctgggcccgcagtctcaacaaacaaaaagaaaacttcaaaaatagcttccagcctatcagctccctgcgagatgacgagaggcgggagtcagccactgcagatgctggctatgccatcctcgagaagaagggagcactagccgagagacagcacaccagcatggatctcccgaaattggccagtgacgaccgcccaagccctccgcgaggactggtggcagcctacagcggggagagtgacagtgaggaggagcaggagcgtgggggccctgagcgggaggagaagctcaccgactggcagaagctggcctgtctgctctgccgacgccagttccccagcaaagaggcgctcatccggcaccagcagctctcagggctccacaagcaaaaccttgagattcaccggcgagcccacttgtcagaaaacgagctagaagcactagagaagaatgacatggagcaaatgaagtaccgggaccgtgcagctgaacgcagagaaaagtatggcatccccgagccgccagagcccaagaggaggaagtacggcggcatatccacagcctctgtagacttcgagcagcctactcgggacgggctgggcagtgacaacattggcagtcggatgctgcaggccatgggctggaaagagggcagcggcctgggccgcaagaagcagggcattgtaacgcctatcgaggcccaaacacgggtgcggggctccggcctgggtgcacggggcagctcctacggggtcacctcaaccgagtcctacaaggagacactgcacaagacaatggtgacccgcttcaacgaggcccagtgagcagcttcaagagcaacttctccacatgttgggtgtccatcctggggcagggaaggacagagtgttggatggctgggacggggccttgctcttgtcggccagcccactccccagccagagagggcttgaccaaatcaaattgaggtggtgacttttgttggaaaattgggctgggatcacgtcctgttttgtaataaaagctgaaaagtctgca

SEQ ID NO: 370735 - DNA, 4153 bp, Homo sapiens
  misc_feature (3761)..(3761): n is a, c, g, or t
  misc_feature (3763)..(3763): n is a, c, g, or t
  misc_feature (3765)..(3765): n is a, c, g, or t
  misc_feature (3770)..(3770): n is a, c, g, or t
  misc_feature (3772)..(3772): n is a, c, g, or t
gcttattgatgggtctgctcatttcctgcataggaagaaatcggtgacattgggtggatacagttcccagccaatcgccccgagttccctcgcccactggggaaagaggcagagcttccgctagtctttcatcttcaaaggaaatcaagcttctaaaaagcgggccctgccgaattggctaatagctactccttttctccactaggggagcgttcgcaaggggtgtggggaggtggccagcgcttgccaatcagaggaggccagggctgtcccctagcgggcggtgaccaatcgccggggccggccagagcgcgcttccttagtaggtggatggtggtcggagcgccgactcccttctcgtcgtcgccattttgagctggtgactgtggccggctgggagtaggcggcagtgagtttccctgggagggcagcgcgcttggcgcttctcccctccccccgatctgcctccagtctcggacttggttgttgcgcgctccggctccggctgagctgggagagttggaggaggtggcggcgggcagaggtgatgtctgggagcccttccttgacagcccgggccgagaagagtccctgcaggaagcatcacccaggctggcagatcatggtagcagcagcgggggtggctgggaagtgaaacggagccagcggctgaggaggggccccagcagcccccgaaggccctatcaggacatggagtatgaaagacgtggtggtcgtggtgacaggactggccgctatggagccactgaccgctcgcaggatgatggtggggagaaccgcagccgagaccacgactaccgggacatggactaccgttcatatcctcgcgagtatggcagccaggagggcaagcatgactatgacgactcatctgaggagcagagtgcggaggattcctacgaggcctccccgggctccgagactcagcgtaggcggcggcggcggcacaggcacagccccaccggcccgccaggcttcccccgagacggcgactatcgggaccaggactatcggaccgagcaaggggaggaggaggaggaggaggaggatgaggaggaggaggagaaggccagtaacatcgtcatgctgaggatgctgccacaggcagccactgaggatgacatccgtggccagctgcagtcgcacggcgtgcaagcacgggaggttcggctgatgcggaacaaatcttcaggtcagagccggggcttcgccttcgtcgagtttagtcacttgcaggacgctacacgatggatggaagccaatcagcactccctcaacatcctgggccagaaggtgtcgatgcactacagtgaccccaagcccaagatcaatgaggactggctgtgcaataagtgtggcgtccagaacttcaaacgccgagagaagtgcttcaaatgtggcgtgcccaagtcagaggcagagcagaagctgcccctcggcacgaggctggatcagcagacactgccactgggtggccgggagctgagccagggcctgcttcccctgccgcagccctaccaggcccagggagtcctggcctcccaagccctgtcacagggctcggagccaagctcagagaacgccaatgacaccatcattttgcgcaacctgaacccacacagcaccatggattccatcctgggggccctggcaccctacgcggtgctgtcctcctccaacgtgcgcgtcataaaggacaagcagacccaactgaaccgcggctttgccttcatccagctctccaccatcgtggaggcagcccagctgctgcagatcctgcaggccctgcacccaccactcactatcgacggcaagaccatcaatgttgagtttgccaagggttctaagagggacatggcctccaatgaaggcagtcgcatcagtgctgcctctgtggccagcactgccattgctgcggcccagtgggccatctcacaggcctcccaaggtggggagggtacctgggccacctccgaggagccgccggtcgactacagctactaccaacaggatgagggctatggcaacagccagggcacagagtcttccctctatgcccatggctacctcaagggcaccaagggccctggcatcactggaaccaaaggggatcccactggagcaggtcccgaggcctccctagagcctggggccgactctgtgtcgatgcaggctttctctcgcgcccagcctggtgctgctcctggcatctaccaacaatcagccgaggcgagcagtagccagggcactgctgccaacagccagtcgtataccatcatgtcacccgctgtgctcaaatctgagctccagagccctacccatcctagttctgctctcccaccggctaccagccccactgcccaggaatcctacagccagtaccctgttcccgacgtctctacctaccagtacgatgagacctccggctactactatgacccccagaccggcctctactatgaccccaactcccagtattactacaatgctcagagccagcagtacctgtactgggatggggagaggcggacctatgttcccgccctggagcagtcggccgacggacataaggagacaggggcaccctcgaaggagggcaaagagaagaaggagaagcacaagaccaagacagctcaacagattgccaaggacatggaacgctgggcccgcagtctcaacaaacaaaaagaaaacttcaaaaatagcttccagcctatcagctccctgcgagatgacgagaggcgggagtcagccactgcagatgctggctatgccatcctcgagaagaagggagcactagccgagagacagcacaccagcatggatctcccgaaattggccagtgacgaccgcccaagccctccgcgaggactggtggcagcctacagcggggagagtgacagtgaggaggagcaggagcgtgggggccctgagcgggaggagaagctcaccgactggcagaagctggcctgtctgctctgccgacgccagttccccagcaaagaggcgctcatccggcaccagcagctctcagggctccacaagcaaaaccttgagattcaccggcgagcccacttgtcagaaaacgagctagaagcactagagaagaatgacatggagcaaatgaagtaccgggaccgtgcagctgaacgcagagaaaagtatggcatccccgagccgccagagcccaagaggaggaagtacggcggcatatccacagcctctgtagacttcgagcagcctactcgggacgggctgggcagtgacaacattggcagtcggatgctgcaggccatgggctggaaagagggcagcggcctgggccgcaagaagcagggcattgtaacgcctatcgaggcccaaacacgggtgcggggctccggcctgggtgcacggggcagctcctacggggtcacctcaaccgagtcctacaaggagacactgcacaagacaatggtgacccgcttcaacgaggcccagtgagcagcttcaagagcaacttctccacatgttgggtgtccatcctggggcagggaaggacagagtgttggatggctgggacggggccttgctcttgtcggccagcccactccccagccagagagggcttgaccaaatcaaattgaggtggtgacttttgttggaaaattgggctgggatcacgtcctgttttgtaataaaagctgaaaagtctgcaaaaaaaaaaaaaaaaaaaaaaataaaagaaaaaaaaaaaaaananangaaananaaaaaaaaaaggacaaagaggaaataggtctatactagtataacaactgtctcaggcttagaggaacatctgaaatagagtagtatgctatgttggctaaaactggtgtcatcactacagtggcataatattgaactgggcagcagcatgcggaaaatactacagagtgtgcacagtggctatcattgatccaggtgactctgacgatcatatagcaagcatgggagaacagactggttgaaaaagtaaaccgttgttgtaccctacgagaaatttcattcgtggcaaaaccgtttaaaagacttgtgaagagatttgtgccgtgtataagtaaaaattgagcattggttttaaaaagcaaaaaaaagaaataaaacaggg

SEQ ID NO: 370736 - DNA, 3889 bp, Homo sapiens
gcttattgatgggtctgctcatttcctgcataggaagaaatcggtgacattgggtggatacagttcccagccaatcgccccgagttccctcgcccactggggaaagaggcagagcttccgctagtctttcatcttcaaaggaaatcaagcttctaaaaagcgggccctgccgaattggctaatagctactccttttctccactaggggagcgttcgcaaggggtgtggggaggtggccagcgcttgccaatcagaggaggccagggctgtcccctagcgggcggtgaccaatcgccggggccggccagagcgcgcttccttagtaggtggatggtggtcggagcgccgactcccttctcgtcgtcgccattttgagctggtgactgtggccggctgggagtaggcggcagtgagtttccctgggagggcagcgcgcttggcgcttctcccctccccccgatctgcctccagtctcggacttggttgttgcgcgctccggctccggctgagctgggagagttggaggaggtggcggcgggcagaggtgatgtctgggagcccttccttgacagcccgggccgagaagagtccctgcaggaagcatcacccaggctggcagatcatggtagcagcagcgggggtggctgggaagtgaaacggagccagcggctgaggaggggccccagcagcccccgaaggccctatcaggacatggagtatgaaagacgtggtggtcgtggtgacaggactggccgctatggagccactgaccgctcgcaggatgatggtggggagaaccgcagccgagaccacgactaccgggacatggactaccgttcatatcctcgcgagtatggcagccaggagggcaagcatgactatgacgactcatctgaggagcagagtgcggaggattcctacgaggcctccccgggctccgagactcagcgtaggcggcggcggcggcacaggcacagccccaccggcccgccaggcttcccccgagacggcgactatcgggaccaggactatcggaccgagcaaggggaggaggaggaggaggaggaggatgaggaggaggaggagaaggccagtaacatcgtcatgctgaggatgctgccacaggcagccactgaggatgacatccgtggccagctgcagtcgcacggcgtgcaagcacgggaggttcggctgatgcggaacaaatcttcaggtcagagccggggcttcgccttcgtcgagtttagtcacttgcaggacgctacacgatggatggaagccaatcagcactccctcaacatcctgggccagaaggtgtcgatgcactacagtgaccccaagcccaagatcaatgaggactggctgtgcaataagtgtggcgtccagaacttcaaacgccgagagaagtgcttcaaatgtggcgtgcccaagtcagaggcagagcagaagctgcccctcggcacgaggctggatcagcagacactgccactgggtggccgggagctgagccagggcctgcttcccctgccgcagccctaccaggcccagggagtcctggcctcccaagccctgtcacagggctcggagccaagctcagagaacgccaatgacaccatcattttgcgcaacctgaacccacacagcaccatggattccatcctgggggccctggcaccctacgcggtgctgtcctcctccaacgtgcgcgtcataaaggacaagcagacccaactgaaccgcggctttgccttcatccagctctccaccatcgtggaggcagcccagctgctgcagatcctgcaggccctgcacccaccactcactatcgacggcaagaccatcaatgttgagtttgccaagggttctaagagggacatggcctccaatgaaggcagtcgcatcagtgctgcctctgtggccagcactgccattgctgcggcccagtgggccatctcacaggcctcccaaggtggggagggtacctgggccacctccgaggagccgccggtcgactacagctactaccaacaggatgagggctatggcaacagccagggcacagagtcttccctctatgcccatggctacctcaagggcaccaagggccctggcatcactggaaccaaaggggatcccactggagcaggtcccgaggcctccctagagcctggggccgactctgtgtcgatgcaggctttctctcgcgcccagcctggtgctgctcctggcatctaccaacaatcagccgaggcgagcagtagccagggcactgctgccaacagccagtcgtataccatcatgtcacccgctgtgctcaaatctgagctccagagccctacccatcctagttctgctctcccaccggctaccagccccactgcccaggaatcctacagccagtaccctgttcccgacgtctctacctaccagtacgatgagacctccggctactactatgacccccagaccggcctctactatgaccccaactcccagtattactacaatgctcagagccagcagtacctgtactgggatggggagaggcggacctatgttcccgccctggagcagtcggccgacggacataaggagacaggggcaccctcgaaggagggcaaagagaagaaggagaagcacaagaccaagacagctcaacagattgccaaggacatggaacgctgggcccgcagtctcaacaaacaaaaagaaaacttcaaaaatagcttccagcctatcagctccctgcgagatgacgagaggcgggagtcagccactgcagatgctggctatgccatcctcgagaagaaggtgtgttggggccacccccctgcaccctgccccacaatcttgtccttcctttgggccctctgtggagtccctgaatttctgtgtccctccaccccagggagcactagccgagagacagcacaccagcatggatctcccgaaattggccagtgacgaccgcccagtgagtgcccaaggcagagaggggcgggggctctgatctggccaggcctgaccgcccaccctcaccctctacagagccctccgcgaggactggtggcagcctacagcggggagagtgacagtgaggaggagcaggagcgtgggggccctgagcgggaggagaagctcaccgactggcagaagctggcctgtctgctctgccgacgccagttccccagcaaagaggcgctcatccggcaccagcagctctcagggctccacaagcaaaaccttgagattcaccggcgagcccacttgtcagaaaacgagctagaagcactagagaagaatgacatggagcaaatgaagtaccgggaccgtgcagctgaacgcagagaaaagtatggcatccccgagccgccagagcccaagaggaggaagtacggcggcatatccacagcctctgtagacttcgagcagcctactcgggacgggctgggcagtgacaacattggcagtcggatgctgcaggccatgggctggaaagagggcagcggcctgggccgcaagaagcagggcattgtaacgcctatcgaggcccaaacacgggtgcggggctccggcctgggtgcacggggcagctcctacggggtcacctcaaccgagtcctacaaggagacactgcacaagacaatggtgacccgcttcaacgaggcccagtgagcagcttcaagagcaacttctccacatgttgggtgtccatcctggggcagggaaggacagagtgttggatggctgggacggggccttgctcttgtcggccagcccactccccagccagagagggcttgaccaaatcaaattgaggtggtgacttttgttggaaaattgggctgggatcacgtcctgttttgtaataaaagctgaaaagtctgca

SEQ ID NO: 370737 - DNA, 3493 bp, Homo sapiens
gcttattgatgggtctgctcatttcctgcataggaagaaatcggtgacattgggtggatacagttcccagccaatcgccccgagttccctcgcccactggggaaagaggcagagcttccgctagtctttcatcttcaaaggaaatcaagcttctaaaaagcgggccctgccgaattggctaatagctactccttttctccactaggggagcgttcgcaaggggtgtggggaggtggccagcgcttgccaatcagaggaggccagggctgtcccctagcgggcggtgaccaatcgccggggccggccagagcgcgcttccttagtaggtggatggtggtcggagcgccgactcccttctcgtcgtcgccattttgagctggtgactgtggccggctgggagtaggcggcagtgagtttccctgggagggcagcgcgcttggcgcttctcccctccccccgatctgcctccagtctcggacttggttgttgcgcgctccggctccggctgagctgggagagttggaggaggtggcggcgggcagaggtgatgtctgggagcccttccttgacagcccgggccgagaagagtccctgcaggaagcatcacccaggctggcagatcatggtagcagcagcgggggtggctgggaagtgaaacggagccagcggctgaggaggggccccagcagcccccgaaggccctatcaggacatggagtatgaaagacgtggtggtcgtggtgacaggactggccgctatggagccactgaccgctcgcaggatgatggtggggagaaccgcagccgagaccacgactaccgggacatggactaccgttcatatcctcgcgagtatggcagccaggagggcaagcatgactatgacgactcatctgaggagcagagtgcggaggattcctacgaggcctccccgggctccgagactcagcgtaggcggcggcggcggcacaggcacagccccaccggcccgccaggcttcccccgagacggcgactatcgggaccaggactatcggaccgagcaaggggaggaggaggaggaggaggaggatgaggaggaggaggagaaggccagtaacatcgtcatgctgaggatgctgccacaggcagccactgaggatgacatccgtggccagctgcagtcgcacggcgtgcaagcacgggaggttcggctgatgcggaacaaatcttcaggtcagagccggggcttcgccttcgtcgagtttagtcacttgcaggacgctacacgatggatggaagccaatcagcactccctcaacatcctgggccagaaggtgtcgatgcactacagtgaccccaagcccaagatcaatgaggactggctgtgcaataagtgtggcgtccagaacttcaaacgccgagagaagtgcttcaaatgtggcgtgcccaagtcagaggcagagcagaagctgcccctcggcacgaggctggatcagcagacactgccactgggtggccgggagctgagccagggcctgcttcccctgccgcagccctaccaggcccagggagtcctggcctcccaagccctgtcacagggctcggagccaagctcagagaacgccaatgacaccatcattttgcgcaacctgaacccacacagcaccatggattccatcctgggggccctggcaccctacgcggtgctgtcctcctccaacgtgcgcgtcataaaggacaagcagacccaactgaaccgcggctttgccttcatccagctctccaccatcgtggaggcagcccagctgctgcagatcctgcaggccctgcacccaccactcactatcgacggcaagaccatcaatgttgagtttgccaagggttctaagagggacatggcctccaatgaaggcagtcgcatcagtgctgcctctgtggccagcactgccattgctgcggcccagtgggccatctcacaggcctcccaaggtggggagggtacctgggccacctccgaggagccgccggtcgactacagctactaccaacaggatgagggctatggcaacagccagggcacagagtcttccctctatgcccatggctacctcaagggcaccaagggccctggcatcactggaaccaaaggggatcccactggagcaggtcccgaggcctccctagagcctggggccgactctgtgtcgatgcaggctttctctcgcgcccagcctggtgctgctcctggcatctaccaacaatcagccgaggcgagcagtagccagggcactgctgccaacagccagtcgtataccatcatgtcacccgctgtgctcaaatctgagctccagagccctacccatcctagttctgctctcccaccggctaccagccccactgcccaggaatcctacagccagtaccctgttcccgacgtctctacctaccagtacgatgagacctccggctactactatgacccccagaccggcctctactatgaccccaactcccagtattactacaatgctcagagccagcagtacctgtactgggatggggagaggcggacctatgttcccgccctggagcagtcggccgacggacataaggagacaggggcaccctcgaaggagggcaaagagaagaaggagaagcacaagaccaagacagctcaacagattgccaaggacatggaacgctgggcccgcagtctcaacaaacaaaaagaaaacttcaaaaatagcttccagcctatcagctccctgcgagatgacgagaggcgggagtcagccactgcagatgctggctatgccatcctcgagaagaagggagcactagccgagagacagcacaccagcatggatctcccgaaattggccagtgacgaccgcccaagccctccgcgaggactggtggcagcctacagcggggagagtgacagtgaggaggagcaggagcgtgggggccctgagcgggaggagaagctcaccgactggcagaagctggcctgtctgctctgccgacgccagttccccagcaaagaggcgctcatccggcaccagcagctctcagggctccacaagcaaaaccttgagattcaccggcgagcccacttgtcagaaaacgagctagaagcactagagaagcagggcattgtaacgcctatcgaggcccaaacacgggtgcggggctccggcctgggtgcacggggcagctcctacggggtcacctcaaccgagtcctacaaggagacactgcacaagacaatggtgacccgcttcaacgaggcccagtgagcagcttcaagagcaacttctccacatgttgggtgtccatcctggggcagggaaggacagagtgttggatggctgggacggggccttgctcttgtcggccagcccactccccagccagagagggcttgaccaaatcaaattgaggtggtgacttttgttggaaaattgggctgggatcacgtcctgttttgtaataaaagctgaaaagtctgca

SEQ ID NO: 370738 - DNA, 1506 bp, Homo sapiens
tcggcacgaggcctggctactgctcgcctcggctgattgttggtagatgccagggcactgctgccaacagccagtcgtataccatcatgtcacccgctgtgctcaaatctgagctccagagccctacccatcctagttctgctctcccaccggctaccagccccactgcccaggaatcctacagccagtaccctgttcccgacgtctctacctaccagtacgatgagacctccggctactactatgacccccagaccggcctctactatgaccccaactcccagtattactacaatgctcagagccagcagtacctgtactgggatggggagaggcggacctatgttcccgccctggagcagtcggccgacggacataaggagacaggggcaccctcgaaggagggcaaagagaagaaggagaagcacaagaccaagacagctcaacagattgccaaggacatggaacgctgggcccgcagtctcaacaaacaaaaagaaaacttcaaaaatagcttccagcctatcagctccctgcgagatgacgagaggcgggagtcagccactgcagatgctggctatgccatcctcgagaagaagggagcactagccgagagacagcacaccagcatggatctcccgaaattggccagtgacgaccgcccaagccctccgcgaggactggtggcagcctacagcggggagagtgacagtgaggaggagcaggagcgtgggggccctgagcgggaggagaagctcaccgactggcagaagctggcctgtctgctctgccgacgccagttccccagcaaagaggcgctcatccggcaccagcagctctcagggctccacaagcaaaaccttgagattcaccggcgagcccacttgtcagaaaacgagctagaagcactagagaagaatgacatggagcaaatgaagtaccgggaccgtgcagctgaacgcagagaaaagtatggcatccccgagccgccagagcccaagaggaggaagtacggcggcatatccacagcctctgtagacttcgagcagcctactcgggacgggctgggcagtgacaacattggcagtcggatgctgcaggccatgggctggaaagagggcagcggcctgggccgcaagaagcagggcattgtaacgcctatcgaggcccaaacacgggtgcggggctccggcctgggtgcacggggcagctcctacggggtcacctcaaccgagtcctacaaggagacactgcacaagacaatggtgacccgcttcaacgaggcccagtgagcagcttcaagagcaacttctccacatgttgggtgtccatcctggggcagggaaggacagagtgttggatggctgggacggggccttgctcttgtcggccagcccactccccagccagagagggcttgaccaaatcaaattgaggtggtgacttttgttggaaaattgggctgggatcacgtcctgttttgtaataaaagctgaaaagtctgca

SEQ ID NO: 370739 - DNA, 2977 bp, Homo sapiens
gcttattgatgggtctgctcatttcctgcataggaagaaatcggtgacattgggtggatacagttcccagccaatcgccccgagttccctcgcccactggggaaagaggcagagcttccgctagtctttcatcttcaaaggaaatcaagcttctaaaaagcgggccctgccgaattggctaatagctactccttttctccactaggggagcgttcgcaaggggtgtggggaggtggccagcgcttgccaatcagaggaggccagggctgtcccctagcgggcggtgaccaatcgccggggccggccagagcgcgcttccttagtaggtggatggtggtcggagcgccgactcccttctcgtcgtcgccattttgagctggtgactgtggccggctgggagtaggcggcagtgagtttccctgggagggcagcgcgcttggcgcttctcccctccccccgatctgcctccagtctcggacttggttgttgcgcgctccggctccggctgagctgggagagttggaggaggtggcggcgggcagaggtgatgtctgggagcccttccttgacagcccgggccgagaagagtccctgcaggaagcatcacccaggctggcagatcatggtagcagcagcgggggtggctgggaagtgaaacggagccagcggctgaggaggggccccagcagcccccgaaggccctatcaggacatggagtatgaaagacgtggtggtcgtggtgacaggactggccgctatggagccactgaccgctcgcaggatgatggtggggagaaccgcagccgagaccacgactaccgggacatggactaccgttcatatcctcgcgagtatggcagccaggagggcaagcatgactatgacgactcatctgaggagcagagtgcggaggattcctacgaggcctccccgggctccgagactcagcgtaggcggcggcggcggcacaggcacagccccaccggcccgccaggcttcccccgagacggcgactatcgggaccaggactatcggaccgagcaaggggaggaggaggaggaggaggaggatgaggaggaggaggagaaggccagtaacatcgtcatgctgaggatgctgccacaggcagccactgaggatgacatccgtggccagctgcagtcgcacggcgtgcaagcacgggaggttcggctgatgcggaacaaatcttcaggtcagagccggggcttcgccttcgtcgagtttagtcacttgcaggacgctacacgatggatggaagccaatcagcactccctcaacatcctgggccagaaggtgtcgatgcactacagtgaccccaagcccaagatcaatgaggactggctgtgcaataagtgtggcgtccagaacttcaaacgccgagagaagtgcttcaaatgtggcgtgcccaagtcagaggcagagcagaagctgcccctcggcacgaggctggatcagcagacactgccactgggtggccgggagctgagccagggcctgcttcccctgccgcagccctaccaggcccagggagtcctggcctcccaagccctgtcacagggctcggagccaagctcagagaacgccaatgacaccatcattttgcgcaacctgaacccacacagcaccatggattccatcctgggggccctggcaccctacgcggtgctgtcctcctccaacgtgcgcgtcataaaggacaagcagacccaactgaaccgcggctttgccttcatccagctctccaccatcgtggaggcagcccagctgctgcagatcctgcaggccctgcacccaccactcactatcgacggcaagaccatcaatgttgagtttgccaagggttctaagagggacatggcctccaatgaaggcagtcgcatcagtgctgcctctgtggccagcactgccattgctgcggcccagtgggccatctcacaggcctcccaaggtggggagggtacctgggccacctccgaggagccgccggtcgactacagctactaccaacaggatgagggctatggcaacagccagggcacagagtcttccctctatgcccatggctacctcaagggcaccaagggccctggcatcactggaaccaaaggggatcccactggagcaggtcccgaggcctccctagagcctggggccgactctgtgtcgatgcaggctttctctcgcgcccagcctggtgctgctcctggcatctaccaacaatcagccgaggcgagcagtagccagggcactgctgccaacagccagtcgtataccatcatgtcacccgctgtgctcaaatctgagctccagagccctacccatcctagttctgctctcccaccggctaccagccccactgcccaggaatcctacagccagtaccctgttcccgacgtctctacctaccagtacgatgagacctccggctactactatgacccccagaccggcctctactatgaccccaactcccagtattactacaatgctcagagccagcagtacctgtactgggatggggagaggcggacctatgttcccgccctggagcagtcggccgacggacataaggagacaggggcaccctcgaagcagggcattgtaacgcctatcgaggcccaaacacgggtgcggggctccggcctgggtgcacggggcagctcctacggggtcacctcaaccgagtcctacaaggagacactgcacaagacaatggtgacccgcttcaacgaggcccagtgagcagcttcaagagcaacttctccacatgttgggtgtccatcctggggcagggaaggacagagtgttggatggctgggacggggccttgctcttgtcggccagcccactccccagccagagagggcttgaccaaatcaaattgaggtggtgacttttgttggaaaattgggctgggatcacgtcctgttttgtaataaaagctgaaaagtctgca

SEQ ID NO: 370740 - DNA, 2253 bp, Homo sapiens
gcttattgatgggtctgctcatttcctgcataggaagaaatcggtgacattgggtggatacagttcccagccaatcgccccgagttccctcgcccactggggaaagaggcagagcttccgctagtctttcatcttcaaaggaaatcaagcttctaaaaagcgggccctgccgaattggctaatagctactccttttctccactaggggagcgttcgcaaggggtgtggggaggtggccagcgcttgccaatcagaggaggccagggctgtcccctagcgggcggtgaccaatcgccggggccggccagagcgcgcttccttagtaggtggatggtggtcggagcgccgactcccttctcgtcgtcgccattttgagctggtgactgtggccggctgggagtaggcggcagtgagtttccctgggagggcagcgcgcttggcgcttctcccctccccccgatctgcctccagtctcggacttggttgttgcgcgctccggctccggctgagctgggagagttggaggaggtggcggcgggcagaggtgatgtctgggagcccttccttgacagcccgggccgagaagagtccctgcaggaagcatcacccaggctggcagatcatggtagcagcagcgggggtggctgggaagtgaaacggagccagcggctgaggaggggccccagcagcccccgaaggccctatcaggacatggagtatgaaagacgtggtggtcgtggtgacaggactggccgctatggagccactgaccgctcgcaggatgatggtggggagaaccgcagccgagaccacgactaccgggacatggactaccgttcatatcctcgcgagtatggcagccaggagggcaagcatgactatgacgactcatctgaggagcagagtgcggaggattcctacgaggcctccccgggctccgagactcagcgtaggcggcggcggcggcacaggcacagccccaccggcccgccaggcttcccccgagacggcgactatcgggaccaggactatcggaccgagcaaggggaggaggaggaggaggaggaggatgaggaggaggaggagaaggccagtaacatcgtcatgctgaggatgctgccacaggcagccactgaggatgacatccgtggccagctgcagtcgcacggcgtgcaagcacgggaggttcggctgatgcggaacaaatcttcaggtcagagccggggcttcgccttcgtcgagtttagtcacttgcaggacgctacacgatggatggaagccaatcagcactccctcaacatcctgggccagaaggtgtcgatgcactacagtgaccccaagcccaagatcaatgaggactggctgtgcaataagtgtggcgtccagaacttcaaacgccgagagaagtgcttcaaatgtggcgtgcccaagtcagaggcagagcagaagctgcccctcggcacgaggctggatcagcagacactgccactgggtggccgggagctgagccagggcctgcttcccctgccgcagccctaccaggcccagggagtcctggcctcccaagccctgtcacagggctcggagccaagctcagagaacgccaatgacaccatcattttgcgcaacctgaacccacacagcaccatggattccatcctgggggccctggcaccctacgcggtgctgtcctcctccaacgtgcgcgtcataaaggacaagcagacccaactgaaccgcggctttgccttcatccagctctccaccatcgtggaggcagcccagctgctgcagatcctgcaggccctgcacccaccactcactatcgacggcaagaccatcaatgttgagtttgccaagggttctaagagggacatggcctccaatgaaggcagtcgcatcagtgctgcctctgtggccagcactgccattgctgcggcccagtgggccatctcacaggcctcccaaggtggggagggtacctgggccacctccgaggagccgccggtcgactacagctactaccaacaggatgagggctatggcaacagccagggcacagagtcttccctctatgcccatggctacctcaaggacagagtgttggatggctgggacggggccttgctcttgtcggccagcccactccccagccagagagggcttgaccaaatcaaattgaggtggtgacttttgttggaaaattgggctgggatcacgtcctgttttgtaataaaagctgaaaagtctgca

SEQ ID NO: 370741 - DNA, 686 bp, Homo sapiens
cagagcccaagaggaggaagtacggcggcatatccacagcctctgtgtgagtggctgggccaggtgagggggtctggagcccggggccggggccggcaggccgaccactcatgctgtgcaccgcccctgcagagacttcgagcagcctactcgggacgggctgggcagtgacaacattggcagtcggatgctgcaggccatgggctggaaagagggcagcggcctgggccgcaagaagcagggcattgtaacgcctatcgaggtgagtctcaggcagtcctgtcccatcccccagcacccctcacagcatcccccaccagcctgacagagcctgcctccctcacacaggcccaaacacgggtgcggggctccggcctgggtgcacggggcagctcctacggggtcacctcaaccgagtcctacaaggagacactgcacaagacaatggtgacccgcttcaacgaggcccagtgagcagcttcaagagcaacttctccacatgttgggtgtccatcctggggcagggaaggacagagtgttggatggctgggacggggccttgctcttgtcggccagcccactccccagccagagagggcttgaccaaatcaaattgaggtggtgacttttgttggaaaattgggctgggatcacgtcctgttttgtaataaaagctgaaaagtctg

SEQ ID NO: 370742 - DNA, 415 bp, Homo sapiens
gaggtgaggtgtgacctgaccctgggctccctcccctgtgtcccttccaagtccccatcacctcaggcagctggagttcaatttctcacgtgttaaccccgtgagccttcttccccattttcctatcctggctgcttgtgcctgtgatggcctgaccctcaggacctgagcctcattagccagatggcatgccctgtgggaccccactccccatgcctgtgttgcctgagaaaagagaccagctccccaacattcacatacacatacaaactttcaagaatgacatggagcaaatgaagtaccgggaccgtgcagctgaacgcagagaaaagtatggcatccccgagccgccagagcccaagaggaggaagtacggcggcatatccacagcctctgtgtgagtggctgggccagg

SEQ ID NO: 370743 - DNA, 284 bp, Homo sapiens
ccggctactactatgacccccagaccggcctctactatgaccccaactcccaggtaatagggcagcccagggagggatgggatcgggtcaggtcgcgtcaggaacagctagccctgcaggttcccttcacaaggtcttccctcacatcccctcttccctcctcctccctcagtattactacaatgctcagagccagcagtacctgtactgggatggggagaggcggacctatgttcccgccctggagcagtcggccgacggacataaggagacaggggcaccct

SEQ ID NO: 370744 - DNA, 3487 bp, Homo sapiens
gcttattgatgggtctgctcatttcctgcataggaagaaatcggtgacattgggtggatacagttcccagccaatcgccccgagttccctcgcccactggggaaagaggcagagcttccgctagtctttcatcttcaaaggaaatcaagcttctaaaaagcgggccctgccgaattggctaatagctactccttttctccactaggggagcgttcgcaaggggtgtggggaggtggccagcgcttgccaatcagaggaggccagggctgtcccctagcgggcggtgaccaatcgccggggccggccagagcgcgcttccttagtaggtggatggtggtcggagcgccgactcccttctcgtcgtcgccattttgagctggtgactgtggccggctgggagtaggcggcagtgagtttccctgggagggcagcgcgcttggcgcttctcccctccccccgatctgcctccagtctcggacttggttgttgcgcgctccggctccggctgagctgggagagttggaggaggtggcggcgggcagaggtgatgtctgggagcccttccttgacagcccgggccgagaagagtccctgcaggaagcatcacccaggctggcagatcatggtagcagcagcgggggtggctgggaagtgaaacggagccagcggctgaggaggggccccagcagcccccgaaggccctatcaggacatggagtatgaaagacgtggtggtcgtggtgacaggactggccgctatggagccactgaccgctcgcaggatgatggtggggagaaccgcagccgagaccacgactaccgggacatggactaccgttcatatcctcgcgagtatggcagccaggagggcaagcatgactatgacgactcatctgaggagcagagtgcggagatccgtggccagctgcagtcgcacggcgtgcaagcacgggaggttcggctgatgcggaacaaatcttcaggtcagagccggggcttcgccttcgtcgagtttagtcacttgcaggacgctacacgatggatggaagccaatcagcactccctcaacatcctgggccagaaggtgtcgatgcactacagtgaccccaagcccaagatcaatgaggactggctgtgcaataagtgtggcgtccagaacttcaaacgccgagagaagtgcttcaaatgtggcgtgcccaagtcagaggcagagcagaagctgcccctcggcacgaggctggatcagcagacactgccactgggtggccgggagctgagccagggcctgcttcccctgccgcagccctaccaggcccagggagtcctggcctcccaagccctgtcacagggctcggagccaagctcagagaacgccaatgacaccatcattttgcgcaacctgaacccacacagcaccatggattccatcctgggggccctggcaccctacgcggtgctgtcctcctccaacgtgcgcgtcataaaggacaagcagacccaactgaaccgcggctttgccttcatccagctctccaccatcgtggaggcagcccagctgctgcagatcctgcaggccctgcacccaccactcactatcgacggcaagaccatcaatgttgagtttgccaagggttctaagagggacatggcctccaatgaaggcagtcgcatcagtgctgcctctgtggccagcactgccattgctgcggcccagtgggccatctcacaggcctcccaaggtggggagggtacctgggccacctccgaggagccgccggtcgactacagctactaccaacaggatgagggctatggcaacagccagggcacagagtcttccctctatgcccatggctacctcaagggcaccaagggccctggcatcactggaaccaaaggggatcccactggagcaggtcccgaggcctccctagagcctggggccgactctgtgtcgatgcaggctttctctcgcgcccagcctggtgctgctcctggcatctaccaacaatcagccgaggcgagcagtagccagggcactgctgccaacagccagtcgtataccatcatgtcacccgctgtgctcaaatctgagctccagagccctacccatcctagttctgctctcccaccggctaccagccccactgcccaggaatcctacagccagtaccctgttcccgacgtctctacctaccagtacgatgagacctccggctactactatgacccccagaccggcctctactatgaccccaactcccagtattactacaatgctcagagccagcagtacctgtactgggatggggagaggcggacctatgttcccgccctggagcagtcggccgacggacataaggagacaggggcaccctcgaaggagggcaaagagaagaaggagaagcacaagaccaagacagctcaacagattgccaaggacatggaacgctgggcccgcagtctcaacaaacaaaaagaaaacttcaaaaatagcttccagcctatcagctccctgcgagatgacgagaggcgggagtcagccactgcagatgctggctatgccatcctcgagaagaagggagcactagccgagagacagcacaccagcatggatctcccgaaattggccagtgacgaccgcccaagccctccgcgaggactggtggcagcctacagcggggagagtgacagtgaggaggagcaggagcgtgggggccctgagcgggaggagaagctcaccgactggcagaagctggcctgtctgctctgccgacgccagttccccagcaaagaggcgctcatccggcaccagcagctctcagggctccacaagcaaaaccttgagattcaccggcgagcccacttgtcagaaaacgagctagaagcactagagaagaatgacatggagcaaatgaagtaccgggaccgtgcagctgaacgcagagaaaagtatggcatccccgagccgccagagcccaagaggaggaagtacggcggcatatccacagcctctgtagacttcgagcagcctactcgggacgggctgggcagtgacaacattggcagtcggatgctgcaggccatgggctggaaagagggcagcggcctgggccgcaagaagcagggcattgtaacgcctatcgaggcccaaacacgggtgcggggctccggcctgggtgcacggggcagctcctacggggtcacctcaaccgagtcctacaaggagacactgcacaagacaatggtgacccgcttcaacgaggcccagtgagcagcttcaagagcaacttctccacatgttgggtgtccatcctggggcagggaaggacagagtgttggatggctgggacggggccttgctcttgtcggccagcccactccccagccagagagggcttgaccaaatcaaattgaggtggtgacttttgttggaaaattgggctgggatcacgtcctgttttgtaataaaagctgaaaagtctgca

SEQ ID NO: 370745 - DNA, 4173 bp, Homo sapiens
  misc_feature (3761)..(3761): n is a, c, g, or t
  misc_feature (3763)..(3763): n is a, c, g, or t
  misc_feature (3765)..(3765): n is a, c, g, or t
  misc_feature (3770)..(3770): n is a, c, g, or t
  misc_feature (3772)..(3772): n is a, c, g, or t
gcttattgatgggtctgctcatttcctgcataggaagaaatcggtgacattgggtggatacagttcccagccaatcgccccgagttccctcgcccactggggaaagaggcagagcttccgctagtctttcatcttcaaaggaaatcaagcttctaaaaagcgggccctgccgaattggctaatagctactccttttctccactaggggagcgttcgcaaggggtgtggggaggtggccagcgcttgccaatcagaggaggccagggctgtcccctagcgggcggtgaccaatcgccggggccggccagagcgcgcttccttagtaggtggatggtggtcggagcgccgactcccttctcgtcgtcgccattttgagctggtgactgtggccggctgggagtaggcggcagtgagtttccctgggagggcagcgcgcttggcgcttctcccctccccccgatctgcctccagtctcggacttggttgttgcgcgctccggctccggctgagctgggagagttggaggaggtggcggcgggcagaggtgatgtctgggagcccttccttgacagcccgggccgagaagagtccctgcaggaagcatcacccaggctggcagatcatggtagcagcagcgggggtggctgggaagtgaaacggagccagcggctgaggaggggccccagcagcccccgaaggccctatcaggacatggagtatgaaagacgtggtggtcgtggtgacaggactggccgctatggagccactgaccgctcgcaggatgatggtggggagaaccgcagccgagaccacgactaccgggacatggactaccgttcatatcctcgcgagtatggcagccaggagggcaagcatgactatgacgactcatctgaggagcagagtgcggaggattcctacgaggcctccccgggctccgagactcagcgtaggcggcggcggcggcacaggcacagccccaccggcccgccaggcttcccccgagacggcgactatcgggaccaggactatcggaccgagcaaggggaggaggaggaggaggaggaggatgaggaggaggaggagaaggccagtaacatcgtcatgctgaggatgctgccacaggcagccactgaggatgacatccgtggccagctgcagtcgcacggcgtgcaagcacgggaggttcggctgatgcggaacaaatcttcaggtcagagccggggcttcgccttcgtcgagtttagtcacttgcaggacgctacacgatggatggaagccaatcagcactccctcaacatcctgggccagaaggtgtcgatgcactacagtgaccccaagcccaagatcaatgaggactggctgtgcaataagtgtggcgtccagaacttcaaacgccgagagaagtgcttcaaatgtggcgtgcccaagtcagaggcagagcagaagctgcccctcggcacgaggctggatcagcagacactgccactgggtggccgggagctgagccagggcctgcttcccctgccgcagccctaccaggcccagggagtcctggcctcccaagccctgtcacagggctcggagccaagctcagagaacgccaatgacaccatcattttgcgcaacctgaacccacacagcaccatggattccatcctgggggccctggcaccctacgcggtgctgtcctcctccaacgtgcgcgtcataaaggacaagcagacccaactgaaccgcggctttgccttcatccagctctccaccatcgtggaggcagcccagctgctgcagatcctgcaggccctgcacccaccactcactatcgacggcaagaccatcaatgttgagtttgccaagggttctaagagggacatggcctccaatgaaggcagtcgcatcagtgctgcctctgtggccagcactgccattgctgcggcccagtgggccatctcacaggcctcccaaggtggggagggtacctgggccacctccgaggagccgccggtcgactacagctactaccaacaggatgagggctatggcaacagccagggcacagagtcttccctctatgcccatggctacctcaagggcaccaagggccctggcatcactggaaccaaaggggatcccactggagcaggtcccgaggcctccctagagcctggggccgactctgtgtcgatgcaggctttctctcgcgcccagcctggtgctgctcctggcatctaccaacaatcagccgaggcgagcagtagccagggcactgctgccaacagccagtcgtataccatcatgtcacccgctgtgctcaaatctgagctccagagccctacccatcctagttctgctctcccaccggctaccagccccactgcccaggaatcctacagccagtaccctgttcccgacgtctctacctaccagtacgatgagacctccggctactactatgacccccagaccggcctctactatgaccccaactcccagtattactacaatgctcagagccagcagtacctgtactgggatggggagaggcggacctatgttcccgccctggagcagtcggccgacggacataaggagacaggggcaccctcgaaggagggcaaagagaagaaggagaagcacaagaccaagacagctcaacagattgccaaggacatggaacgctgggcccgcagtctcaacaaacaaaaagaaaacttcaaaaatagcttccagcctatcagctccctgcgagatgacgagaggcgggagtcagccactgcagatgctggctatgccatcctcgagaagaagggagcactagccgagagacagcacaccagcatggatctcccgaaattggccagtgacgaccgcccaagccctccgcgaggactggtggcagcctacagcggggagagtgacagtgaggaggagcaggagcgtgggggccctgagcgggaggagaagctcaccgactggcagaagctggcctgtctgctctgccgacgccagttccccagcaaagaggcgctcatccggcaccagcagctctcagggctccacaagcaaaaccttgagattcaccggcgagcccacttgtcagaaaacgagctagaagcactagagaagaatgacatggagcaaatgaagtaccgggaccgtgcagctgaacgcagagaaaagtatggcatccccgagccgccagagcccaagaggaggaagtacggcggcatatccacagcctctgtagacttcgagcagcctactcgggacgggctgggcagtgacaacattggcagtcggatgctgcaggccatgggctggaaagagggcagcggcctgggccgcaagaagcagggcattgtaacgcctatcgaggcccaaacacgggtgcggggctccggcctgggtgcacggggcagctcctacggggtcacctcaaccgagtcctacaaggagacactgcacaagacaatggtgacccgcttcaacgaggcccagtgagcagcttcaagagcaacttctccacatgttgggtgtccatcctggggcagggaaggacagagtgttggatggctgggacggggccttgctcttgtcggccagcccactccccagccagagagggcttgaccaaatcaaattgaggtggtgacttttgttggaaaattgggctgggatcacgtcctgttttgtaataaaagctgaaaagtctgcaaaaaaaaaaaaaaaaaaaaaaataaaagaaaaaaaaaaaaaananangaaananaaaaaaaaaaaaaaaaaaaagagaaaaaaaaaaaaaaaaaaacaaaacaaacaggaacaaacgaggagcaaaaaaagacgcacacaacacaaaaaagccgaccagacagtacaaaagacaggaaggagcggggacaaacacgacacacaggagaaaacgacaaccgaaggcgcaccgccacaccaggggcgcgaccacccgacggcaaaaacgacccaccggcacaagacacaagagatcgcggagcaatatctgatagcacagctcacaagggtctatcctgggggcgttcccacaagagctgtcccaggcgcaggacgcatcctctgagatagattgggggttaacatgccacatgatcaacttgacagagccgttgcaaacagggcttacggggcaga

SEQ ID NO: 370746 - DNA, 2404 bp, Homo sapiens
cctggcatctaccaacaatcagccgaggcgagcagtagccaggcactgctgtacaattaagtgtggcgccagaacttcaaacgccgagagaagtgcttcaaatgtggcgtgcccaagtcagaggcagagcagaagctgcccctcggcacgaggctggatcagcagacactgccactgggtggccgggagctgagccagggcctgcttcccctgccgcagccctaccaggcccagggagtcctggcctcccaagccctgtcacagggctcggagccaagctcagagaacgccaatgacaccatcattttgcgcaacctgaacccacacagcaccatggattccatcctgggggccctggcaccctacgcggtgctgtcctcctccaacgtgcgcgtcataaaggacaagcagacccaactgaaccgcggctttgccttcatccagctctccaccatcgtggaggcagcccagctgctgcagatcctgcaggccctgcacccaccactcactatcgacggcaagaccatcaatgttgagtttgccaagggttctaagagggacatggcctccaatgaaggcagtcgcatcagtgctgcctctgtggccagcactgccattgctgcggcccagtgggccatctcacaggcctcccaaggtggggagggtacctgggccacctccgaggagccgccggtcgactacagctactaccaacaggatgagggctatggcaacagccagggcacagagtcttccctctatgcccatggctacctcaagggcaccaagggccctggcatcactggaaccaaaggggatcccactggagcaggtcccgaggcctccctagagcctggggccgactctgtgtcgatgcaggctttctctcgcgcccagcctggtgctgctcctggcatctaccaacaatcagccgaggcgagcagtagccagggcactgctgccaacagccagtcgtataccatcatgtcacccgctgtgctcaaatctgagctccagagccctacccatcctagttctgctctcccaccggctaccagccccactgcccaggaatcctacagccagtaccctgttcccgacgtctctacctaccagtacgatgagacctccggctactactatgacccccagaccggcctctactatgaccccaactcccagtattactacaatgctcagagccagcagtacctgtactgggatggggagaggcggacctatgttcccgccctggagcagtcggccgacggacataaggagacaggggcaccctcgaaggagggcaaagagaagaaggagaagcacaagaccaagacagctcaacagattgccaaggacatggaacgctgggcccgcagtctcaacaaacaaaaagaaaacttcaaaaatagcttccagcctatcagctccctgcgagatgacgagaggcgggagtcagccactgcagatgctggctatgccatcctcgagaagaagggagcactagccgagagacagcacaccagcatggatctcccgaaattggccagtgacgaccgcccaagccctccgcgaggactggtggcagcctacagcggggagagtgacagtgaggaggagcaggagcgtgggggccctgagcgggaggagaagctcaccgactggcagaagctggcctgtctgctctgccgacgccagttccccagcaaagaggcgctcatccggcaccagcagctctcagggctccacaagcaaaaccttgagattcaccggcgagcccacttgtcagaaaacgagctagaagcactagagaagaatgacatggagcaaatgaagtaccgggaccgtgcagctgaacgcagagaaaagtatggcatccccgagccgccagagcccaagaggaggaagtacggcggcatatccacagcctctgtagacttcgagcagcctactcgggacgggctgggcagtgacaacattggcagtcggatgctgcaggccatgggctggaaagagggcagcggcctgggccgcaagaagcagggcattgtaacgcctatcgaggcccaaacacgggtgcggggctccggcctgggtgcacggggcagctcctacggggtcacctcaaccgagtcctacaaggagacactgcacaagacaatggtgacccgcttcaacgaggcccagtgagcagcttcaagagcaacttctccacatgttgggtgtccatcctggggcagggaaggacagagtgttggatggctgggacggggccttgctcttgtcggccagcccactccccagccagagagggcttgaccaaatcaaattgaggtggtgacttttgttggaaaattgggctgggatcacgtcctgttttgtaataaaagctgaaaagtctgca

SEQ ID NO: 370747 - DNA, 3141 bp, Homo sapiens
gcttattgatgggtctgctcatttcctgcataggaagaaatcggtgacattgggtggatacagttcccagccaatcgccccgagttccctcgcccactggggaaagaggcagagcttccgctagtctttcatcttcaaaggaaatcaagcttctaaaaagcgggccctgccgaattggctaatagctactccttttctccactaggggagcgttcgcaaggggtgtggggaggtggccagcgcttgccaatcagaggaggccagggctgtcccctagcgggcggtgaccaatcgccggggccggccagagcgcgcttccttagtaggtggatggtggtcggagcgccgactcccttctcgtcgtcgccattttgagctggtgactgtggccggctgggagtaggcggcagtgagtttccctgggagggcagcgcgcttggcgcttctcccctccccccgatctgcctccagtctcggacttggttgttgcgcgctccggctccggctgagctgggagagttggaggaggtggcggcgggcagaggtgatgtctgggagcccttccttgacagcccgggccgagaagagtccctgcaggaagcatcacccaggctggcagatcatggtagcagcagcgggggtggctgggaagtgaaacggagccagcggctgaggaggggccccagcagcccccgaaggccctatcaggacatggagtatgaaagacgtggtggtcgtggtgacaggactggccgctatggagccactgaccgctcgcaggatgatggtggggagaaccgcagccgagaccacgactaccgggacatggactaccgttcatatcctcgcgagtatggcagccaggagggcaagcatgactatgacgactcatctgaggagcagagtgcggaggattcctacgaggcctccccgggctccgagactcagcgtaggcggcggcggcggcacaggcacagccccaccggcccgccaggcttcccccgagacggcgactatcgggaccaggactatcggaccgagcaaggggaggaggaggaggaggaggaggatgaggaggaggaggagaaggccagtaacatcgtcatgctgaggatgctgccacaggcagccactgaggatgacatccgtggccagctgcagtcgcacggcgtgcaagcacgggaggttcggctgatgcggaacaaatcttcaggtcagagccggggcttcgccttcgtcgagtttagtcacttgcaggacgctacacgatggatggaagccaatcagcactccctcaacatcctgggccagaaggtgtcgatgcactacagtgaccccaagcccaagatcaatgaggactggctgtgcaataagtgtggcgtgcctcccaaggtggggagggtacctgggccacctccgaggagccgccggtcgactacagctactaccaacaggatgagggctatggcaacagccagggcacagagtcttccctctatgcccatggctacctcaagggcaccaagggccctggcatcactggaaccaaaggggatcccactggagcaggtcccgaggcctccctagagcctggggccgactctgtgtcgatgcaggctttctctcgcgcccagcctggtgctgctcctggcatctaccaacaatcagccgaggcgagcagtagccagggcactgctgccaacagccagtcgtataccatcatgtcacccgctgtgctcaaatctgagctccagagccctacccatcctagttctgctctcccaccggctaccagccccactgcccaggaatcctacagccagtaccctgttcccgacgtctctacctaccagtacgatgagacctccggctactactatgacccccagaccggcctctactatgaccccaactcccagtattactacaatgctcagagccagcagtacctgtactgggatggggagaggcggacctatgttcccgccctggagcagtcggccgacggacataaggagacaggggcaccctcgaaggagggcaaagagaagaaggagaagcacaagaccaagacagctcaacagattgccaaggacatggaacgctgggcccgcagtctcaacaaacaaaaagaaaacttcaaaaatagcttccagcctatcagctccctgcgagatgacgagaggcgggagtcagccactgcagatgctggctatgccatcctcgagaagaagggagcactagccgagagacagcacaccagcatggatctcccgaaattggccagtgacgaccgcccaagccctccgcgaggactggtggcagcctacagcggggagagtgacagtgaggaggagcaggagcgtgggggccctgagcgggaggagaagctcaccgactggcagaagctggcctgtctgctctgccgacgccagttccccagcaaagaggcgctcatccggcaccagcagctctcagggctccacaagcaaaaccttgagattcaccggcgagcccacttgtcagaaaacgagctagaagcactagagaagaatgacatggagcaaatgaagtaccgggaccgtgcagctgaacgcagagaaaagtatggcatccccgagccgccagagcccaagaggaggaagtacggcggcatatccacagcctctgtagacttcgagcagcctactcgggacgggctgggcagtgacaacattggcagtcggatgctgcaggccatgggctggaaagagggcagcggcctgggccgcaagaagcagggcattgtaacgcctatcgaggcccaaacacgggtgcggggctccggcctgggtgcacggggcagctcctacggggtcacctcaaccgagtcctacaaggagacactgcacaagacaatggtgacccgcttcaacgaggcccagtgagcagcttcaagagcaacttctccacatgttgggtgtccatcctggggcagggaaggacagagtgttggatggctgggacggggccttgctcttgtcggccagcccactccccagccagagagggcttgaccaaatcaaattgaggtggtgacttttgttggaaaattgggctgggatcacgtcctgttttgtaataaaagctgaaaagtctgca

SEQ ID NO: 370748 - DNA, 3718 bp, Homo sapiens
  misc_feature (3203)..(3203): n is a, c, g, or t
  misc_feature (3205)..(3205): n is a, c, g, or t
  misc_feature (3208)..(3208): n is a, c, g, or t
  misc_feature (3233)..(3233): n is a, c, g, or t
  misc_feature (3237)..(3237): n is a, c, g, or t
  misc_feature (3273)..(3273): n is a, c, g, or t
  misc_feature (3277)..(3277): n is a, c, g, or t
  misc_feature (3279)..(3279): n is a, c, g, or t
  misc_feature (3282)..(3282): n is a, c, g, or t
  misc_feature (3285)..(3285): n is a, c, g, or t
  misc_feature (3288)..(3288): n is a, c, g, or t
  misc_feature (3291)..(3291): n is a, c, g, or t
  misc_feature (3303)..(3303): n is a, c, g, or t
  misc_feature (3305)..(3305): n is a, c, g, or t
  misc_feature (3313)..(3313): n is a, c, g, or t
  misc_feature (3322)..(3322): n is a, c, g, or t
  misc_feature (3339)..(3339): n is a, c, g, or t
gcttattgatgggtctgctcatttcctgcataggaagaaatcggtgacattgggtggatacagttcccagccaatcgccccgagttccctcgcccactggggaaagaggcagagcttccgctagtctttcatcttcaaaggaaatcaagcttctaaaaagcgggccctgccgaattggctaatagctactccttttctccactaggggagcgttcgcaaggggtgtggggaggtggccagcgcttgccaatcagaggaggccagggctgtcccctagcgggcggtgaccaatcgccggggccggccagagcgcgcttccttagtaggtggatggtggtcggagcgccgactcccttctcgtcgtcgccattttgagctggtgactgtggccggctgggagtaggcggcagtgagtttccctgggagggcagcgcgcttggcgcttctcccctccccccgatctgcctccagtctcggacttggttgttgcgcgctccggctccggctgagctgggagagttggaggaggtggcggcgggcagaggtgatgtctgggagcccttccttgacagcccgggccgagaagagtccctgcaggaagcatcacccaggctggcagatcatggtagcagcagcgggggtggctgggaagtgaaacggagccagcggctgaggaggggccccagcagcccccgaaggccctatcaggacatggagtatgaaagacgtggtggtcgtggtgacaggactggccgctatggagccactgaccgctcgcaggatgatggtggggagaaccgcagccgagaccacgactaccgggacatggactaccgttcatatcctcgcgagtatggcagccaggagggcaagcatgactatgacgactcatctgaggagcagagtgcggaggattcctacgaggcctccccgggctccgagactcagcgtaggcggcggcggcggcacaggcacagccccaccggcccgccaggcttcccccgagacggcgactatcgggaccaggactatcggaccgagcaaggggaggaggaggaggaggaggaggatgaggaggaggaggagaaggccagtaacatcgtcatgctgaggatgctgccacaggcagccactgaggatgacatccgtggccagctgcagtcgcacggcgtgcaagcacgggaggttcggctgatgcggaacaaatcttcaggtcagagccggggcttcgccttcgtcgagtttagtcacttgcaggacgctacacgatggatggaagccaatcagcactccctcaacatcctgggccagaaggtgtcgatgcactacagtgaccccaagcccaagatcaatgaggactggctgtgcaataagtgtggcgtccagaacttcaaacgccgagagaagtgcttcaaatgtggcgtgcccaagtcagaggcagagcagaagctgcccctcggcacgaggctggatcagcagacactgccactgggtggccgggagctgagccagggcctgcttcccctgccgcagccctaccaggcccagggagtcctggcctcccaagccctgtcacagggctcggagccaagctcagagaacgccaatgacaccatcattttgcgcaacctgaacccacacagcaccatggattccatcctgggggccctggcaccctacgcggtgctgtcctcctccaacgtgcgcgtcataaaggacaagcagacccaactgaaccgcggctttgccttcatccagctctccaccatcgtggaggcagcccagctgctgcagatcctgcaggccctgcacccaccactcactatcgacggcaagaccatcaatgttgagtttgccaagggttctaagagggacatggcctccaatgaaggcagtcgcatcagtgctgcctctgtggccagcactgccattgctgcggcccagtgggccatctcacaggcctcccaaggtggggagggtacctgggccacctccgaggagccgccggtcgactacagctactaccaacaggatgagggctatggcaacagccagggcacagagtcttccctctatgcccatggctacctcaagggcaccaagggccctggcatcactggaaccaaaggggatcccactggagcaggtcccgaggcctccctagagcctggggccgactctgtgtcgatgcaggctttctctcgcgcccagcctggtgctgctcctggcatctaccaacaatcagccgaggcgagcagtagccagggcactgctgccaacagccagtcgtataccatcatgtcacccgctgtgctcaaatctgagctccagagccctacccatcctagttctgctctcccaccggctaccagccccactgcccaggaatcctacagccagtaccctgttcccgacgtctctacctaccagtacgatgagacctccggctactactatgacccccagaccggcctctactatgaccccaactcccagtattactacaatgctcagagccagcagtacctgtactgggatggggagaggcggacctatgttcccgccctggagcagtcggccgacggacataaggagacaggggcaccctcgaaggagggcaaagagaagaaggagaagcacaagaccaagacagctcaacagattgccaaggacatggaacgctgggcccgcagtctcaacaaacaaaaagaaaacttcaaaaatagcttccagcctatcagctccctgcgagatgacgagaggcgggagtcagccactgcagatgctggctatgccatcctcgagaagaagggagcactagccgagagacagcacaccagcatggatctcccgaaattggccagtgacgaccgcccaagccctccgcgaggactggtggcagcctacagcggggagagtgacagtgaggaggagcaggagcgtgggggccctgagcgggaggagaagctcaccgactggcagaagctggcctgtctgctctgccgacgccagttccccagcaaagaggcgctcatccggcaccagcagctctcagggctccacaagcaaaaccttgagattcaccggcgagcccacttgtcagaaaacgagctagaagcactagagaagaatgacatggagcaaatgaagtaccgggaccgtgcagctgaacgcagagaaaagtatggcatccccgagccgcnanagnccaaaaaaaaaaaatacagcaaaanatcnacaacctatgtaaacttcgaaaaaaaaaaacaaaanaaantnaanaanaanaanattagcaatcanangcaacaanccatgagcnaaaaaaaaagcagcaanctggaccccaaaaaccaaggcattttaacgcctatcaaaccccaaacaccggttccgcgcccccccctgggttcacggggcagctcctacggggtcacctcaaccgagtcctacaaggagacactgcacaagacaatggtgacccgcttcaacgaggcccagtgagcagcttcaagagcaacttctccacatgttgggtgtccatcctggggcagggaaggacagagtgttggatggctgggacggggccttgctcttgtcggccagcccactccccagccagagagggcttgaccaaatcaaattgaggtggtgacttttgttggaaaattgggctgggatcacgtcctgttttgtaataaaagctgaaaagtctgca

SEQ ID NO: 370749 - DNA, 1802 bp, Homo sapiens
gcttattgatgggtctgctcatttcctgcataggaagaaatcggtgacattgggtggatacagttcccagccaatcgccccgagttccctcgcccactggggaaagaggcagagcttccgctagtctttcatcttcaaaggaaatcaagcttctaaaaagcgggccctgccgaattggctaatagctactccttttctccactaggggagcgttcgcaaggggtgtggggaggtggccagcgcttgccaatcagaggaggccagggctgtcccctagcgggcggtgaccaatcgccggggccggccagagcgcgcttccttagtaggtggatggtggtcggagcgccgactcccttctcgtcgtcgccattttgagctggtgactgtggccggctgggagtaggcggcagtgagtttccctgggagggcagcgcgcttggcgcttctcccctccccccgatctgcctccagtctcggacttggttgttgcgcgctccggctccggctgagctgggagagttggaggaggtggcggcgggcagaggtgatgtctgggagcccttccttgacagcccgggccgagaagagtccctgcaggaagcatcacccaggctggcagatcatggtagcagcagcgggggtggctgggaagtgaaacggagccagcggctgaggaggggccccagcagcccccgaaggccctatcaggacatggagtatgaaagacgtggtggtcgtggtgacaggactggccgctatggagccactgaccgctcgcaggatgatggtggggagaaccgcagccgagaccacgactaccgggacatggactaccgttcatatcctcgcgagtatggcagccaggagggcaagcatgactatgacgactcatctgaggagcagagtgcggaggattcctacgaggcctccccgggctccgagactcagcgtaggcggcggcggcggcacaggcttcccccgagacggcgactatcgggaccaggactatcggaccgagcaaggggaggaggaggaggaggaggaggatgaggaggaggaggagaaggccagtaacatcgtcatgctgaggatgctgccacaggcagccactgaggatgacatccgtggccagctgcagtcgcacggcgtgcaagcacgggaggttcggctgatgcggaacaaatcttcagcactccctcaacatcctgggccagaaggtgtcgatgcactacagtgaccccaagcccaagatcaatgaggactggctgtgcaataagtgtggcgtccagagcccaagaggaggaagtacggcggcatatccacagcctctgtagacttcgagcagcctactcgggacgggctgggcagtgacaacattggcagtcggatgctgcaggccatgggctggaaagagggcagcggcctgggccgcaagaagcagggcattgtaacgcctatcgaggcccaaacacgggtgcggggctccggcctgggtgcacggggcagctcctacggggtcacctcaaccgagtcctacaaggagacactgcacaagacaatggtgacccgcttcaacgaggcccagtgagcagcttcaagagcaacttctccacatgttgggtgtccatcctggggcagggaaggacagagtgttggatggctgggacggggccttgctcttgtcggccagcccactccccagccagagagggcttgaccaaatcaaattgaggtggtgacttttgttggaaaattgggctgggatcacgtcctgttttgtaataaaagctgaaaagtctgca

SEQ ID NO: 370750 - DNA, 2026 bp, Homo sapiens
gcttattgatgggtctgctcatttcctgcataggaagaaatcggtgacattgggtggatacagttcccagccaatcgccccgagttccctcgcccactggggaaagaggcagagcttccgctagtctttcatcttcaaaggaaatcaagcttctaaaaagcgggccctgccgaattggctaatagctactccttttctccactaggggagcgttcgcaaggggtgtggggaggtggccagcgcttgccaatcagaggaggccagggctgtcccctagcgggcggtgaccaatcgccggggccggccagagcgcgcttccttagtaggtggatggtggtcggagcgccgactcccttctcgtcgtcgccattttgagctggtgactgtggccggctgggagtaggcggcagtgagtttccctgggagggcagcgcgcttggcgcttctcccctccccccgatctgcctccagtctcggacttggttgttgcgcgctccggctccggctgagctgggagagttggaggaggtggcggcgggcagaggtgatgtctgggagcccttccttgacagcccgggccgagaagagtccctgcaggaagcatcacccaggctggcagatcatggtagcagcagcgggggtggctgggaagtgaaacggagccagcggctgaggaggggccccagcagcccccgaaggccctatcaggacatggagtatgaaagacgtggtggtcgtggtgacaggactggccgctatggagccactgaccgctcgcaggatgatggtggggagaaccgcagccgagaccacgactaccgggacatggactaccgttcatatcctcgcgagtatggcagccaggagggcaagcatgactatgacgactcatctgaggagcagagtgcggaggattcctacgaggcctccccgggctccgagactcagcgtaggcggcggcggcggcacaggcacagccccaccggcccgccaggcttcccccgagacggcgactatcgggaccaggactatcggaccgagcaaggggaggaggaggaggaggaggaggatgaggaggaggaggagaaggccagtaacatcgtcatgctgaggatgctgccacaggcagccactgaggatgacatccgtggccagctgcagtcgcacggcgtgcaagcacgggaggttcggctgatgcggaacaaatcttcaggtcagagccggggcttcgccttcgtcgagtttagtcacttgcaggacgctacacgatggatggaagccaatcagcactccctcaacatcctgggccagaaggtgtcgatgcactacagtgaccccaagcccaagatcaatgaggactggctgtgcaataagtgtggcgtgcctcccaaggtggggagggtacctgggccacctccgaggagccgccggtcgactacagctactaccaacaggatgagggctatggcaacagccagggcacagagtcttccctctatgcccatggctacctcaagggcaccaagggccctggcatcactggaaccaaaggggatcccactggagcaggtcccgaggcctccctagagcctggggccgactctgtgtcgatgcaggctttctctcgcgcccagcctggtgctgctcctggcatctaccaacaatcagccgaggcgagcagtagccagggcactgctgccaacagccagtcgtataccatcatggggcagctcctacggggtcacctcaaccgagtcctacaaggagacactgcacaagacaatggtgacccgcttcaacgaggcccagtgagcagcttcaagagcaacttctccacatgttgggtgtccatcctggggcagggaaggacagagtgttggatggctgggacggggccttgctcttgtcggccagcccactccccagccagagagggcttgaccaaatcaaattgaggtggtgacttttgttggaaaattgggctgggatcacgtcctgttttgtaataaaagctgaaaagtctgca

SEQ ID NO: 370751 - DNA, 295 bp, Homo sapiens
gggagttgtttattcctgagctgagtgggttggcacagaggacaaatgagagtctggaaagggaagatgcacagtactgagaacaacatcagaaggttcagaaggcacctgccaccattgcctaggggctttccttcctggggcactgcggggtccctgggagatctcttcatccaagtttggagggtgcagtgggaaatccctgctccctctgacggcctggcctgtgcctcacagtgtggcgtccagaacttcaaacgccgagagaagtgcttcaaatgtggcgtgcccaagt

SEQ ID NO: 370752 - DNA, 362 bp, Homo sapiens
  misc_feature (250)..(250): n is a, c, g, or t
  misc_feature (264)..(264): n is a, c, g, or t
  misc_feature (267)..(267): n is a, c, g, or t
  misc_feature (330)..(330): n is a, c, g, or t
  misc_feature (350)..(350): n is a, c, g, or t
gtatggcaagggtcacagagagtgactggacctggtttggaggactagttaagagaccttttggaggtctctgcagctcccggccccttattggagtccaagcccagagccaattcccccagtggccataaggtggcagcctcaccctctgcctggctggactgagaagaggctcccattcagagctctggcacacaggagtcctctcctttatcggaaaactgcagcgctgagagaacgcgaacactancaggtgcctgccanccncgtctggctaatttttgcttttgttttttgttgttgttttgttttgttttgtttttttgagancagagtctcgactgtgtcanccactgcagtcc

SEQ ID NO: 370753 - DNA, 1644 bp, Homo sapiens
  misc_feature (47)..(48): n is a, c, g, or t
aggtctagaggatcccttaaactaacaaatgtgatcctgcttcttgnntagtttttgagggtcttctgttctttgaaataatctaaaactcacagcatgagatacatgctgctcactagatgaaatcagctctccattcagcacttgagattgttttaaaagcgctgaatggagagtctccgtcgaactagttcgacggagactctcctggggctgcctgagactggaaccccaggagaggcgctgaggtacctctggtttggaggactagttaagagaccttttggaggtctctgcagctcccggccccttattggagtccaagcccagagccaattcccccagtggccataaggtggcagcctcaccctctgcctggctggactgagaagaggctcccattcagagctctggcacacaggagtcctctcctttatcggaaaactgcagcgctgagagaacgcgaacactacatcaggctgggccctgggtggcgatctggactccagactaatgaactcctgaaccctgccccaaggcctgtgttactccccagcagcagcccagcccttctccccagtcatccaagtgggtacctctctgaaaatccttggaaaggggatccaggacatgaggggaccctgtcccatggggtcccctgctctccaacacacaggtagtcccagtgctagcattggtctaggtaagggtcacctctgcctttgtgcagtggtgtgatctcagctcattggagtccgcctcctgggctgaggcaggagaatcgcttgaactgagaggcggaggttgcagtgagccgagatcgcaccactgcactccagcctgggcaacaagaaggaaactctgtctcagaaaaaaaaaaaaaaagaatgaagtttcctcaccctctccaggacaatctcttcacttcatgagcacccatgaagacgcaccatgaaggagccattcactgagtatttaccaggccctcttcagtatgcagggcacactacggtgagcaagacagctgtgggcccgccctcactgaactcaccacctatggggatgttccattacaaattgctggggaggccaggcacgatggctcacacccataatcccagcacgttgggaggcaaaagcaggtggatcacttgagctcaggagttcaagaccagcctggggaaaatggtgacaaccagtctctacaaaaaatacaaaaattagccaggcatggaggcgcacacctgtaggcccagcaacttgtaggactgaggcgagaggatcacttgagcccaggaggtcaaggctacagtgagccatgttcatatcactgcacttccgtctgggagacaaagtgagaccctgtctcaaaaaaaaaaaaattgctgaggaatgctgtgagggaaattagagggacttacagagcacgtagcaagggacctgactccatgtgaaagaactcaagtgcaccagcctggccaacatggtgaaaccgcatctctactgaaaaatacaaatattagccgggcatggtggcgcatgcctgtaatcccagttactcaggaggcggaggttgcaatgagccaagatcgcaccattgcactccagtctgggagacagagcaagactctatctcaaaatcac

SEQ ID NO: 370754 - DNA, 553 bp, Homo sapiens
cccccctcccccctagataagagcagctccagcgcaggtcagttgggcctgtgagggccatggtgttgggcagcagcttgggtaccccccaacctccaggagctagtggaggggtgtgtaacagggtcataccccctccctcttgtccaccctacccccagggtaaggggagcctctctccttccccatcagactggatgtgcctttatcctctaatgccccaatctctctctgaacacccccattctccacctgttggtggggggtgctcctcgacccacccagatttgaccgttcagggggcctcccctgctatccctcctcccatcctgtaccccccatttctggggcctcatcactgtggaagacggggatagtaagagataagtgggtgggaggcacggggaaggttttggagtagaaccaggggtgtgtatgaaggggggtgacaaggtccccctggggaggggaccaaccttgtctggtggatgagaaggcgtatttatttttcactgtacagtatttaaaaagagaataaaaaaatccaaatggc

SEQ ID NO: 370755 - DNA, 3556 bp, Homo sapiens
tgcgcagtaggcggcggtggcagggggaggtggaggctgtggagcggcagcggcagcagcgggtcccgggactgaggcagcagcgggggcggcggcgggcggaagctgaggtgacgaaggcagcggcggcggcggccgtttccctcacggtggcggagaccaaggcggcggcggcggacggggagcggcccggccccggccccctgctcgttggctgtggcagggccgccgtggggccggcccggctcccgccccccgcggctccccctccggctcctcctccggggagacgccgggggcctggcccggcccgcactcagactgctgctgcagccgccgccgggggagtcggaggcggtggcggcgccatgggcggcctggcctctgggggggatgtggagccgggactgcccgtcgaggtgcgcggctccaacggggccttctacaagggctttgtgaaggatgtccatgaagactctgtcaccatcttctttgaaaacaactggcagagtgagagacaaattccttttggggatgtccggctaccacctccagctgactataataaggagatcacagaaggggatgaagtggaggtttattctcgagccaatgaacaggaaccttgtggctggtggctggcccgggtgcggatgatgaagggagatttctatgtcattgaatatgctgcctgtgatgccacctacaatgaaattgttaccctggagcgacttcggccagttaatcccaatccccttgcaaccaaaggcagcttcttcaaggttaccatggctgtgcccgaggatctgagagaagcctgctccaatgaaaacgtccataaagagttcaagaaagccctgggagccaactgcatctttctcaacatcacaaacagtgagctcttcattctgtcaaccacagaagcccctgtgaagcgagcatctctgctgggtgatatgcatttccgaagcctgcgcaccaaactgctacttatgtcccgcaatgaagaagctaccaagcacctagagacaagcaagcagttggcagcagccttccaagaggagttcacagtgcgagaggacctgatgggactggcaattgggactcacggtgccaacatccagcaggcccgaaaagtacctggggtgaccgccattgagttgggtgaagagacctgcactttccgcatctatggggagactcccgaggcttgccgacaggcccgaagctaccttgagttttctgaggactcagtgcaagtgcccaggaacctggttggtgagttggtggtgtgtatatacagttagaggtcagaatcaagattctcctacagtgattctgagcttttatcccaggattggcacctccctgtggactcccagtttcacaaggacagagaaacagtctgtaatgggagtgataaaaatgaaagaataaatttctagggattgtaacattttgtcctgtaaaaacacatcagaaacctagaagcaggagaatgaagtaaatggaatccatataaagaaaatgaggctggaagacggtgtatcagctttattcttatttccttaaaaaaaataaaaggctgaattcctcatttacctattccaggcaaagtgattggaaagaacgggaaagtgatccaggagattgtggataaatctggtgtggtgagggttcgagtggaaggtgataatgacaagaagaaccccagggaggaggtatgggtacggggcaagtgggcatagagattggtttccagaagtaaatgggattgtcctctgagggctgggattgttctttgagagggtggagtacggaaagttgtttaacactagtagatttagagcccagaatgatcccactgggcaggctcccctaggagactgggcggcgttaatccttccatttcattttcctttctgatccatcgtttctgctctctgttctctagggaatggttcccttcatttttgttggcacccgagagaacatcagcaatgcccaggctttgctggagtatcacctctcctacctgcaggaggtagagcagcttcgcttggagaggctacaaattgatgagcagcttcggcagattgggctgggctttcgccctcctgggagtgggcggggcagcggtggcagcgacaaggctggatatagcactgatgagagctcctcctcctccctccatgcgactcgaacctatgggggcagctatgggggccgtggccgtggccggaggacaggcggtcctgcctatggccccagctcagatgtgtctacagcttcagagactgagtcagagaagagagaggagcccaaccgagctgggcctggcgacagggatcccccaacccgaggggaagaaagccggaggcggccgactgggggccggggtaggggacccccacctgccccccggcccacttcgagatacaattcttcatctattagctcagtgctgaaggatccagacagtaatccctacagcctattggacacgtctgaaccagagcccccggttgattcagaacctggggaaccccccccagcaagtgccaggcgccgccgctcccgccgccgccgcactgatgaagacaggaccgtcatggatggaggcctggaatcagatgggcccaacatgacagagaatggcctggaagatgaatcaagacctcaacgtcgtaatcgcagccgccgccgccgtaaccgtggtaatcggactgatggctctatcagtggagaccgccagccagtgactgtggctgactatatctcacgagcagagtctcagagccgccagaggccacccctggaacgcactaaaccctcagaagactctctttcaggacagaagggtgactctgtcagcaagcttcctaagggcccctcggagaatggggagctctccgcccccttggagttgggtagtatggtgaatggggtttcataaaacctccaacctgcacccctcccttctccatctcgcttgctgcccaacaccatggccctcacaggcccaactgacctgcgctggagctgctcttatctaggggggaggggggtggcacagcagcttgggtaccccccaacctccaggagctagtggaggggtgtgtaacagggtcataccccctccctcttgtccaccctacccccagggtaaggggagcctctctccttccccatcagactggatgtgcctttatcctctaatgccccaatctctctctgaacacccccattctccacctgttggtggggggtgctcctcgacccacccagatttgaccgttcagggggcctcccctgctatccctcctcccatcctgtaccccccatttctggggcctcatcactgtggaagacggggatagtaagagataagtgggtgggaggcacggggaaggttttggagtagaaccaggggtgtgtatgaaggggggtgacaaggtccccctggggaggggaccaaccttgtctggtggatgagaaggcgtatttatttttcactgtacagtatttaaaaagagaataaaaaaatccaaatggc

SEQ ID NO: 370756 - DNA, 2867 bp, Homo sapiens
  misc_feature (8)..(8): n is a, c, g, or t
  misc_feature (47)..(47): n is a, c, g, or t
  misc_feature (51)..(51): n is a, c, g, or t
  misc_feature (65)..(65): n is a, c, g, or t
  misc_feature (81)..(81): n is a, c, g, or t
  misc_feature (90)..(90): n is a, c, g, or t
  misc_feature (94)..(94): n is a, c, g, or t
  misc_feature (106)..(106): n is a, c, g, or t
  misc_feature (118)..(118): n is a, c, g, or t
agaagcanacgtatctcgacaggtggtatctccagctgcccactttngcgnatcaccagaggctngcatatctctgctaangttagcgtntagngacgtgtgtccncgaggtagtcgngagaagaagcctgctccaatgaaaacgtccataaagagttcaagaaagccctgggagccaactgcatctttctcaacatcacaaacagtgagctcttcattctgtcaaccacagaagcccctgtgaagcgagcatctctgctgggtgatatgcatttccgaagcctgcgcaccaaactgctacttatgtcccgcaatgaagaagctaccaagcacctagagacaagcaagcagttggcagcagccttccaagaggagttcacagtgcgagaggacctgatgggactggcaattgggactcacggtgccaacatccagcaggcccgaaaagtacctggggtgaccgccattgagttgggtgaagagacctgcactttccgcatctatggggagactcccgaggcttgccgacaggcccgaagctaccttgagttttctgaggactcagtgcaagtgcccaggaacctggttggtgagttggtggtgtgtatatacagttagaggtcagaatcaagattctcctacagtgattctgagcttttatcccaggattggcacctccctgtggactcccagtttcacaaggacagagaaacagtctgtaatgggagtgataaaaatgaaagaataaatttctagggattgtaacattttgtcctgtaaaaacacatcagaaacctagaagcaggagaatgaagtaaatggaatccatataaagaaaatgaggctggaagacggtgtatcagctttattcttatttccttaaaaaaaataaaaggctgaattcctcatttacctattccaggcaaagtgattggaaagaacgggaaagtgatccaggagattgtggataaatctggtgtggtgagggttcgagtggaaggtgataatgacaagaagaaccccagggaggaggtatgggtacggggcaagtgggcatagagattggtttccagaagtaaatgggattgtcctctgagggctgggattgttctttgagagggtggagtacggaaagttgtttaacactagtagatttagagcccagaatgatcccactgggcaggctcccctaggagactgggcggcgttaatccttccatttcattttcctttctgatccatcgtttctgctctctgttctctagggaatggttcccttcatttttgttggcacccgagagaacatcagcaatgcccaggctttgctggagtatcacctctcctacctgcaggaggtagagcagcttcgcttggagaggctacaaattgatgagcagcttcggcagattgggctgggctttcgccctcctgggagtgggcggggcagcggtggcagcgacaaggctggatatagcactgatgagagctcctcctcctccctccatgcgactcgaacctatgggggcagctatgggggccgtggccgtggccggaggacaggcggtcctgcctatggccccagctcagatgtgtctacagcttcagagactgagtcagagaagagagaggagcccaaccgagctgggcctggcgacagggatcccccaacccgaggggaagaaagccggaggcggccgactgggggccggggtaggggacccccacctgccccccggcccacttcgagatacaattcttcatctattagctcagtgctgaaggatccagacagtaatccctacagcctattggacacgtctgaaccagagcccccggttgattcagaacctggggaaccccccccagcaagtgccaggcgccgccgctcccgccgccgccgcactgatgaagacaggaccgtcatggatggaggcctggaatcagatgggcccaacatgacagagaatggcctggaagatgaatcaagacctcaacgtcgtaatcgcagccgccgccgccgtaaccgtggtaatcggactgatggctctatcagtggagaccgccagccagtgactgtggctgactatatctcacgagcagagtctcagagccgccagaggccacccctggaacgcactaaaccctcagaagactctctttcaggacagaagggtgactctgtcagcaagcttcctaagggcccctcggagaatggggagctctccgcccccttggagttgggtagtatggtgaatggggtttcataaaacctccaacctgcacccctcccttctccatctcgcttgctgcccaacaccatggccctcacaggcccaactgacctgcgctggagctgctcttatctaggggggaggggggtggcacagcagcttgggtaccccccaacctccaggagctagtggaggggtgtgtaacagggtcataccccctccctcttgtccaccctacccccagggtaaggggagcctctctccttccccatcagactggatgtgcctttatcctctaatgccccaatctctctctgaacacccccattctccacctgttggtggggggtgctcctcgacccacccagatttgaccgttcagggggcctcccctgctatccctcctcccatcctgtaccccccatttctggggcctcatcactgtggaagacggggatagtaagagataagtgggtgggaggcacggggaaggttttggagtagaaccaggggtgtgtatgaaggggggtgacaaggtccccctggggaggggaccaaccttgtctggtggatgagaaggcgtatttatttttcactgtacagtatttaaaaagagaataaaaaaatccaaatggc

SEQ ID NO: 370757 - DNA, 1603 bp, Homo sapiens
taccacacctcagtttaaatcggcacgaggccgagagaacatcagcaatgcccaggctttgctggagtatcacctctcctacctgcaggaggtagagcagcttcgcttggagaggctacaaattgatgagcagcttcggcagattgggctgggctttcgccctcctgggagtgggcggggcagcggtggcagcgacaaggctggatatagcactgatgagagctcctcctcctccctccatgcgactcgaacctatgggggcagctatgggggccgtggccgtggccggaggacaggcggtcctgcctatggccccagctcagatgtgtctacagcttcagagactgagtcagagaagagagaggagcccaaccgagctgggcctggcgacagggatcccccaacccgaggggaagaaagccggaggcggccgactgggggccggggtaggggacccccacctgccccccggcccacttcgagatacaattcttcatctattagctcagtgctgaaggatccagacagtaatccctacagcctattggacacgtctgaaccagagcccccggttgattcagaacctggggaaccccccccagcaagtgccaggcgccgccgctcccgccgccgccgcactgatgaagacaggaccgtcatggatggaggcctggaatcagatgggcccaacatgacagagaatggcctggaagatgaatcaagacctcaacgtcgtaatcgcagccgccgccgccgtaaccgtggtaatcggactgatggctctatcagtggagaccgccagccagtgactgtggctgactatatctcacgagcagagtctcagagccgccagaggccacccctggaacgcactaaaccctcagaagactctctttcaggacagaagggtgactctgtcagcaagcttcctaagggcccctcggagaatggggagctctccgcccccttggagttgggtagtatggtgaatggggtttcataaaacctccaacctgcacccctcccttctccatctcgcttgctgcccaacaccatggccctcacaggcccaactgacctgcgctggagctgctcttatctaggggggaggggggtggcacagcagcttgggtaccccccaacctccaggagctagtggaggggtgtgtaacagggtcataccccctccctcttgtccaccctacccccagggtaaggggagcctctctccttccccatcagactggatgtgcctttatcctctaatgccccaatctctctctgaacacccccattctccacctgttggtggggggtgctcctcgacccacccagatttgaccgttcagggggcctcccctgctatccctcctcccatcctgtaccccccatttctggggcctcatcactgtggaagacggggatagtaagagataagtgggtgggaggcacggggaaggttttggagtagaaccaggggtgtgtatgaaggggggtgacaaggtccccctggggaggggaccaaccttgtctggtggatgagaaggcgtatttatttttcactgtacagtatttaaaaagagaataaaaaaatccaaatggc

SEQ ID NO: 370758 - DNA, 2484 bp, Homo sapiens
tgcgcagtaggcggcggtggcagggggaggtggaggctgtggagcggcagcggcagcagcgggtcccgggactgaggcagcagcgggggcggcggcgggcggaagctgaggtgacgaaggcagcggcggcggcggccgtttccctcacggtggcggagaccaaggcggcggcggcggacggggagcggcccggccccggccccctgctcgttggctgtggcagggccgccgtggggccggcccggctcccgccccccgcggctccccctccggctcctcctccggggagacgccgggggcctggcccggcccgcactcagactgctgctgcagccgccgccgggggagtcggaggcggtggcggcgccatgggcggcctggcctctgggggggatgtggagccgggactgcccgtcgaggtgcgcggctccaacggggccttctacaagggctttgtgaaggatgtccatgaagactctgtcaccatcttctttgaaaacaactggcagagtgagagacaaattccttttggggatgtccggctaccacctccagctgactataataaggagatcacagaaggggatgaagtggaggtttattctcgagccaatgaacaggaaccttgtggctggtggctggcccgggtgcggatgatgaagggagatttctatgtcattgaatatgctgcctgtgatgccacctacaatgaaattgttaccctggagcgacttcggccagttaatcccaatccccttgcaaccaaaggcagcttcttcaaggttaccatggctgtgcccgaggatctgagagaagcctgctccaatgaaaacgtccataaagagttcaagaaagccctgggagccaactgcatctttctcaacatcacaaacagtgagctcttcattctgtcaaccacagaagcccctgtgaagcgagcatctctgctgggtgatatgcatttccgaagcctgcgcaccaaactgctacttatgtcccgcaatgaagaagctaccaagcacctagagacaagcaagcagttggcagcagccttccaagaggagttcacagtgcgagaggacctgatgggactggcaattgggactcacggtgccaacatccagcaggcccgaaaagtacctggggtgaccgccattgagttgggtgaagagacctgcactttccgcatctatggggagactcccgaggcttgccgacaggcccgaagctaccttgagttttctgaggactcagtgcaagtgcccaggaacctggttggcaaagtgattggaaagaacgggaaagtgatccaggagattgtggataaatctggtgtggtgagggttcgagtggaaggtgataatgacaagaagaaccccagggaggagggaatggttcccttcatttttgttggcacccgagagaacatcagcaatgcccaggctttgctggagtatcacctctcctacctgcaggaggtagagcagcttcgcttggagaggctacaaattgatgagcagcttcggcagattgggctgggctttcgccctcctgggagtgggcggggcagcggtggcagcgacaaggctggaagatgaatcaagacctcaacgtcgtaatcgcagccgccgccgccgtaaccgtggtaatcggactgatggctctatcagtggagaccgccagccagtgactgtggctgactatatctcacgagcagagtctcagagccgccagaggccacccctggaacgcactaaaccctcagaagactctctttcaggacagaagggtgactctgtcagcaagcttcctaagggcccctcggagaatggggagctctccgcccccttggagttgggtagtatggtgaatggggtttcataaaacctccaacctgcacccctcccttctccatctcgcttgctgcccaacaccatggccctcacaggcccaactgacctgcgctggagctgctcttatctaggggggaggggggtggcacagcagcttgggtaccccccaacctccaggagctagtggaggggtgtgtaacagggtcataccccctccctcttgtccaccctacccccagggtaaggggagcctctctccttccccatcagactggatgtgcctttatcctctaatgccccaatctctctctgaacacccccattctccacctgttggtggggggtgctcctcgacccacccagatttgaccgttcagggggcctcccctgctatccctcctcccatcctgtaccccccatttctggggcctcatcactgtggaagacggggatagtaagagataagtgggtgggaggcacggggaaggttttggagtagaaccaggggtgtgtatgaaggggggtgacaaggtccccctggggaggggaccaaccttgtctggtggatgagaaggcgtatttatttttcactgtacagtatttaaaaagagaataaaaaaatccaaatggc

SEQ ID NO: 370759 - DNA, 1128 bp, Homo sapiens
caaacttaggctaggtagcgaggctgggtgtcgctgctgaaggatccagacagtaatccctacagcctattggacacgtctgaaccagagcccccggttgattcagaacctggggaaccccccccagcaagtgccaggcgccgccgctcccgccgccgccgcactgatgaagacaggaccgtcatggatggaggcctggaatcagatgggcccaacatgacagagaatggcctggaagatgaatcaagacctcaacgtcgtaatcgcagccgccgccgccgtaaccgtggtaatcggactgatggctctatcagtggagaccgccagccagtgactgtggctgactatatctcacgagcagagtctcagagccgccagaggccacccctggaacgcactaaaccctcagaagactctctttcaggacagaagggtgactctgtcagcaagcttcctaagggcccctcggagaatggggagctctccgcccccttggagttgggtagtatggtgaatggggtttcataaaacctccaacctgcacccctcccttctccatctcgcttgctgcccaacaccatggccctcacaggcccaactgacctgcgctggagctgctcttatctaggggggaggggggtggcacagcagcttgggtaccccccaacctccaggagctagtggaggggtgtgtaacagggtcataccccctccctcttgtccaccctacccccagggtaaggggagcctctctccttccccatcagactggatgtgcctttatcctctaatgccccaatctctctctgaacacccccattctccacctgttggtggggggtgctcctcgacccacccagatttgaccgttcagggggcctcccctgctatccctcctcccatcctgtaccccccatttctggggcctcatcactgtggaagacggggatagtaagagataagtgggtgggaggcacggggaaggttttggagtagaaccaggggtgtgtatgaaggggggtgacaaggtccccctggggaggggaccaaccttgtctggtggatgagaaggcgtatttatttttcactgtacagtatttaaaaagagaataaaaaaatccaaatggc

SEQ ID NO: 370760 - DNA, 411 bp, Homo sapiens
agtgagctgagatcgcgccactgcactccagcctgggcgacagagcgagacgccatctcaaagaaaaaacaaaaagttcctgacctttccacacaggtcctcgtggtccgcggactccagagtggttctagctttctattaatatcacacagttttccttatttaagttatgcaaagggtcgtgtgcctgggactgtgagattctaccaccatgattcctacagtgacttttcctttcagacaagcaagcagttggcagcagccttccaagaggagttcacagtgcgagaggacctgatgggactggcaattgggactcacggtgccaacatccagcaggcccgaaaagtacctggggtgaccgccattgagttgggtgaagagacctgcactttccgcatctatggggag

SEQ ID NO: 370761 - DNA, 233 bp, Homo sapiens
agctcctcctcctccctccatgcgactcgaacctatgggggcagctatgggggccgtggccgtggccggaggacaggcggtcctgcctatggtgagacagttatgggaacaggaggcaaggagtggcagggcttgtgggtagaggcagaggtctggatggaagtttggggaaatctggaatggagatgatgaaaaagtgattgattggctgggaggcttgtgagtgagaagga

SEQ ID NO: 370762 - DNA, 437 bp, Homo sapiens
caatgaacaggaaccttgtggctggtggctggcccgggtgcggatgatgaagggagatgtgagtgactgggaatgcctttggagaactactgaaacaaatatgttattcatagaaagttgctcaggtcatccacaacttctccttttttaccatgtgccagttctatgtcattgaatatgctgcctgtgatgccacctacaatgaaattgttaccctggagcgacttcggccagttaatcccaatccccttgcaaccaaaggcagcttcttcaaggttaccatggctgtgcccgaggatctgagagaagcgtgagtgttaaggatggtgggaatgagggccctctttacagccctaatctctggctttatttctcccaggcatcactcccactttgcagttttctctgttgttcccctggccctctactagagccct

SEQ ID NO: 370763 - DNA, 460 bp, Homo sapiens
aaatgccaggagggcttggatggtagggaatgtctcccacctgaatttctactcaccgcttcttgcttttctgttttctttcccactttcccctcagggtgactctgtcagcaagcttcctaagggcccctcggagaatggggagctctccgcccccttggagttgggtagtatggtgaatggggtttcataaaacctccaacctgcacccctcccttctccatctcgcttgctgcccaacaccatggccctcacaggcccaactgacctgcgctggagctgctcttatctaggggggaggggggtggcacagcagcttgggtaccccccaacctccaggagctagtggaggggtgtgtaacagggtcataccccctccctcttgtccaccctacccccagggtaaggggagcctctctccttccccatcagactggatgtgcctttatcctctaatgcc

SEQ ID NO: 370764 - DNA, 2990 bp, Homo sapiens
tgcgcagtaggcggcggtggcagggggaggtggaggctgtggagcggcagcggcagcagcgggtcccgggactgaggcagcagcgggggcggcggcgggcggaagctgaggtgacgaaggcagcggcggcggcggccgtttccctcacggtggcggagaccaaggcggcggcggcggacggggagcggcccggccccggccccctgctcgttggctgtggcagggccgccgtggggccggcccggctcccgccccccgcggctccccctccggctcctcctccggggagacgccgggggcctggcccggcccgcactcagactgctgctgcagccgccgccgggggagtcggaggcggtggcggcgccatgggcggcctggcctctgggggggatgtggagccgggactgcccgtcgaggtgcgcggctccaacggggccttctacaagggctttgtgaaggatgtccatgaagactctgtcaccatcttctttgaaaacaactggcagagtgagagacaaattccttttggggatgtccggctaccacctccagctgactataataaggagatcacagaaggggatgaagtggaggtttattctcgagccaatgaacaggaaccttgtggctggtggctggcccgggtgcggatgatgaagggagatttctatgtcattgaatatgctgcctgtgatgccacctacaatgaaattgttaccctggagcgacttcggccagttaatcccaatccccttgcaaccaaaggcagcttcttcaaggttaccatggctgtgcccgaggatctgagagaagcctgctccaatgaaaacgtccataaagagttcaagaaagccctgggagccaactgcatctttctcaacatcacaaacagtgagctcttcattctgtcaaccacagaagcccctgtgaagcgagcatctctgctgggtgatatgcatttccgaagcctgcgcaccaaactgctacttatgtcccgcaatgaagaagctaccaagcacctagagacaagcaagcagttggcagcagccttccaagaggagttcacagtgcgagaggacctgatgggactggcaattgggactcacggtgccaacatccagcaggcccgaaaagtacctggggtgaccgccattgagttgggtgaagagacctgcactttccgcatctatggggagactcccgaggcttgccgacaggcccgaagctaccttgagttttctgaggactcagtgcaagtgcccaggaacctggttggcaaagtgattggaaagaacgggaaagtgatccaggagattgtggataaatctggtgtggtgagggttcgagtggaaggtgataatgacaagaagaaccccagggaggagggaatggttcccttcatttttgttggcacccgagagaacatcagcaatgcccaggctttgctggagtatcacctctcctacctgcaggaggtagagcagcttcgcttggagaggctacaaattgatgagcagcttcggcagattgggctgggctttcgccctcctgggagtgggcggggcagcggtggcagcgacaaggctggatatagcactgatgagagctcctcctcctccctccatgcgactcgaacctatgggggcagctatgggggccgtggccgtggccggaggacaggcggtcctgcctatggccccagctcagatgtgtctacagcttcagagactgagtcagagaagagagaggagcccaaccgagctgggcctggcgacagggatcccccaacccgaggggaagaaagccggaggcggccgactgggggccggggtaggggacccccacctgccccccggcccacttcgagatacaattcttcatctattagctcagtgctgaaggatccagacagtaatccctacagcctattggacacgtctgaaccagagcccccggttgattcagaacctggggaaccccccccagcaagtgccaggcgccgccgctcccgccgccgccgcactgatgaagacaggaccgtcatggatggaggcctggaatcagatgggcccaacatgacagagaatggcctggaagatgaatcaagacctcaacgtcgtaatcgcagccgccgccgccgtaaccgtggtaatcggactgatggctctatcagtggagaccgccagccagtgactgtggctgactatatctcacgagcagagtctcagagccgccagaggccacccctggaacgcactaaaccctcagaagactctctttcaggacagaagggtgactctgtcagcaagcttcctaagggcccctcggagaatggggagctctccgcccccttggagttgggtagtatggtgaatggggtttcataaaacctccaacctgcacccctcccttctccatctcgcttgctgcccaacaccatggccctcacaggcccaactgacctgcgctggagctgctcttatctaggggggaggggggtggcacagcagcttgggtaccccccaacctccaggagctagtggaggggtgtgtaacagggtcataccccctccctcttgtccaccctacccccagggtaaggggagcctctctccttccccatcagactggatgtgcctttatcctctaatgccccaatctctctctgaacacccccattctccacctgttggtggggggtgctcctcgacccacccagatttgaccgttcagggggcctcccctgctatccctcctcccatcctgtaccccccatttctggggcctcatcactgtggaagacggggatagtaagagataagtgggtgggaggcacggggaaggttttggagtagaaccaggggtgtgtatgaaggggggtgacaaggtccccctggggaggggaccaaccttgtctggtggatgagaaggcgtatttatttttcactgtacagtatttaaaaagagaataaaaaaatccaaatggc

SEQ ID NO: 370765 - DNA, 2319 bp, Homo sapiens
tcgactctagaggatccccatggcgctgatgactacaatgaaattgttaccctggagcgacttcggccagttaatcccaatccccttgcaaccaaaggcagcttcttcaaggttaccatggctgtgcccgaggatctgagagaagcctgctccaatgaaaacgtccataaagagttcaagaaagccctgggagccaactgcatctttctcaacatcacaaacagtgagctcttcattctgtcaaccacagaagcccctgtgaagcgagcatctctgctgggtgatatgcatttccgaagcctgcgcaccaaactgctacttatgtcccgcaatgaagaagctaccaagcacctagagacaagcaagcagttggcagcagccttccaagaggagttcacagtgcgagaggacctgatgggactggcaattgggactcacggtgccaacatccagcaggcccgaaaagtacctggggtgaccgccattgagttgggtgaagagacctgcactttccgcatctatggggagactcccgaggcttgccgacaggcccgaagctaccttgagttttctgaggactcagtgcaagtgcccaggaacctggttggcaaagtgattggaaagaacgggaaagtgatccaggagattgtggataaatctggtgtggtgagggttcgagtggaaggtgataatgacaagaagaaccccagggaggagggaatggttcccttcatttttgttggcacccgagagaacatcagcaatgcccaggctttgctggagtatcacctctcctacctgcaggaggtagagcagcttcgcttggagaggctacaaattgatgagcagcttcggcagattgggctgggctttcgccctcctgggagtgggcggggcagcggtggcagcgacaaggctggatatagcactgatgagagctcctcctcctccctccatgcgactcgaacctatgggggcagctatgggggccgtggccgtggccggaggacaggcggtcctgcctatggccccagctcagatgtgtctacagcttcagagactgagtcagagaagagagaggagcccaaccgagctgggcctggcgacagggatcccccaacccgaggggaagaaagccggaggcggccgactgggggccggggtaggggacccccacctgccccccggcccacttcgagatacaattcttcatctattagctcagtgctgaaggatccagacagtaatccctacagcctattggacacgtctgaaccagagcccccggttgattcagaacctggggaaccccccccagcaagtgccaggcgccgccgctcccgccgccgccgcactgatgaagacaggaccgtcatggatggaggcctggaatcagatgggcccaacatgacagagaatggcctggaagatgaatcaagacctcaacgtcgtaatcgcagccgccgccgccgtaaccgtggtaatcggactgatggctctatcagtggagaccgccagccagtgactgtggctgactatatctcacgagcagagtctcagagccgccagaggccacccctggaacgcactaaaccctcagaagactctctttcaggacagaagggtgactctgtcagcaagcttcctaagggcccctcggagaatggggagctctccgcccccttggagttgggtagtatggtgaatggggtttcataaaacctccaacctgcacccctcccttctccatctcgcttgctgcccaacaccatggccctcacaggcccaactgacctgcgctggagctgctcttatctaggggggaggggggtggcacagcagcttgggtaccccccaacctccaggagctagtggaggggtgtgtaacagggtcataccccctccctcttgtccaccctacccccagggtaaggggagcctctctccttccccatcagactggatgtgcctttatcctctaatgccccaatctctctctgaacacccccattctccacctgttggtggggggtgctcctcgacccacccagatttgaccgttcagggggcctcccctgctatccctcctcccatcctgtaccccccatttctggggcctcatcactgtggaagacggggatagtaagagataagtgggtgggaggcacggggaaggttttggagtagaaccaggggtgtgtatgaaggggggtgacaaggtccccctggggaggggaccaaccttgtctggtggatgagaaggcgtatttatttttcactgtacagtatttaaaaagagaataaaaaaatccaaatggc

SEQ ID NO: 370766 - DNA, 3077 bp, Homo sapiens
tgcgcagtaggcggcggtggcagggggaggtggaggctgtggagcggcagcggcagcagcgggtcccgggactgaggcagcagcgggggcggcggcgggcggaagctgaggtgacgaaggcagcggcggcggcggccgtttccctcacggtggcggagaccaaggcggcggcggcggacggggagcggcccggccccggccccctgctcgttggctgtggcagggccgccgtggggccggcccggctcccgccccccgcggctccccctccggctcctcctccggggagacgccgggggcctggcccggcccgcactcagactgctgctgcagccgccgccgggggagtcggaggcggtggcggcgccatgggcggcctggcctctgggggggatgtggagccgggactgcccgtcgaggtgcgcggctccaacggggccttctacaagggctttgtgaaggatgtccatgaagactctgtcaccatcttctttgaaaacaactggcagagtgagagacaaattccttttggggatgtccggctaccacctccagctgactataataaggagatcacagaaggggatgaagtggaggtttattctcgagccaatgaacaggaaccttgtggctggtggctggcccgggtgcggatgatgaagggagatttctatgtcattgaatatgctgcctgtgatgccacctacaatgaaattgttaccctggagcgacttcggccagttaatcccaatccccttgcaaccaaaggcagcttcttcaaggttaccatggctgtgcccgaggatctgagagaagcctgctccaatgaaaacgtccataaagagttcaagaaagccctgggagccaactgcatctttctcaacatcacaaacagtgagctcttcattctgtcaaccacagaagcccctgtgaagcgagcatctctgctgggtgatatgcatttccgaagcctgcgcaccaaactgctacttatgtcccgcaatgaagaagctaccaagcacctagagacaagcaagcagttggcagcagccttccaagaggagttcacagtgcgagaggacctgatgggactggcaattgggactcacggtgccaacatccagcaggcccgaaaagtacctggggtgaccgccattgagttgggtgaagagacctgcactttccgcatctatggggagactcccgaggcttgccgacaggcccgaagctaccttgagttttctgaggactcagtgcaagtgcccaggaacctggttggcaaagtgattggaaagaacgggaaagtgatccaggagattgtggataaatctggtgtggtgagggttcgagtggaaggtgataatgacaagaagaaccccagggaggagggaatggttcccttcatttttgttggcacccgagagaacatcagcaatgcccaggctttgctggagtatcacctctcctacctgcaggaggtagagcagcttcgcttggagaggctacaaattgatgagcagcttcggcagattgggctgggctttcgccctcctgggagtgggcggggcagcggtggcagcgacaaggctggatatagcactgatgagagctcctcctcctccctccatgcgactcgaacctatgggggcagctatgggggccgtggccgtggccggaggacaggcggtcctgcctatggccccagctcagatgtgtctacagcttcagagactgagtcagagaagagagaggagcccaaccgagctgggcctggcgacagggatcccccaacccgaggggaagaaagccggaggcggccgactgggggccggggtaggggacccccacctgccccccggcccacttcgagatacaattcttcatctattagctcagtgctgaaggatccagacagtaatccctacagcctattggacacgtctgaaccagagcccccggttgattcagaacctggggaaccccccccagcaagtgccaggcgccgccgctcccgccgccgccgcactgatgaagacaggaccgtcatggatggaggcctggaatcagatgggcccaacatgacagagaatggcctggaagatgaatcaagacctcaacgtcgtaatcgcagccgccgccgccgtaaccgtggtaatcggactgatggctctatcagtggagaccgccagccagtgactgtggctgactatatctcacgagcagagtctcagagccgccagaggccacccctggaacgcactaaaccctcagaagactctctttcaggacagaagaggcagctgtgtctgatggagtttagaccagtgtaaactttgaataggatagagaagaaagtgtggttcacattttctggatcccaaggtgactctgtcagcaagcttcctaagggcccctcggagaatggggagctctccgcccccttggagttgggtagtatggtgaatggggtttcataaaacctccaacctgcacccctcccttctccatctcgcttgctgcccaacaccatggccctcacaggcccaactgacctgcgctggagctgctcttatctaggggggaggggggtggcacagcagcttgggtaccccccaacctccaggagctagtggaggggtgtgtaacagggtcataccccctccctcttgtccaccctacccccagggtaaggggagcctctctccttccccatcagactggatgtgcctttatcctctaatgccccaatctctctctgaacacccccattctccacctgttggtggggggtgctcctcgacccacccagatttgaccgttcagggggcctcccctgctatccctcctcccatcctgtaccccccatttctggggcctcatcactgtggaagacggggatagtaagagataagtgggtgggaggcacggggaaggttttggagtagaaccaggggtgtgtatgaaggggggtgacaaggtccccctggggaggggaccaaccttgtctggtggatgagaaggcgtatttatttttcactgtacagtatttaaaaagagaataaaaaaatccaaatggc

SEQ ID NO: 370767 - DNA, 3050 bp, Homo sapiens
tgcgcagtaggcggcggtggcagggggaggtggaggctgtggagcggcagcggcagcagcgggtcccgggactgaggcagcagcgggggcggcggcgggcggaagctgaggtgacgaaggcagcggcggcggcggccgtttccctcacggtggcggagaccaaggcggcggcggcggacggggagcggcccggccccggccccctgctcgttggctgtggcagggccgccgtggggccggcccggctcccgccccccgcggctccccctccggctcctcctccggggagacgccgggggcctggcccggcccgcactcagactgctgctgcagccgccgccgggggagtcggaggcggtggcggcgccatgggcggcctggcctctgggggggatgtggagccgggactgcccgtcgaggtgcgcggctccaacggggccttctacaagggctttgtgaaggatgtccatgaagactctgtcaccatcttctttgaaaacaactggcagagtgagagacaaattccttttggggatgtccggctaccacctccagctgactataataaggagatcacagaaggggatgaagtggaggtttattctcgagccaatgaacaggaaccttgtggctggtggctggcccgggtgcggatgatgaagggagatttctatgtcattgaatatgctgcctgtgatgccacctacaatgaaattgttaccctggagcgacttcggccagttaatcccaatccccttgcaaccaaaggcagcttcttcaaggttaccatggctgtgcccgaggatctgagagaagcctgctccaatgaaaacgtccataaagagttcaagaaagccctgggagccaactgcatctttctcaacatcacaaacagtgagctcttcattctgtcaaccacagaagcccctgtgaagcgagcatctctgctgggtgatatgcatttccgaagcctgcgcaccaaactgctacttatgtcccgcaatgaagaagctaccaagcacctagagacaagcaagcagttggcagcagccttccaagaggagttcacagtgcgagaggacctgatgggactggcaattgggactcacggtgccaacatccagcaggcccgaaaagtacctggggtgaccgccattgagttgggtgaagagacctgcactttccgcatctatggggagactcccgaggcttgccgacaggcccgaagctaccttgagttttctgaggactcagtgcaagtgcccaggaacctggttggtgagttggtggtgtgtatatacagttagaggtcagaatcaagattctcctacagtgattctgagcttttatcccaggattggcacctccctgtggactcccagtttcacaaggacagagaaacagtctgtaatgggagtgataaaaatgaaagaataaatttctagggattgtaacattttgtcctgtaaaaacacatcagaaacctagaagcaggagaatgaagtaaatggaatccatataaagaaaatgaggctggaagacggtgtatcagctttattcttatttccttaaaaaaaataaaaggctgaattcctcatttacctattccaggcaaagtgattggaaagaacgggaaagtgatccaggagattgtggataaatctggtgtggtgagggttcgagtggaaggtgataatgacaagaagaaccccagggaggaggtatgggtacggggcaagtgggcatagagattggtttccagaagtaaatgggattgtcctctgagggctgggattgttctttgagagggtggagtacggaaagttgtttaacactagtagatttagagcccagaatgatcccactgggcaggctcccctaggagactgggcggcgttaatccttccatttcattttcctttctgatccatcgtttctgctctctgttctctagggaatggttcccttcatttttgttggcacccgagagaacatcagcaatgcccaggctttgctggagtatcacctctcctacctgcaggaggtagagcagcttcgcttggagaggctacaaattgatgagcagcttcggcagattgggctgggctttcgccctcctgggagtgggcggggcagcggtggcagcgacaaggctggaagatgaatcaagacctcaacgtcgtaatcgcagccgccgccgccgtaaccgtggtaatcggactgatggctctatcagtggagaccgccagccagtgactgtggctgactatatctcacgagcagagtctcagagccgccagaggccacccctggaacgcactaaaccctcagaagactctctttcaggacagaagggtgactctgtcagcaagcttcctaagggcccctcggagaatggggagctctccgcccccttggagttgggtagtatggtgaatggggtttcataaaacctccaacctgcacccctcccttctccatctcgcttgctgcccaacaccatggccctcacaggcccaactgacctgcgctggagctgctcttatctaggggggaggggggtggcacagcagcttgggtaccccccaacctccaggagctagtggaggggtgtgtaacagggtcataccccctccctcttgtccaccctacccccagggtaaggggagcctctctccttccccatcagactggatgtgcctttatcctctaatgccccaatctctctctgaacacccccattctccacctgttggtggggggtgctcctcgacccacccagatttgaccgttcagggggcctcccctgctatccctcctcccatcctgtaccccccatttctggggcctcatcactgtggaagacggggatagtaagagataagtgggtgggaggcacggggaaggttttggagtagaaccaggggtgtgtatgaaggggggtgacaaggtccccctggggaggggaccaaccttgtctggtggatgagaaggcgtatttatttttcactgtacagtatttaaaaagagaataaaaaaatccaaatggc

SEQ ID NO: 370768 - DNA, 2274 bp, Homo sapiens
tgcgcagtaggcggcggtggcagggggaggtggaggctgtggagcggcagcggcagcagcgggtcccgggactgaggcagcagcgggggcggcggcgggcggaagctgaggtgacgaaggcagcggcggcggcggccgtttccctcacggtggcggagaccaaggcggcggcggcggacggggagcggcccggccccggccccctgctcgttggctgtggcagggccgccgtggggccggcccggctcccgccccccgcggctccccctccggctcctcctccggggagacgccgggggcctggcccggcccgcactcagactgctgctgcagccgccgccgggggagtcggaggcggtggcggcgccatgggcggcctggcctctgggggggatgtggagccgggactgcccgtcgaggtgcgcggctccaacggggccttctacaagggctttgtgaaggatgtccatgaagactctgtcaccatcttctttgaaaacaactggcagagtgagagacaaattccttttggggatgtccggctaccacctccagctgactataataaggagatcacagaaggggatgaagtggaggtttattctcgagccaatgaacaggaaccttgtggctggtggctggcccgggtgcggatgatgaagggagatttctatgtcattgaatatgctgcctgtgatgccacctacaatgaaattgttaccctggagcgacttcggccagttaatcccaatccccttgcaaccaaaggcagcttcttcaaggttaccatggctgtgcccgaggatctgagagaagcctgctccaatgaaaacgtccataaagagttcaagaaagccctgggagccaactgcatctttctcaacatcacaaacagtgagctcttcattctgtcaaccacagaagcccctgtgaagcgagcatctctgctgggtgatatgcatttccgaagcctgcgcaccaaactgctacttatgtcccgcaatgaagaagctaccaagcacctagagacaagcaagcagttggcagcagccttccaagaggagttcacagtgcgagaggacctgatgggactggcaattgggactcacggtgccaacatccagcaggcccgaaaagtacctggggtgaccgccattgagttgggtgaagagacctgcactttccgcatctatggggagactcccgaggcttgccgacaggcccgaagctaccttgagttttctgaggactcagtgcaagtgcccaggaacctggttggtgagttggtggtgtgtatatacagttagaggtcagaatcaagattctcctacagtgattctgagcttttatcccaggattggcacctccctgtggactcccagtttcacaaggacagagaaacagtctgtaatgggagtgataaaaatgaaagaataaatttctagggattgtaacattttgtcctgtaaaaacacatcagaaacctagaagcaggagaatgaagtaaatggaatccatataaagaaaatgaggctggaagacggtgtatcagctttattcttatttccttaaaaaaaataaaaggctgaattcctcatttacctattccaggcaaagtgattggaaagaacgggaaagtgatccaggagattgtggataaatctggtgtggtgagggttcgagtggaaggtgataatgacaagaagaaccccagggaggaggtatgggtacggggcaagtgggcatagagattggtttccagaagtaaatgggattgtcctctgagggctgggattgttctttgagagggtggagtacggaaagttgtttaacactagtagatttagagcccagaatgatcccactgggcaggctcccctaggagactgggcggcgttaatccttccatttcattttcctttctgatccatcgtttctgctctctgttctctagggaatggttcccttcatttttgttggcacccgagagaacatcagcaatgcccaggctttgctggagtatcacctctcctacctgcaggtacccaggccgggagagaaaaatgctgggtgtgaaaagggaactaagactgctgtgggggtcagctcagggattttggttctctgtttgtctctccgtgtagaacagaaaacatctgtggaaatttggggctatagggttgggtcccagaattttccttgtttagccagtgtcttccttctccctgcattcctgagaggttagatatagagggacagtcagggtgcagaagc

SEQ ID NO: 370769 - DNA, 252 bp, Homo sapiens
gcggccgcctactactactactactactgctcgaattcaagcttctaacgatgtacggggacatgctatggtaatgcacttgctagtactacacactttgtacaacaaaaaacagaggcaagaaacaacggaaagagaaaagccttcctttgttggcccttaaactgagtcaagatctgaaatgtagagatgatctctgacgatacctgtatgttcttattgtgtaaataaaattgctggtatgaaatgaca

SEQ ID NO: 370770 - DNA, 287 bp, Homo sapiens
ctctctgaactacaaaaaaatcaaatttctattcaaagtttctaatactagttttcccatttctaatgtggacactagaggccctgatgattttataaacaactatataacattagtgacatcggtgctccatacctgatagaaaagcagctacaattccttttttttttttttttttttgagacagagtttccccccataacctaattccagacccggggggacccctctatagagttaccctgtgcgggctttgcagcgcttgggcactgggccggctcgtttta

SEQ ID NO: 370771 - DNA, 4514 bp, Homo sapiens
agcgggcatggcctgccgggagggggcaggtagccggcgggcccggtccaatgggtgccggcttccgaggagagggcggaggagaggaggaaggaggcgaactgtgggccccggccccattcattgccgtggccggcgggcactggggccccgtgttttcagagtcatggaggcgctaattcctgtcataaacaagctccaggacgtcttcaacacggtgggcgccgacatcatccagctgcctcaaatcgtcgtagtgggaacgcagagcagcggaaagagctcagtgctagaaagcctggtggggagggacctgcttcccagaggtactggaattgtcacccggagacctctcattctgcaactggtccatgtttcacaagaagataaacggaaaacaacaggagaagaaaatggggtggaagcagaagaatggggtaaatttcttcacaccaaaaataagctttacacggattttgatgaaattcgacaagaaattgaaaatgaaacagaaagaatttcaggaaataataagggagtaagccctgaaccaattcatcttaagattttttcacccaacgttgtcaatttgacacttgtggatttgccaggaatgaccaaggtgcctgtaggtgatcaacctaaggatattgagcttcaaatcagagagctcattcttcggttcatcagtaatcctaattccattatcctcgctgtcactgctgctaatacagatatggcaacatcagaggcacttaaaatttcaagagaggtagatccagatggtcgcagaaccctagctgtaatcactaaacttgatctcatggatgcgggtactgatgccatggatgtattgatgggaagggttattccagtcaaacttggaataattggagtagttaacaggagccagctagatattaacaacaagaagagtgtaactgattcaatccgtgatgagtatgcttttcttcaaaagaaatatccatctctggccaatagaaatggaacaaagtatcttgctaggactctaaacaggttactgatgcatcacatcagagattgtttaccagagttgaaaacaagaataaatgttctagctgctcagtatcagtctcttctaaatagctacggtgaacccgtggatgataaaagtgctactttactccaacttattaccaaatttgccacagaatattgtaacactattgaaggaactgcaaaatatattgaaacttcggagctatgcggtggtgctagaatttgttatattttccatgagacttttgggcgaaccttagaatctgttgatccacttggtggccttaacactattgacattttgactgccattagaaatgctactggtcctcgtcctgctttatttgtgcctgaggtttcatttgagttactggtgaagcggcaaatcaaacgtctagaagagcccagcctccgctgtgtggaactggttcatgaggaaatgcaaaggatcattcagcactgtagcaattacagtacacaggaattgttacgatttcctaaacttcatgatgccatagttgaagtggtgacttgtcttcttcgtaaaaggttgcctgttacaaatgaaatggtccataacttagtggcaattgaactggcttatatcaacacaaaacatccagactttgctgatgcttgtgggctaatgaacaataatatagaggaacaaaggagaaacaggctagccagagaattaccttcagctgtatcacgagacaagtcttctaaagttccaagtgctttggcacctgcctcccaggagccctcccccgctgcttctgctgaggctgatggcaagttaattcaggacagcagaagagaaactaaaaatgttgcatctggaggtggtggggttggagatggtgttcaagaaccaaccacaggcaactggagaggaatgctgaaaacttcaaaagctgaagagttattagcagaagaaaaatcaaaacccattccaattatgccagccagtccacaaaaaggtcatgccgtgaacctgctagatgtgccagttcctgttgcacgaaaactatctgctcgggaacagcgagattgtgaggttattgaacgactcattaaatcatattttctcattgtcagaaagaatattcaagacagtgtgccaaaggcagtaatgcattttttggttaatcatgtgaaagacactcttcagagtgagctagtaggccagctgtataaatcatccttattggatgatcttctgacagaatctgaggacatggcacagcgcaggaaagaagcagctgatatgctaaaggcattacaaggagccagtcaaattattgctgaaatccgggagactcatctttggtgaagagaactatgtaatactgagactttgttgactcaaaacttgctagttactgcctacctgagtagaatcttatttatgaactcctgtgtattgcaatggtatgaatctgctcatgtggagactggctataaactgaaaagtgtattccaaattgcagaacacatcacacatttaatccaaataataaatggctgtttctaaagtttcccagtatatataaaatacatcaagtctgtcttgtgacagtttcatctgaacttaacttaaaaacaactgttaatgttctagttgtgcaaagcagtttgcctgtggataagatgacctgtgtaataatctttgttagtagtcttaaagctgctgccatagtcctccaagaagaaagcaccaagacaacatttcatatgactataatgcatgtactatataagctgatctggctttgaaagatgtgagttggcaagttcctcacatagagtcattgtattccacctgtccttcaatttagttttttctgagcttctttgcagcctttgatgtgtttttaagaaagctgaatgcacaagaggatctgtgacactgacatggctgtggtgtgcatactgtgtagttacatagcccttccaattctgggtccatttgcactagcaaattaaaatatgctttgattcatacttaaacctgaaagcaggaatgcctacattaattcctacattaaaaacagccatctacccttgattatctagaaagacttggtaatgatggtcagttccttttagatttcagaaaatcaaatgatgacctaaatttcccttaatttgcaaatacagtagtaattaaggtacatctctaaagtggagcacttacaccaggctctaagattcactttgaggtggaacttaaaaccagtgtactgtatgtatgcattggtaatagctacttttgcttcatagcttcataccaacaaaatatatttattagaatagtatgaaagtactggaggagctgaaagaaaaacacccaaggctgggcgtggtggcacacgcctgtaatcccagcactttgggaggccgaggcaggtggatcacctgaggttgggagttggagaccagcttgaccaacatggagaaaccccgtctctactaaaaatacaaaattggccgggcgtggtggcgcatgcctgtaatcccagctactcgggagggtgaggcaggagaattgcttgaccctgggaggtggaggttgtggtgagctaagatcgtgccattgcactccagccttggcaacaagagcgaaactccgtctcaaaaaaaaaaaataaaacaacacccagatagatacacatactccttcagacttacagacctaagctgcatttatggggtagtgatgaggtttagaacatatacatattttgttaaaattccccagatgattcttggtatgaacgactatattataaattttaagatgtacttagaaatccttaagacatctagccccgtctctaatagacaacacatttatattgcagatattacttttttttcagtttatgaccaggtatttatgaaggactattggcagggaaaatatgaatatgttaactttagcttatggcatcaatttactaaggaacaacaggctcaccaactgatgtcaaacataaaaacccccacatcagtctgatacgatatggtactactttgaatctgttactagtaccatcttgacagaggatacatgctcccaaaacgtttgttaccacacttaaaaatcactgccatcattaagcatcagtttcaaaattatagccattcatgatttactttttccagatgactatcattattctagtcctttgaatttgtaaggggaaaaaaaacaaaaacaaaaacttacgatgcacttttctccagcacatcagatttcaaattgaaaattaaagacatgctatggtaatgcacttgctagtactacacactttgtacaacaaaaaacagaggcaagaaacaacggaaagagaaaagccttcctttgttggcccttaaactgagtcaagatctgaaatgtagagatgatctctgacgatacctgtatgttcttattgtgtaaataaaattgctggtatgaaatgaca

SEQ ID NO: 370772 - DNA, 5280 bp, Homo sapiens
agcgggcatggcctgccgggagggggcaggtagccggcgggcccggtccaatgggtgccggcttccgaggagagggcggaggagaggaggaaggaggcgaactgtgggccccggccccattcattgccgtggccggcgggcactggggccccgtgttttcagagtcatggaggcgctaattcctgtcataaacaagctccaggacgtcttcaacacggtgggcgccgacatcatccagctgcctcaaatcgtcgtagtgggaacgcagagcagcggaaagagctcagtgctagaaagcctggtggggagggacctgcttcccagaggtactggaattgtcacccggagacctctcattctgcaactggtccatgtttcacaagaagataaacggaaaacaacaggagaagaaaatggggtggaagcagaagaatggggtaaatttcttcacaccaaaaataagctttacacggattttgatgaaattcgacaagaaattgaaaatgaaacagaaagaatttcaggaaataataagggagtaagccctgaaccaattcatcttaagattttttcacccaacgttgtcaatttgacacttgtggatttgccaggaatgaccaaggtgcctgtaggtgatcaacctaaggatattgagcttcaaatcagagagctcattcttcggttcatcagtaatcctaattccattatcctcgctgtcactgctgctaatacagatatggcaacatcagaggcacttaaaatttcaagagaggtagatccagatggtcgcagaaccctagctgtaatcactaaacttgatctcatggatgcgggtactgatgccatggatgtattgatgggaagggttattccagtcaaacttggaataattggagtagttaacaggagccagctagatattaacaacaagaagagtgtaactgattcaatccgtgatgagtatgcttttcttcaaaagaaatatccatctctggccaatagaaatggaacaaagtatcttgctaggactctaaacaggttactgatgcatcacatcagagattgtttaccagagttgaaaacaagaataaatgttctagctgctcagtatcagtctcttctaaatagctacggtgaacccgtggatgataaaagtgctactttactccaacttattaccaaatttgccacagaatattgtaacactattgaaggaactgcaaaatatattgaaacttcggagctatgcggtggtgctagaatttgttatattttccatgagacttttgggcgaaccttagaatctgttgatccacttggtggccttaacactattgacattttgactgccattagaaatgctactggtcctcgtcctgctttatttgtgcctgaggtttcatttgagttactggtgaagcggcaaatcaaacgtctagaagagcccagcctccgctgtgtggaactggttcatgaggaaatgcaaaggatcattcagcactgtagcaattacagtacacaggaattgttacgatttcctaaacttcatgatgccatagttgaagtggtgacttgtcttcttcgtaaaaggttgcctgttacaaatgaaatggtccataacttagtggcaattgaactggcttatatcaacacaaaacatccagactttgctgatgcttgtgggctaatgaacaataatatagaggaacaaaggagaaacaggctagccagagaattaccttcagctgtatcacgagacaagtcttctaaagttccaagtgctttggcacctgcctcccaggagccctcccccgctgcttctgctgaggctgatggcaagttaattcaggacagcagaagagaaactaaaaatgttgcatctggaggtggtggggttggagatggtgttcaagaaccaaccacaggcaactggagaggaatgctgaaaacttcaaaagctgaagagttattagcagaagaaaaatcaaaacccattccaattatgccagccagtccacaaaaaggtcatgccgtgaacctgctagatgtgccagttcctgttgcacgaaaactatctgctcgggaacagcgagattgtgaggttattgaacgactcattaaatcatattttctcattgtcagaaagaatattcaagacagtgtgccaaaggcagtaatgcattttttggttaatcatgtgaaagacactcttcagagtgagctagtaggccagctgtataaatcatccttattggatgatcttctgacagaatctgaggacatggcacagcgcaggaaagaagcagctgatatgctaaaggcattacaaggagccagtcaaattattgctgaaatccgggagactcatctttggtgaagagaactatgtaatactgagactttgttgactcaaaacttgctagttactgcctacctgagtagaatcttatttatgaactcctgtgtattgcaatggtatgaatctgctcatgtggagactggctataaactgaaaagtgtattccaaattgcagaacacatcacacatttaatccaaataataaatggctgtttctaaagtttcccagtatatataaaatacatcaagtctgtcttgtgacagtttcatctgaacttaacttaaaaacaactgttaatgttctagttgtgcaaagcagtttgcctgtggataagatgacctgtgtaataatctttgttagtagtcttaaagctgctgccatagtcctccaagaagaaagcaccaagacaacatttcatatgactataatgcatgtactatataagctgatctggctttgaaagatgtgagttggcaagttcctcacatagagtcattgtattccacctgtccttcaatttagttttttctgagcttctttgcagcctttgatgtgtttttaagaaagctgaatgcacaagaggatctgtgacactgacatggctgtggtgtgcatactgtgtagttacatagcccttccaattctgggtccatttgcactagcaaattaaaatatgctttgattcatacttaaacctgaaagcaggaatgcctacattaattcctacattaaaaacagccatctacccttgattatctagaaagacttggtaatgatggtcagttccttttagatttcagaaaatcaaatgatgacctaaatttcccttaatttgcaaatacagtagtaattaaggtacatctctaaagtggagcacttacaccaggctctaagattcactttgaggtggaacttaaaaccagtgtactgtatgtatgcattggtaatagctacttttgcttcatagcttcataccaacaaaatatatttattagaatagtatgaaagtactggaggagctgaaagaaaaacacccaaggctgggcgtggtggcacacgcctgtaatcccagcactttgggaggccgaggcaggtggatcacctgaggttgggagttggagaccagcttgaccaacatggagaaaccccgtctctactaaaaatacaaaattggccgggcgtggtggcgcatgcctgtaatcccagctactcgggagggtgaggcaggagaattgcttgaccctgggaggtggaggttgtggtgagctaagatcgtgccattgcactccagccttggcaacaagagcgaaactccgtctcaaaaaaaaaaaataaaacaacacccagatagatacacatactccttcagacttacagacctaagctgcatttatggggtagtgatgaggtttagaacatatacatattttgttaaaattccccagatgattcttggtatgaacgactatattataaattttaagatgtacttagaaatccttaagacatctagccccgtctctaatagacaacacatttatattgcagatattacttttttttcagtttatgaccaggtatttatgaaggactattggcagggaaaatatgaatatgttaactttagcttatggcatcaatttactaaggaacaacaggctcaccaactgatgtcaaacataaaaacccccacatcagtctgatacgatatggtactactttgaatctgttactagtaccatcttgacagaggatacatgctcccaaaacgtttgttaccacacttaaaaatcactgccatcattaagcatcagtttcaaaattatagccattcatgatttactttttccagatgactatcattattctagtcctttgaatttgtaaggggaaaaaaaacaaaaacaaaaacttacgatgcacttttctccagcacatcagatttcaaattgaaaattaaagacatgctatggtaatgcacttgctagtactacacactttgtacaacaaaaaacagaggcaagaaacaacggaaagagaaaagccttcctttgttggcccttaaactgagtcaagatctgaaatgtagagatgatctctgacgatacctgtatgttcttattgtgtaaataaaattgctggtatgaaatgacactaaagtttgtcaaaaaatgaattcttaacttttctcccagagaaagggagacaaaaggagctttttaatacctaatctactttggaacataaccgtatagagtacgaaaaattttacgacttttttcctaccagattctgacagttcaccaaggtattataacatctccatttttgcgtatgaagacagtgacttgctccaagtaatccaggtagtaaatggctagaatttgaacactaaagccatgctctgctgcctgtaaggttttcaaaagaaatctgattaatcatttcgtatgtgattcacttgatcctcaaggcaacagggatgccattgccttgatttttcagatatggaaatagttctggagaattaatttgcctcatgtttgaagagctgaactcagtcttgattccaaatcctttaagtttgacctgaaaactttccttacctggatactttttgatattctcatatgattgcatatttggtataattggctttatttttggggggttaactttttaatttacctcaagttgcaatctgcttggggggaaaagctgaaacttaaaaccaatttaagtttctaaatttataaaacattgctaccttaggaatccactgacaacaaggcttaatgtgaacagaattatactggaacacaggcaaggaaccagaaaactgaattagaaactttctgaaaagtcacgtactgatttttgtactattatttgtaaagaaactacttactgtaatttctca

SEQ ID NO: 370773 - DNA, 4456 bp, Homo sapiens
agcgggcatggcctgccgggagggggcaggtagccggcgggcccggtccaatgggtgccggcttccgaggagagggcggaggagaggaggaaggaggcgaactgtgggccccggccccattcattgccgtggccggcgggcactggggccccgtgttttcagagtcatggaggcgctaattcctgtcataaacaagctccaggacgtcttcaacacggtgggcgccgacatcatccagctgcctcaaatcgtcgtagtgggaacgcagagcagcggaaagagctcagtgctagaaagcctggtggggagggacctgcttcccagaggtactggaattgtcacccggagacctctcattctgcaactggtccatgtttcacaagaagataaacggaaaacaacaggagaagaaaatggggtggaagcagaagaatggggtaaatttcttcacaccaaaaataagctttacacggattttgatgaaattcgacaagaaattgaaaatgaaacagaaagaatttcaggaaataataagggagtaagccctgaaccaattcatcttaagattttttcacccaacgttgtcaatttgacacttgtggatttgccaggaatgaccaaggtgcctgtaggtgatcaacctaaggatattgagcttcaaatcagagagctcattcttcggttcatcagtaatcctaattccattatcctcgctgtcactgctgctaatacagatatggcaacatcagaggcacttaaaatttcaagagaggtagatccagatggtcgcagaaccctagctgtaatcactaaacttgatctcatggatgcgggtactgatgccatggatgtattgatgggaagggttattccagtcaaacttggaataattggagtagttaacaggagccagctagatattaacaacaagaagagtgtaactgattcaatccgtgatgagtatgcttttcttcaaaagaaatatccatctctggccaatagaaatggaacaaagtatcttgctaggactctaaacaggttactgatgcatcacatcagagattgtttaccagagttgaaaacaagaataaatgttctagctgctcagtatcagtctcttctaaatagctacggtgaacccgtggatgataaaagtgctactttactccaacttattaccaaatttgccacagaatattgtaacactattgaaggaactgcaaaatatattgaaacttcggagctatgcggtggtgctagaatttgttatattttccatgagacttttgggcgaaccttagaatctgttgatccacttggtggccttaacactattgacattttgactgccattagaaatgctactggtcctcgtcctgctttatttgtgcctgaggtttcatttgagttactggtgaagcggcaaatcaaacgtctagaagagcccagcctccgctgtgtggaactggttcatgaggaaatgcaaaggatcattcagcactgtagcaattacagtacacaggaattgttacgatttcctaaacttcatgatgccatagttgaagtggtgacttgtcttcttcgtaaaaggttgcctgttacaaatgaaatggtccataacttagtggcaattgaactggcttatatcaacacaaaacatccagactttgctgatgcttgtgggctaatgaacaataatatagaggaacaaaggagaaacaggctagccagagaattaccttcagctgtatcacgagacaagtcttctaaagttccaagtgctttggcacctgcctcccaggagccctcccccgctgcttctgctgaggctgatggcaagttaattcaggacagcagaagagaaactaaaaatgttgcatctggaggtggtggggttggagatggtgttcaagaaccaaccacaggcaactggagaggaatgctgaaaacttcaaaagctgaagagttattagcagaagaaaaatcaaaacccattccaattatgccagccagtccacaaaaaggtcatgccgtgaacctgctagatgtgccagttcctgttgcacgaaaactatctgctcgggaacagcgagattgtgaggttattgaacgactcattaaatcatattttctcattgtcagaaagaatattcaagacagtgtgccaaaggcagtaatgcattttttggttaatcatgtgaaagacactcttcagagtgagctagtaggccagctgtataaatcatccttattggatgatcttctgacagaatctgaggacatggcacagcgcaggaaagaagcagctgatatgctaaaggcattacaaggagccagtcaaattattgctgaaatccgggagactcatctttggtgaagagaactatgtaatactgagactttgttgactcaaaacttgctagttactgcctacctgagtagaatcttatttatgaactcctgtgtattgcaatggtatgaatctgctcatgtggagactggctataaactgaaaagtgtattccaaattgcagaacacatcacacatttaatccaaataataaatggctgtttctaaagtttcccagtatatataaaatacatcaagtctgtcttgtgacagtttcatctgaacttaacttaaaaacaactgttaatgttctagttgtgcaaagcagtttgcctgtggataagatgacctgtgtaataatctttgttagtagtcttaaagctgctgccatagtcctccaagaagaaagcaccaagacaacatttcatatgactataatgcatgtactatataagctgatctggctttgaaagatgtgagttggcaagttcctcacatagagtcattgtattccacctgtccttcaatttagttttttctgagcttctttgcagcctttgatgtgtttttaagaaagctgaatgcacaagaggatctgtgacactgacatggctgtggtgtgcatactgtgtagttacatagcccttccaattctgggtccatttgcactagcaaattaaaatatgctttgattcatacttaaacctgaaagcaggaatgcctacattaattcctacattaaaaacagccatctacccttgattatctagaaagacttggtaatgatggtcagttccttttagatttcagaaaatcaaatgatgacctaaatttcccttaatttgcaaatacagtagtaattaaggtacatctctaaagtggagcacttacaccaggctctaagattcactttgaggtggaacttaaaaccagtgtactgtatgtatgcattggtaatagctacttttgcttcatagcttcataccaacaaaatatatttattagaatagtatgaaagtactggaggagctgaaagaaaaacacccaaggctgggcgtggtggcacacgcctgtaatcccagcactttgggaggccgaggcaggtggatcacctgaggttgggagttggagaccagcttgaccaacatggagaaaccccgtctctactaaaaatacaaaattggccgggcgtggtggcgcatgcctgtaatcccagctactcgggagggtgaggcaggagaattgcttgaccctgggaggtggaggttgtggtgagctaagatcgtgccattgcactccagccttggcaacaagagcgaaactccgtctcaaaaaactgcatttatggggtagtgatgaggtttagaacatatacatattttgttaaaattccccagatgattcttggtatgaacgactatattataaattttaagatgtacttagaaatccttaagacatctagccccgtctctaatagacaacacatttatattgcagatattacttttttttcagtttatgaccaggtatttatgaaggactattggcagggaaaatatgaatatgttaactttagcttatggcatcaatttactaaggaacaacaggctcaccaactgatgtcaaacataaaaacccccacatcagtctgatacgatatggtactactttgaatctgttactagtaccatcttgacagaggatacatgctcccaaaacgtttgttaccacacttaaaaatcactgccatcattaagcatcagtttcaaaattatagccattcatgatttactttttccagatgactatcattattctagtcctttgaatttgtaaggggaaaaaaaacaaaaacaaaaacttacgatgcacttttctccagcacatcagatttcaaattgaaaattaaagacatgctatggtaatgcacttgctagtactacacactttgtacaacaaaaaacagaggcaagaaacaacggaaagagaaaagccttcctttgttggcccttaaactgagtcaagatctgaaatgtagagatgatctctgacgatacctgtatgttcttattgtgtaaataaaattgctggtatgaaatgaca

SEQ ID NO: 370774 - DNA, 4460 bp, Homo sapiens
agcgggcatggcctgccgggagggggcaggtagccggcgggcccggtccaatgggtgccggcttccgaggagagggcggaggagaggaggaaggaggcgaactgtgggccccggccccattcattgccgtggccggcgggcactggggccccgtgttttcagagtcatggaggcgctaattcctgtcataaacaagctccaggacgtcttcaacacggtgggcgccgacatcatccagctgcctcaaatcgtcgtagtgggaacgcagagcagcggaaagagctcagtgctagaaagcctggtggggagggacctgcttcccagaggtactggaattgtcacccggagacctctcattctgcaactggtccatgtttcacaagaagataaacggaaaacaacaggagaagaaaatggggtggaagcagaagaatggggtaaatttcttcacaccaaaaataagctttacacggattttgatgaaattcgacaagaaattgaaaatgaaacagaaagaatttcaggaaataataagggagtaagccctgaaccaattcatcttaagattttttcacccaacgttgtcaatttgacacttgtggatttgccaggaatgaccaaggtgcctgtaggtgatcaacctaaggatattgagcttcaaatcagagagctcattcttcggttcatcagtaatcctaattccattatcctcgctgtcactgctgctaatacagatatggcaacatcagaggcacttaaaatttcaagagaggtagatccagatggtcgcagaaccctagctgtaatcactaaacttgatctcatggatgcgggtactgatgccatggatgtattgatgggaagggttattccagtcaaacttggaataattggagtagttaacaggagccagctagatattaacaacaagaagagtgtaactgattcaatccgtgatgagtatgcttttcttcaaaagaaatatccatctctggccaatagaaatggaacaaagtatcttgctaggactctaaacaggttactgatgcatcacatcagagattgtttaccagagttgaaaacaagaataaatgttctagctgctcagtatcagtctcttctaaatagctacggtgaacccgtggatgataaaagtgctactttactccaacttattaccaaatttgccacagaatattgtaacactattgaaggaactgcaaaatatattgaaacttcggagctatgcggtggtgctagaatttgttatattttccatgagacttttgggcgaaccttagaatctgttgatccacttggtggccttaacactattgacattttgactgccattagaaatgctactggtcctcgtcctgctttatttgtgcctgaggtttcatttgagttactggtgaagcggcaaatcaaacgtctagaagagcccagcctccgctgtgtggaactggttcatgaggaaatgcaaaggatcattcagcactgtagcaattacagtacacaggaattgttacgatttcctaaacttcatgatgccatagttgaagtggtgacttgtcttcttcgtaaaaggttgcctgttacaaatgaaatggtccataacttagtggcaattgaactggcttatatcaacacaaaacatccagactttgctgatgcttgtgggctaatgaacaataatatagaggaacaaaggagaaacaggctagccagagaattaccttcagctgtatcacgagacaagtcttctaaagttccaagtgctttggcacctgcctcccaggagccctcccccgctgcttctgctgaggctgatggcaagttaattcaggacagcagaagagaaactaaaaatgttgcatctggaggtggtggggttggagatggtgttcaagaaccaaccacaggcaactggagaggaatgctgaaaacttcaaaagctgaagagttattagcagaagaaaaatcaaaacccattccaattatgccagccagtccacaaaaaggtcatgccgtgaacctgctagatgtgccagttcctgttgcacgaaaactatctgctcgggaacagcgagattgtgaggttattgaacgactcattaaatcatattttctcattgtcagaaagaatattcaagacagtgtgccaaaggcagtaatgcattttttggttaatcatgtgaaagacactcttcagagtgagctagtaggccagctgtataaatcatccttattggatgatcttctgacagaatctgaggacatggcacagcgcaggaaagaagcagctgatatgctaaaggcattacaaggagccagtcaaattattgctgaaatccgggagactcatctttggtgaagagaactatgtaatactgagactttgttgactcaaaacttgctagttactgcctacctgagtagaatcttatttatgaactcctgtgtattgcaatggtatgaatctgctcatgtggagactggctataaactgaaaagtgtattccaaattgcagaacacatcacacatttaatccaaataataaatggctgtttctaaagtttcccagtatatataaaatacatcaagtctgtcttgtgacagtttcatctgaacttaacttaaactgtgtaataatctttgttagtagtcttaaagctgctgccatagtcctccaagaagaaagcaccaagacaacatttcatatgactataatgcatgtactatataagctgatctggctttgaaagatgtgagttggcaagttcctcacatagagtcattgtattccacctgtccttcaatttagttttttctgagcttctttgcagcctttgatgtgtttttaagaaagctgaatgcacaagaggatctgtgacactgacatggctgtggtgtgcatactgtgtagttacatagcccttccaattctgggtccatttgcactagcaaattaaaatatgctttgattcatacttaaacctgaaagcaggaatgcctacattaattcctacattaaaaacagccatctacccttgattatctagaaagacttggtaatgatggtcagttccttttagatttcagaaaatcaaatgatgacctaaatttcccttaatttgcaaatacagtagtaattaaggtacatctctaaagtggagcacttacaccaggctctaagattcactttgaggtggaacttaaaaccagtgtactgtatgtatgcattggtaatagctacttttgcttcatagcttcataccaacaaaatatatttattagaatagtatgaaagtactggaggagctgaaagaaaaacacccaaggctgggcgtggtggcacacgcctgtaatcccagcactttgggaggccgaggcaggtggatcacctgaggttgggagttggagaccagcttgaccaacatggagaaaccccgtctctactaaaaatacaaaattggccgggcgtggtggcgcatgcctgtaatcccagctactcgggagggtgaggcaggagaattgcttgaccctgggaggtggaggttgtggtgagctaagatcgtgccattgcactccagccttggcaacaagagcgaaactccgtctcaaaaaaaaaaaataaaacaacacccagatagatacacatactccttcagacttacagacctaagctgcatttatggggtagtgatgaggtttagaacatatacatattttgttaaaattccccagatgattcttggtatgaacgactatattataaattttaagatgtacttagaaatccttaagacatctagccccgtctctaatagacaacacatttatattgcagatattacttttttttcagtttatgaccaggtatttatgaaggactattggcagggaaaatatgaatatgttaactttagcttatggcatcaatttactaaggaacaacaggctcaccaactgatgtcaaacataaaaacccccacatcagtctgatacgatatggtactactttgaatctgttactagtaccatcttgacagaggatacatgctcccaaaacgtttgttaccacacttaaaaatcactgccatcattaagcatcagtttcaaaattatagccattcatgatttactttttccagatgactatcattattctagtcctttgaatttgtaaggggaaaaaaaacaaaaacaaaaacttacgatgcacttttctccagcacatcagatttcaaattgaaaattaaagacatgctatggtaatgcacttgctagtactacacactttgtacaacaaaaaacagaggcaagaaacaacggaaagagaaaagccttcctttgttggcccttaaactgagtcaagatctgaaatgtagagatgatctctgacgatacctgtatgttcttattgtgtaaataaaattgctggtatgaaatgaca

SEQ ID NO: 370775 - DNA, 4227 bp, Homo sapiens
agcgggcatggcctgccgggagggggcaggtagccggcgggcccggtccaatgggtgccggcttccgaggagagggcggaggagaggaggaaggaggcgaactgtgggccccggccccattcattgccgtggccggcgggcactggggccccgtgttttcagagtcatggaggcgctaattcctgtcataaacaagctccaggacgtcttcaacacggtgggcgccgacatcatccagctgcctcaaatcgtcgtagtgggaacgcagagcagcggaaagagctcagtgctagaaagcctggtggggagggacctgcttcccagaggtactggaattgtcacccggagacctctcattctgcaactggtccatgtttcacaagaagataaacggaaaacaacaggagaagaaaatggggtggaagcagaagaatggggtaaatttcttcacaccaaaaataagctttacacggattttgatgaaattcgacaagaaattgaaaatgaaacagaaagaatttcaggaaataataagggagtaagccctgaaccaattcatcttaagattttttcacccaacgttgtcaatttgacacttgtggatttgccaggaatgaccaaggtgcctgtaggtgatcaacctaaggatattgagcttcaaatcagagagctcattcttcggttcatcagtaatcctaattccattatcctcgctgtcactgctgctaatacagatatggcaacatcagaggcacttaaaatttcaagagaggtagatccagatggtcgcagaaccctagctgtaatcactaaacttgatctcatggatgcgggtactgatgccatggatgtattgatgggaagggttattccagtcaaacttggaataattggagtagttaacaggagccagctagatattaacaacaagaagagtgtaactgattcaatccgtgatgagtatgcttttcttcaaaagaaatatccatctctggccaatagaaatggaacaaagtatcttgctaggactctaaacaggttactgatgcatcacatcagagattgtttaccagagttgaaaacaagaataaatgttctagctgctcagtatcagtctcttctaaatagctacggtgaacccgtggatgataaaagtgctactttactccaacttattaccaaatttgccacagaatattgtaacactattgaaggaactgcaaaatatattgaaacttcggagctatgcggtggtgctagaatttgttatattttccatgagacttttgggcgaaccttagaatctgttgatccacttggtggccttaacactattgacattttgactgccattagaaatgctactggtcctcgtcctgctttatttgtgcctgaggtttcatttgagttactggtgaagcggcaaatcaaacgtctagaagagcccagcctccgctgtgtggaactggttcatgaggaaatgcaaaggatcattcagcactgtagcaattacagtacacaggaattgttacgatttcctaaacttcatgatgccatagttgaagtggtgacttgtcttcttcgtaaaaggttgcctgttacaaatgaaatggtccataacttagtggcaattgaactggcttatatcaacacaaaacatccagactttgctgatgcttgtgggctaatgaacaataatatagaggaacaaaggagaaacaggctagccagagaattaccttcagctgtatcacgagacaagtcttctaaagttccaagtgctttggcacctgcctcccaggagccctcccccgctgcttctgctgaggctgatggcaagttaattcaggacagcagaagagaaactaaaaatgttgcatctggaggtggtggggttggagatggtgttcaagaaccaaccacaggcaactggagaggaatgctgaaaacttcaaaagctgaagagttattagcagaagaaaaatcaaaacccattccaattatgccagccagtccacaaaaaggtcatgccgtgaacctgctagatgtgccagttcctgttgcacgaaaactatctgctcgggaacagcgagattgtgaggttattgaacgactcattaaatcatattttctcattgtcagaaagaatattcaagacagtgtgccaaaggcagtaatgcattttttggttaatcatgtgaaagacactcttcagagtgagctagtaggccagctgtataaatcatccttattggatgatcttctgacagaatctgaggacatggcacagcgcaggaaagaagcagctgatatgctaaaggcattacaaggagccagtcaaattattgctgaaatccgggagactcatctttggtgaagagaactatgtaatactgagactttgttgactcaaaacttgctagttactgcctacctgagtagaatcttatttatgaactcctgtgtattgcaatggtatgaatctgctcatgtggagactggctataaactgaaaagtgtattccaaattgcagaacacatcacacatttaatccaaataataaatggctgtttctaaagtttcccagtatatataaaatacatcaagtctgtcttgtgacagtttcatctgaacttaacttaaaaacaactgttaatgttctagttgtgcaaagcagtttgcctgtggataagatgacctgtgtaataatctttgttagtagtcttaaagctgctgccatagtcctccaagaagaaagcaccaagacaacatttcatatgactataatgcatgtactatataagctgatctggctttgaaagatgtgagttggcaagttcctcacatagagtcattgtattccacctgtccttcaatttagttttttctgagcttctttgcagcctttgatgtgtttttaagaaagctgaatgcacaagaggatctgtgacactgacatggctgtggtgtgcatactgtgtagttacatagcccttccaattctgggtccatttgcactagcaaattaaaatatgctttgattcatacttaaacctgaaagcaggaatgcctacattaattcctacattaaaaacagccatctacccttgattatctagaaagacttggtaatgatggtcagttccttttagatttcagaaaatcaaatgatgacctaaatttcccttaatttgcaaatacagtagtaattaaggtacatctctaaagtggagcacttacaccaggctctaagattcactttgaggtggaacttaaaaccagtgtactgtatgtatgcattggtaatagctacttttgcttcatagcttcataccaacaaaatatatttattagaatagtatgaaagtactggaggagctgaaagaaaaacacccaaggctgggcgtggtggcacacgcctgtaatcccagcactttgggaggccgaggcaggtggatcacctgaggttgggagttggagaccagcttgaccaacatggagaaaccccgtctctactaaaaatacaaaattggccgggcgtggtggcgcatgcctgtaatcccagctactcgggagggtgaggcaggagaattgcttgaccctgggaggtggaggttgtggtgagctaagatcgtgccattgcactccagccttggcaacaagagcgaaactccgtctcaaaaaaaaaaaataaaacaacacccagatagatacacatactccttcagacttacagacctaagctgcatttatggggtagtgatgaggtttagaacatatacatattttgttaaaattccccagatgattcttggtatgaaatggacaaaaaaaaaaaaaaaaaaaacaaaaaaaaaaaaaaaaaaaaaaagaaaaagaaaaaaagagaaaaaaagaaagaacaaaaaaagagaaaagaaaaaaaaaaaagagggggggggtataaaattagacacgggcgggcgccgcgattaatcgccacacgccactagcccataacaaacggaggcacccccccaagcacgacagtatgaaaaagcacggccgggccgagcatccaaagacgaccggaagggaaacaaaggcgaggaagacataaggaaaaaccccccagtcgggggtagcaagacagacacccacgacgagaaaagacgccgagcagaaaaaacggggggtgaggcagaagcacagtcatgcgcggaagagagagcggacgctagaacaac

SEQ ID NO: 370776 - DNA, 3490 bp, Homo sapiens
agcgggcatggcctgccgggagggggcaggtagccggcgggcccggtccaatgggtgccggcttccgaggagagggcggaggagaggaggaaggaggcgaactgtgggccccggccccattcattgccgtggccggcgggcactggggccccgtgttttcagagtcatggaggcgctaattcctgtcataaacaagctccaggacgtcttcaacacggtgggcgccgacatcatccagctgcctcaaatcgtcgtagtgggaacgcagagcagcggaaagagctcagtgctagaaagcctggtggggagggacctgcttcccagaggtactggaattgtcacccggagacctctcattctgcaactggtccatgtttcacaagaagataaacggaaaacaacaggagaagaaaatggggtggaagcagaagaatggggtaaatttcttcacaccaaaaataagctttacacggattttgatgaaattcgacaagaaattgaaaatgaaacagaaagaatttcaggaaataataagggagtaagccctgaaccaattcatcttaagattttttcacccaacgttgtcaatttgacacttgtggatttgccaggaatgaccaaggtgcctgtaggtgatcaacctaaggatattgagcttcaaatcagagagctcattcttcggttcatcagtaatcctaattccattatcctcgctgtcactgctgctaatacagatatggcaacatcagaggcacttaaaatttcaagagaggtagatccagatggtcgcagaaccctagctgtaatcactaaacttgatctcatggatgcgggtactgatgccatggatgtattgatgggaagggttattccagtcaaacttggaataattggagtagttaacaggagccagctagatattaacaacaagaagagtgtaactgattcaatccgtgatgagtatgcttttcttcaaaagaaatatccatctctggccaatagaaatggaacaaagtatcttgctaggactctaaacaggttactgatgcatcacatcagagattgtttaccagagttgaaaacaagaataaatgttctagctgctcagtatcagtctcttctaaatagctacggtgaacccgtggatgataaaagtgctactttactccaacttattaccaaatttgccacagaatattgtaacactattgaaggaactgcaaaatatattgaaacttcggagctatgcggtggtgctagaatttgttatattttccatgagacttttgggcgaaccttagaatctgttgatccacttggtggccttaacactattgacattttgactgccattagaaatgctactggtcctcgtcctgctttatttgtgcctgaggtttcatttgagttactggtgaagcggcaaatcaaacgtctagaagagcccagcctccgctgtgtggaactggttcatgaggaaatgcaaaggatcattcagcactgtagcaattacagtacacaggaattgttacgatttcctaaacttcatgatgccatagttgaagtggtgacttgtcttcttcgtaaaaggttgcctgttacaaatgaaatggtccataacttagtggcaattgaactggcttatatcaacacaaaacatccagactttgctgatgcttgtgggctaatgaacaataatatagaggaacaaaggagaaacaggctagccagagaattaccttcagctgtatcacgagacaagtcttctaaagttccaagtgctttggcacctgcctcccaggagccctcccccgctgcttctgctgaggctgatggcaagttaattcaggacagcagaagagaaactaaaaatgttgcatctggaggtggtggggttggagatggtgttcaagaaccaaccacaggcaactggagaggaatgctgaaaacttcaaaagctgaagagttattagcagaagaaaaatcaaaacccattccaattatgccagccagtccacaaaaaggtcatgccgtgaacctgctagatgtgccagttcctgttgcacgaaaactatctgctcgggaacagcgagattgtgaggttattgaacgactcattaaatcatattttctcattgtcagaaagaatattcaagacagtgtgccaaaggcagtaatgcattttttggttaatcatgtgaaagacactcttcagagtgagctagtaggccagctgtataaatcatccttattggatgatcttctgacagaatctgaggacatggcacagcgcaggaaagaagcagctgatatgctaaaggcattacaaggagccagtcaaattattgctgaaatccgggagactcatctttggtgaagagaactatgtaatactgagactttgttgactcaaaacttgctagttactgcctacctgagtagaatcttatttatgaactcctgtgtattgcaatggtatgaatctgctcatgtggagactggctataaactgaaaagtgtattccaaattgcagaacacatcacacatttaatccaaataataaatggctgtttctaaagtttcccagtatatataaaatacatcaagtctgtcttgtgacagtttcatctgaacttaacttaaaaacaactgttaatgttctagttgtgcaaagcagtttgcctgtggataagatgacctgtgtaataatctttgttagtagtcttaaagctgctgccatagtcctccaagaagaaagcaccaagacaacatttcatatgactataatgcatgtactatataagctgatctggctttgaaagatgtgagttggcaagttcctcacatagagtcattgtattccacctgtccttcaatttagttttttctgagcttctttgcagcctttgatgtgtttttaagaaagctgaatgcacaagaggatctgtgacactgacatggctgtggtgtgcatactgtgtagttacatagcccttccaattctgggtccatttgcactagcaaattaaaatatgctttgattcatacttaaacctgaaagcaggaatgcctacattaattcctacattaaaaacagccatctacccttgattatctagaaagacttggtaatgatggtcagttccttttagatttcagaaaatcaaatgatgacctaaatttcccttaatttgcaaatacagtagtaattaaggtacatctctaaagtggagcacttacaccatgcccagcctcacaattccttacactacctctttttcattgttcctcatcactacaaaaaggagagcaggaagggtaagataggaaagcagcatttctttctcttctgaagtataattttaaaaagagattaaccctgaaaatcatggttttctatggtaatcaagctttgtacatcagaaaataaaacatcccattattaaacaaatatttattaaccggcccataaaaataatgaagttactc

SEQ ID NO: 370777 - DNA, 4436 bp, Homo sapiens
agcgggcatggcctgccgggagggggcaggtagccggcgggcccggtccaatgggtgccggcttccgaggagagggcggaggagaggaggaaggaggcgaactgtgggccccggccccattcattgccgtggccggcgggcactggggccccgtgttttcagagtcatggaggcgctaattcctgtcataaacaagctccaggacgtcttcaacacggtgggcgccgacatcatccagctgcctcaaatcgtcgtagtgggaacgcagagcagcggaaagagctcagtgctagaaagcctggtggggagggacctgcttcccagaggtactggaattgtcacccggagacctctcattctgcaactggtccatgtttcacaagaagataaacggaaaacaacaggagaagaaaatggggtggaagcagaagaatggggtaaatttcttcacaccaaaaataagctttacacggattttgatgaaattcgacaagaaattgaaaatgaaacagaaagaatttcaggaaataataagggagtaagccctgaaccaattcatcttaagattttttcacccaacgttgtcaatttgacacttgtggatttgccaggaatgaccaaggtgcctgtaggtgatcaacctaaggatattgagcttcaaatcagagagctcattcttcggttcatcagtaatcctaattccattatcctcgctgtcactgctgctaatacagatatggcaacatcagaggcacttaaaatttcaagagaggtagatccagatggtcgcagaaccctagctgtaatcactaaacttgatctcatggatgcgggtactgatgccatggatgtattgatgggaagggttattccagtcaaacttggaataattggagtagttaacaggagccagctagatattaacaacaagaagagtgtaactgattcaatccgtgatgagtatgcttttcttcaaaagaaatatccatctctggccaatagaaatggaacaaagtatcttgctaggactctaaacaggttactgatgcatcacatcagagattgtttaccagagttgaaaacaagaataaatgttctagctgctcagtatcagtctcttctaaatagctacggtgaacccgtggatgataaaagtgctactttactccaacttattaccaaatttgccacagaatattgtaacactattgaaggaactgcaaaatatattgaaacttcggagctatgcggtggtgctagaatttgttatattttccatgagacttttgggcgaaccttagaatctgttgatccacttggtggccttaacactattgacattttgactgccattagaaatgctactggtcctcgtcctgctttatttgtgcctgaggtttcatttgagttactggtgaagcggcaaatcaaacgtctagaagagcccagcctccgctgtgtggaactggttcatgaggaaatgcaaaggatcattcagcactgtagcaattacagtacacaggaattgttacgatttcctaaacttcatgatgccatagttgaagtggtgacttgtcttcttcgtaaaaggttgcctgttacaaatgaaatggtccataacttagtggcaattgaactggcttatatcaacacaaaacatccagactttgctgatgcttgtgggctaatgaacaataatatagaggaacaaaggagaaacaggctagccagagaattaccttcagctgtatcacgagacaagttaattcaggacagcagaagagaaactaaaaatgttgcatctggaggtggtggggttggagatggtgttcaagaaccaaccacaggcaactggagaggaatgctgaaaacttcaaaagctgaagagttattagcagaagaaaaatcaaaacccattccaattatgccagccagtccacaaaaaggtcatgccgtgaacctgctagatgtgccagttcctgttgcacgaaaactatctgctcgggaacagcgagattgtgaggttattgaacgactcattaaatcatattttctcattgtcagaaagaatattcaagacagtgtgccaaaggcagtaatgcattttttggttaatcatgtgaaagacactcttcagagtgagctagtaggccagctgtataaatcatccttattggatgatcttctgacagaatctgaggacatggcacagcgcaggaaagaagcagctgatatgctaaaggcattacaaggagccagtcaaattattgctgaaatccgggagactcatctttggtgaagagaactatgtaatactgagactttgttgactcaaaacttgctagttactgcctacctgagtagaatcttatttatgaactcctgtgtattgcaatggtatgaatctgctcatgtggagactggctataaactgaaaagtgtattccaaattgcagaacacatcacacatttaatccaaataataaatggctgtttctaaagtttcccagtatatataaaatacatcaagtctgtcttgtgacagtttcatctgaacttaacttaaaaacaactgttaatgttctagttgtgcaaagcagtttgcctgtggataagatgacctgtgtaataatctttgttagtagtcttaaagctgctgccatagtcctccaagaagaaagcaccaagacaacatttcatatgactataatgcatgtactatataagctgatctggctttgaaagatgtgagttggcaagttcctcacatagagtcattgtattccacctgtccttcaatttagttttttctgagcttctttgcagcctttgatgtgtttttaagaaagctgaatgcacaagaggatctgtgacactgacatggctgtggtgtgcatactgtgtagttacatagcccttccaattctgggtccatttgcactagcaaattaaaatatgctttgattcatacttaaacctgaaagcaggaatgcctacattaattcctacattaaaaacagccatctacccttgattatctagaaagacttggtaatgatggtcagttccttttagatttcagaaaatcaaatgatgacctaaatttcccttaatttgcaaatacagtagtaattaaggtacatctctaaagtggagcacttacaccaggctctaagattcactttgaggtggaacttaaaaccagtgtactgtatgtatgcattggtaatagctacttttgcttcatagcttcataccaacaaaatatatttattagaatagtatgaaagtactggaggagctgaaagaaaaacacccaaggctgggcgtggtggcacacgcctgtaatcccagcactttgggaggccgaggcaggtggatcacctgaggttgggagttggagaccagcttgaccaacatggagaaaccccgtctctactaaaaatacaaaattggccgggcgtggtggcgcatgcctgtaatcccagctactcgggagggtgaggcaggagaattgcttgaccctgggaggtggaggttgtggtgagctaagatcgtgccattgcactccagccttggcaacaagagcgaaactccgtctcaaaaaaaaaaaataaaacaacacccagatagatacacatactccttcagacttacagacctaagctgcatttatggggtagtgatgaggtttagaacatatacatattttgttaaaattccccagatgattcttggtatgaacgactatattataaattttaagatgtacttagaaatccttaagacatctagccccgtctctaatagacaacacatttatattgcagatattacttttttttcagtttatgaccaggtatttatgaaggactattggcagggaaaatatgaatatgttaactttagcttatggcatcaatttactaaggaacaacaggctcaccaactgatgtcaaacataaaaacccccacatcagtctgatacgatatggtactactttgaatctgttactagtaccatcttgacagaggatacatgctcccaaaacgtttgttaccacacttaaaaatcactgccatcattaagcatcagtttcaaaattatagccattcatgatttactttttccagatgactatcattattctagtcctttgaatttgtaaggggaaaaaaaacaaaaacaaaaacttacgatgcacttttctccagcacatcagatttcaaattgaaaattaaagacatgctatggtaatgcacttgctagtactacacactttgtacaacaaaaaacagaggcaagaaacaacggaaagagaaaagccttcctttgttggcccttaaactgagtcaagatctgaaatgtagagatgatctctgacgatacctgtatgttcttattgtgtaaataaaattgctggtatgaaatgaca

SEQ ID NO: 370778 - DNA, 2910 bp, Homo sapiens
agcgggcatggcctgccgggagggggcaggtagccggcgggcccggtccaatgggtgccggcttccgaggagagggcggaggagaggaggaaggaggcgaactgtgggccccggccccattcattgccgtggccggcgggcactggggccccgtgttttcagagtcatggaggcgctaattcctgtcataaacaagctccaggacgtcttcaacacggtgggcgccgacatcatccagctgcctcaaatcgtcgtagtgggaacgcagagcagcggaaagagctcagtgctagaaagcctggtggggagggacctgcttcccagaggtactggaattgtcacccggagacctctcattctgcaactggtccatgtttcacaagaagataaacggaaaacaacaggagaagaaaatggggtggaagcagaagaatggggtaaatttcttcacaccaaaaataagctttacacggattttgatgaaattcgacaagaaattgaaaatgaaacagaaagaatttcaggaaataataagggagtaagccctgaaccaattcatcttaagattttttcacccaacgttgtcaatttgacacttgtggatttgccaggaatgaccaaggtgcctgtaggtgatcaacctaaggatattgagcttcaaatcagagagctcattcttcggttcatcagtaatcctaattccattatcctcgctgtcactgctgctaatacagatatggcaacatcagaggcacttaaaatttcaagagaggtagatccagatggtcgcagaaccctagctgtaatcactaaacttgatctcatggatgcgggtactgatgccatggatgtattgatgggaagggttattccagtcaaacttggaataattggagtagttaacaggagccagctagatattaacaacaagaagagtgtaactgattcaatccgtgatgagtatgcttttcttcaaaagaaatatccatctctggccaatagaaatggaacaaagtatcttgctaggactctaaacaggttactgatgcatcacatcagagattgtttaccagagttgaaaacaagaataaatgttctagctgctcagtatcagtctcttctaaatagctacggtgaacccgtggatgataaaagtgctactttactccaacttattaccaaatttgccacagaatattgtaacactattgaaggaactgcaaaatatattgaaacttcggagctatgcggtggtgctagaatttgttatattttccatgagacttttgggcgaaccttagaatctgttgatccacttggtggccttaacactattgacattttgactgccattagaaatgctactggtcctcgtcctgctttatttgtgcctgaggtttcatttgagttactggtgaagcggcaaatcaaacgtctagaagagcccagcctccgctgtgtggaactggttcatgaggaaatgcaaaggatcattcagcactgtagcaattacagtacacaggaattgttacgatttcctaaacttcatgatgccatagttgaagtggtgacttgtcttcttcgtaaaaggttgcctgttacaaatgaaatggtccataacttagtggcaattgaactggcttatatcaacacaaaacatccagactttgctgatgcttgtgggctaatgaacaataatatagaggaacaaaggagaaacaggctagccagagaattaccttcagctgtatcacgagacaagtcttctaaagttccaagtgctttggcacctgcctcccaggagccctcccccgctgcttctgctgaggctgatggcaagttaattcaggacagcagaagagaaactaaaaatgttgcatctggaggtggtggggttggagatggtgttcaagaaccaaccacaggcaactggagaggaatgctgaaaacttcaaaagctgaagagttattagcagaagaaaaatcaaaacccattccaattatgccagccagtccacaaaaaggtcatgccgtgaacctgctagatgtgccagttcctgttgcacgaaaactatctgctcgggaacagcgagattgtgaggttattgaacgactcattaaatcatattttctcattgtcagaaagaatattcaagacagtgtgccaaaggcagtaatgcattttttggttaatcatgtgaaagacactcttcagagtgagctagtaggccagctgtataaatcatccttattggatgatcttctgacagaatctgaggacatggcacagcgcaggaaagaagcagctgatatgctaaaggcattacaaggagccagtcaaattattgctgaaatccgggagactcatctttggtgaagagaactatgtaatactgagactttgttgactcaaaacttgctagttactgcctacctgagtagaatcttatttatgaactcctgtgtattgcaatggtatgaatctgctcatgtggagactggctataaactgaaaagtgtattccaaattgcagaacacatcacacatttaatccaaataataaatggctgtttctaaagtttcccagtatatataaaatacatcaagtctgtcttgtgacagtttcatctgaacttaacttaaaaacaactgttaatgttctagttgtgcaaagcagtttgcctgtggataagatgacctgtgtaataatctttgttagtagtcttaaagctgctgccatagtcctccaagaagaaagcaccaagacaacatttcatatgactataatgcatgtactatataagctgatctggctttgaaagatgtgagtgtggacagaccttcagtcacaagtcatcccttgtatccccatcatagacttccatcgtggacgagtaatcttaccaatc

SEQ ID NO: 370779 - DNA, 4682 bp, Homo sapiens
agcgggcatggcctgccgggagggggcaggtagccggcgggcccggtccaatgggtgccggcttccgaggagagggcggaggagaggaggaaggaggcgaactgtgggccccggccccattcattgccgtggccggcgggcactggggccccgtgttttcagagtcatggaggcgctaattcctgtcataaacaagctccaggacgtcttcaacacggtgggcgccgacatcatccagctgcctcaaatcgtcgtagtgggaacgcagagcagcggaaagagctcagtgctagaaagcctggtggggagggacctgcttcccagaggtactggaattgtcacccggagacctctcattctgcaactggtccatgtttcacaagaagataaacggaaaacaacaggagaagaaaatggggtggaagcagaagaatggggtaaatttcttcacaccaaaaataagctttacacggattttgatgaaattcgacaagaaattgaaaatgaaacagaaagaatttcaggaaataataagggagtaagccctgaaccaattcatcttaagattttttcacccaacgttgtcaatttgacacttgtggatttgccaggaatgaccaaggtgcctgtaggtgatcaacctaaggatattgagcttcaaatcagagagctcattcttcggttcatcagtaatcctaattccattatcctcgctgtcactgctgctaatacagatatggcaacatcagaggcacttaaaatttcaagagaggtagatccagatggtcgcagaaccctagctgtaatcactaaacttgatctcatggatgcgggtactgatgccatggatgtattgatgggaagggttattccagtcaaacttggaataattggagtagttaacaggagccagctagatattaacaacaagaagagtgtaactgattcaatccgtgatgagtatgcttttcttcaaaagaaatatccatctctggccaatagaaatggaacaaagtatcttgctaggactctaaacaggttactgatgcatcacatcagagattgtttaccagagttgaaaacaagaataaatgttctagctgctcagtatcagtctcttctaaatagctacggtgaacccgtggatgataaaagtgctactttactccaacttattaccaaatttgccacagaatattgtaacactattgaaggaactgcaaaatatattgaaacttcggagctatgcggtggtgctagaatttgttatattttccatgagacttttgggcgaaccttagaatctgttgatccacttggtggccttaacactattgacattttgactgccattagaaatgctactggtcctcgtcctgctttatttgtgcctgaggtttcatttgagttactggtgaagcggcaaatcaaacgtctagaagagcccagcctccgctgtgtggaactggttcatgaggaaatgcaaaggatcattcagcactgtagcaattacagtacacaggaattgttacgatttcctaaacttcatgatgccatagttgaagtggtgacttgtcttcttcgtaaaaggttgcctgttacaaatgaaatggtccataacttagtggcaattgaactggcttatatcaacacaaaacatccagactttgctgatgcttgtgggctaatgaacaataatatagaggaacaaaggagaaacaggctagccagagaattaccttcagctgtatcacgagacaagtcttctaaagttccaagtgctttggcacctgcctcccaggagccctcccccgctgcttctgctgaggctgatggcaagttaattcaggacagcagaagagaaactaaaaatgttgcatctggaggtggtggggttggagatggtgttcaagaaccaaccacaggcaactggagaggaatgctgaaaacttcaaaagctgaagagttattagcagaagaaaaatcaaaacccattccaattatgccagccagtccacaaaaaggtcatgccgtgaacctgctagatgtggtaagccatgacaatttggtttaggtaataaggtaggtgaccaagttagtaggaaaacgattagacagaaagaactaaaagtctcaaaaacttacataactttcagatgttaaagctgccattttagtgtcacaaaagtaatattttttccccctcatccctatttagccagttcctgttgcacgaaaactatctgctcgggaacagcgagattgtgaggttattgaacgactcattaaatcatattttctcattgtcagaaagaatattcaagacagtgtgccaaaggcagtaatgcattttttggttaatcatgtgaaagacactcttcagagtgagctagtaggccagctgtataaatcatccttattggatgatcttctgacagaatctgaggacatggcacagcgcaggaaagaagcagctgatatgctaaaggcattacaaggagccagtcaaattattgctgaaatccgggagactcatctttggtgaagagaactatgtaatactgagactttgttgactcaaaacttgctagttactgcctacctgagtagaatcttatttatgaactcctgtgtattgcaatggtatgaatctgctcatgtggagactggctataaactgaaaagtgtattccaaattgcagaacacatcacacatttaatccaaataataaatggctgtttctaaagtttcccagtatatataaaatacatcaagtctgtcttgtgacagtttcatctgaacttaacttaaaaacaactgttaatgttctagttgtgcaaagcagtttgcctgtggataagatgacctgtgtaataatctttgttagtagtcttaaagctgctgccatagtcctccaagaagaaagcaccaagacaacatttcatatgactataatgcatgtactatataagctgatctggctttgaaagatgtgagttggcaagttcctcacatagagtcattgtattccacctgtccttcaatttagttttttctgagcttctttgcagcctttgatgtgtttttaagaaagctgaatgcacaagaggatctgtgacactgacatggctgtggtgtgcatactgtgtagttacatagcccttccaattctgggtccatttgcactagcaaattaaaatatgctttgattcatacttaaacctgaaagcaggaatgcctacattaattcctacattaaaaacagccatctacccttgattatctagaaagacttggtaatgatggtcagttccttttagatttcagaaaatcaaatgatgacctaaatttcccttaatttgcaaatacagtagtaattaaggtacatctctaaagtggagcacttacaccaggctctaagattcactttgaggtggaacttaaaaccagtgtactgtatgtatgcattggtaatagctacttttgcttcatagcttcataccaacaaaatatatttattagaatagtatgaaagtactggaggagctgaaagaaaaacacccaaggctgggcgtggtggcacacgcctgtaatcccagcactttgggaggccgaggcaggtggatcacctgaggttgggagttggagaccagcttgaccaacatggagaaaccccgtctctactaaaaatacaaaattggccgggcgtggtggcgcatgcctgtaatcccagctactcgggagggtgaggcaggagaattgcttgaccctgggaggtggaggttgtggtgagctaagatcgtgccattgcactccagccttggcaacaagagcgaaactccgtctcaaaaaaaaaaaataaaacaacacccagatagatacacatactccttcagacttacagacctaagctgcatttatggggtagtgatgaggtttagaacatatacatattttgttaaaattccccagatgattcttggtatgaacgactatattataaattttaagatgtacttagaaatccttaagacatctagccccgtctctaatagacaacacatttatattgcagatattacttttttttcagtttatgaccaggtatttatgaaggactattggcagggaaaatatgaatatgttaactttagcttatggcatcaatttactaaggaacaacaggctcaccaactgatgtcaaacataaaaacccccacatcagtctgatacgatatggtactactttgaatctgttactagtaccatcttgacagaggatacatgctcccaaaacgtttgttaccacacttaaaaatcactgccatcattaagcatcagtttcaaaattatagccattcatgatttactttttccagatgactatcattattctagtcctttgaatttgtaaggggaaaaaaaacaaaaacaaaaacttacgatgcacttttctccagcacatcagatttcaaattgaaaattaaagacatgctatggtaatgcacttgctagtactacacactttgtacaacaaaaaacagaggcaagaaacaacggaaagagaaaagccttcctttgttggcccttaaactgagtcaagatctgaaatgtagagatgatctctgacgatacctgtatgttcttattgtgtaaataaaattgctggtatgaaatgaca

SEQ ID NO: 370780 - DNA, 4574 bp, Homo sapiens
agcgggcatggcctgccgggagggggcaggtagccggcgggcccggtccaatgggtgccggcttccgaggagagggcggaggagaggaggaaggaggcgaactgtgggccccggccccattcattgccgtggccggcgggcactggggccccgtgttttcagagtcatggaggcgctaattcctgtcataaacaagctccaggacgtcttcaacacggtgggcgccgacatcatccagctgcctcaaatcgtcgtagtgggaacgcagagcagcggaaagagctcagtgctagaaagcctggtggggagggacctgcttcccagaggtactggaattgtcacccggagacctctcattctgcaactggtccatgtttcacaagaagataaacggaaaacaacaggagaagaaaatggggtggaagcagaagaatggggtaaatttcttcacaccaaaaataagctttacacggattttgatgaaattcgacaagaaattgaaaatgaaacagaaagaatttcaggaaataataagggagtaagccctgaaccaattcatcttaagattttttcacccaacgttgtcaatttgacacttgtggatttgccaggaatgaccaaggataccacactctacaggtttatctccagtctcactggccactccttttcagtctcttttgctgtttcttctcatctccccaatgtctaaacagtgcctgtaggtgatcaacctaaggatattgagcttcaaatcagagagctcattcttcggttcatcagtaatcctaattccattatcctcgctgtcactgctgctaatacagatatggcaacatcagaggcacttaaaatttcaagagaggtagatccagatggtcgcagaaccctagctgtaatcactaaacttgatctcatggatgcgggtactgatgccatggatgtattgatgggaagggttattccagtcaaacttggaataattggagtagttaacaggagccagctagatattaacaacaagaagagtgtaactgattcaatccgtgatgagtatgcttttcttcaaaagaaatatccatctctggccaatagaaatggaacaaagtatcttgctaggactctaaacaggttactgatgcatcacatcagagattgtttaccagagttgaaaacaagaataaatgttctagctgctcagtatcagtctcttctaaatagctacggtgaacccgtggatgataaaagtgctactttactccaacttattaccaaatttgccacagaatattgtaacactattgaaggaactgcaaaatatattgaaacttcggagctatgcggtggtgctagaatttgttatattttccatgagacttttgggcgaaccttagaatctgttgatccacttggtggccttaacactattgacattttgactgccattagaaatgctactggtcctcgtcctgctttatttgtgcctgaggtttcatttgagttactggtgaagcggcaaatcaaacgtctagaagagcccagcctccgctgtgtggaactggttcatgaggaaatgcaaaggatcattcagcactgtagcaattacagtacacaggaattgttacgatttcctaaacttcatgatgccatagttgaagtggtgacttgtcttcttcgtaaaaggttgcctgttacaaatgaaatggtccataacttagtggcaattgaactggcttatatcaacacaaaacatccagactttgctgatgcttgtgggctaatgaacaataatatagaggaacaaaggagaaacaggctagccagagaattaccttcagctgtatcacgagacaagtcttctaaagttccaagtgctttggcacctgcctcccaggagccctcccccgctgcttctgctgaggctgatggcaaggttgcatctggaggtggtggggttggagatggtgttcaagaaccaaccacaggcaactggagaggaatgctgaaaacttcaaaagctgaagagttattagcagaagaaaaatcaaaacccattccaattatgccagccagtccacaaaaaggtcatgccgtgaacctgctagatgtgccagttcctgttgcacgaaaactatctgctcgggaacagcgagattgtgaggttattgaacgactcattaaatcatattttctcattgtcagaaagaatattcaagacagtgtgccaaaggcagtaatgcattttttggttaatcatgtgaaagacactcttcagagtgagctagtaggccagctgtataaatcatccttattggatgatcttctgacagaatctgaggacatggcacagcgcaggaaagaagcagctgatatgctaaaggcattacaaggagccagtcaaattattgctgaaatccgggagactcatctttggtgaagagaactatgtaatactgagactttgttgactcaaaacttgctagttactgcctacctgagtagaatcttatttatgaactcctgtgtattgcaatggtatgaatctgctcatgtggagactggctataaactgaaaagtgtattccaaattgcagaacacatcacacatttaatccaaataataaatggctgtttctaaagtttcccagtatatataaaatacatcaagtctgtcttgtgacagtttcatctgaacttaacttaaaaacaactgttaatgttctagttgtgcaaagcagtttgcctgtggataagatgacctgtgtaataatctttgttagtagtcttaaagctgctgccatagtcctccaagaagaaagcaccaagacaacatttcatatgactataatgcatgtactatataagctgatctggctttgaaagatgtgagttggcaagttcctcacatagagtcattgtattccacctgtccttcaatttagttttttctgagcttctttgcagcctttgatgtgtttttaagaaagctgaatgcacaagaggatctgtgacactgacatggctgtggtgtgcatactgtgtagttacatagcccttccaattctgggtccatttgcactagcaaattaaaatatgctttgattcatacttaaacctgaaagcaggaatgcctacattaattcctacattaaaaacagccatctacccttgattatctagaaagacttggtaatgatggtcagttccttttagatttcagaaaatcaaatgatgacctaaatttcccttaatttgcaaatacagtagtaattaaggtacatctctaaagtggagcacttacaccaggctctaagattcactttgaggtggaacttaaaaccagtgtactgtatgtatgcattggtaatagctacttttgcttcatagcttcataccaacaaaatatatttattagaatagtatgaaagtactggaggagctgaaagaaaaacacccaaggctgggcgtggtggcacacgcctgtaatcccagcactttgggaggccgaggcaggtggatcacctgaggttgggagttggagaccagcttgaccaacatggagaaaccccgtctctactaaaaatacaaaattggccgggcgtggtggcgcatgcctgtaatcccagctactcgggagggtgaggcaggagaattgcttgaccctgggaggtggaggttgtggtgagctaagatcgtgccattgcactccagccttggcaacaagagcgaaactccgtctcaaaaaaaaaaaataaaacaacacccagatagatacacatactccttcagacttacagacctaagctgcatttatggggtagtgatgaggtttagaacatatacatattttgttaaaattccccagatgattcttggtatgaacgactatattataaattttaagatgtacttagaaatccttaagacatctagccccgtctctaatagacaacacatttatattgcagatattacttttttttcagtttatgaccaggtatttatgaaggactattggcagggaaaatatgaatatgttaactttagcttatggcatcaatttactaaggaacaacaggctcaccaactgatgtcaaacataaaaacccccacatcagtctgatacgatatggtactactttgaatctgttactagtaccatcttgacagaggatacatgctcccaaaacgtttgttaccacacttaaaaatcactgccatcattaagcatcagtttcaaaattatagccattcatgatttactttttccagatgactatcattattctagtcctttgaatttgtaaggggaaaaaaaacaaaaacaaaaacttacgatgcacttttctccagcacatcagatttcaaattgaaaattaaagacatgctatggtaatgcacttgctagtactacacactttgtacaacaaaaaacagaggcaagaaacaacggaaagagaaaagccttcctttgttggcccttaaactgagtcaagatctgaaatgtagagatgatctctgacgatacctgtatgttcttattgtgtaaataaaattgctggtatgaaatgaca

SEQ ID NO: 370781 - DNA, 4348 bp, Homo sapiens
agcgggcatggcctgccgggagggggcaggtagccggcgggcccggtccaatgggtgccggcttccgaggagagggcggaggagaggaggaaggaggcgaactgtgggccccggccccattcattgccgtggccggcgggcactggggccccgtgttttcagagtcatggaggcgctaattcctgtcataaacaagctccaggacgtcttcaacacggtgggcgccgacatcatccagctgcctcaaatcgtcgtagtgggaacgcagagcagcggaaagagctcagtgctagaaagcctggtggggagggacctgcttcccagaggtactggaattgtcacccggagacctctcattctgcaactggtccatgtttcacaagaagataaacggaaaacaacaggagaagaaaatggggtggaagcagaagaatggggtaaatttcttcacaccaaaaataagctttacacggattttgatgaaattcgacaagaaattgaaaatgaaacagaaagaatttcaggaaataataagggagtaagccctgaaccaattcatcttaagattttttcacccaacgttgtcaatttgacacttgtggatttgccaggaatgaccaaggtgcctgtaggtgatcaacctaaggatattgagcttcaaatcagagagctcattcttcggttcatcagtaatcctaattccattatcctcgctgtcactgctgctaatacagatatggcaacatcagaggcacttaaaatttcaagagaggtagatccagatggtcgcagaaccctagctgtaatcactaaacttgatctcatggatgcgggtactgatgccatggatgtattgatgggaagggttattccagtcaaacttggaataattggagtagttaacaggagccagctagatattaacaacaagaagagtgtaactgattcaatccgtgatgagtatgcttttcttcaaaagaaatatccatctctggccaatagaaatggaacaaagtatcttgctaggactctaaacaggttactgatgcatcacatcagagattgtttaccagagttgaaaacaagaataaatgttctagctgctcagtatcagtctcttctaaatagctacggtgaacccgtggatgataaaagtgctactttactccaacttattaccaaatttgccacagaatattgtaacactattgaaggaactgcaaaatatattgaaacttcggagctatgcggtggtgctagaatttgttatattttccatgagacttttgggcgaaccttagaatctgttgatccacttggtggccttaacactattgacattttgactgccattagaaatgctactggtcctcgtcctgctttatttgtgcctgaggtttcatttgagttactggtgaagcggcaaatcaaacgtctagaagagcccagcctccgctgtgtggaactggttcatgaggaaatgcaaaggatcattcagcactgtagcaattacagtacacaggaattgttacgatttcctaaacttcatgatgccatagttgaagtggtgacttgtcttcttcgtaaaaggttgcctgttacaaatgaaatggtccataacttagtggcaattgaactggcttatatcaacacaaaacatccagactttgctgatgcttgtgggctaatgaacaataatatagaggaacaaaggagaaacaggctagccagagaattaccttcagctgtatcacgagacaaggttgcatctggaggtggtggggttggagatggtgttcaagaaccaaccacaggcaactggagaggaatgctgaaaacttcaaaagctgaagagttattagcagattccaattatgccagccagtccacaaaaaggtcatgccgtgaacctgctagatgtgccagttcctgttgcacgaaaactatctattgtgaggttattgaacgactcattaaatcatattttctcattgtcagaaagaatattcaagacagtgtgccaaaggcagtaatgcattttttggttaatcatgtgaaagacactcttcagagtgagctagtaggccagctgtataaatcatccttattggatgatcttctgacagaatctgaggacatggcacagcgcaggaaagaagcagctgatatgctaaaggcattacaaggagccagtcaaattattgctgaaatccgggagactcatctttggtgaagagaactatgtaatactgagactttgttgactacctgagtagaatcttatttatgaactcctgtgtattgcaatggtatgaatctgctcatgtggagactggctataaactgaaaagtgtattccaaattgcagaacacatcacacatttaatccaaataataaatggctgtttctaaagtttcccagtatatataaaatacatcaagtctgtcttgtgacagtttcatctgaacttaacttaaaaacaactgttaatgttctagttgtgcaaagcagtttgcctgtggataagatgacctgtgtaataatctttgttagtagtcttaaagctgctgccatagtcctccaagaagaaagcaccaagacaacatttcatatgactataatgcatgtactatataagctgatctggctttgaaagatgtgagttggcaagttcctcacatagagtcattgtattccacctgtccttcaatttagttttttctgagcttctttgcagcctttgatgtgtttttaagaaagctgaatgcacaagaggatctgtgacactgacatggctgtggtgtgcatactgtgtagttacatagcccttccaattctgggtccatttgcactagcaaattaaaatatgctttgattcatacttaaacctgaaagcaggaatgcctacattaattcctacattaaaaacagccatctacccttgattatctagaaagacttggtaatgatggtcagttccttttagatttcagaaaatcaaatgatgacctaaatttcccttaatttgcaaatacagtagtaattaaggtacatctctaaagtggagcacttacaccaggctctaagattcactttgaggtggaacttaaaaccagtgtactgtatgtatgcattggtaatagctacttttgcttcatagcttcataccaacaaaatatatttattagaatagtatgaaagtactggaggagctgaaagaaaaacacccaaggctgggcgtggtggcacacgcctgtaatcccagcactttgggaggccgaggcaggtggatcacctgaggttgggagttggagaccagcttgaccaacatggagaaaccccgtctctactaaaaatacaaaattggccgggcgtggtggcgcatgcctgtaatcccagctactcgggagggtgaggcaggagaattgcttgaccctgggaggtggaggttgtggtgagctaagatcgtgccattgcactccagccttggcaacaagagcgaaactccgtctcaaaaaaaaaaaataaaacaacacccagatagatacacatactccttcagacttacagacctaagctgcatttatggggtagtgatgaggtttagaacatatacatattttgttaaaattccccagatgattcttggtatgaacgactatattataaattttaagatgtacttagaaatccttaagacatctagccccgtctctaatagacaacacatttatattgcagatattacttttttttcagtttatgaccaggtatttatgaaggactattggcagggaaaatatgaatatgttaactttagcttatggcatcaatttactaaggaacaacaggctcaccaactgatgtcaaacataaaaacccccacatcagtctgatacgatatggtactactttgaatctgttactagtaccatcttgacagaggatacatgctcccaaaacgtttgttaccacacttaaaaatcactgccatcattaagcatcagtttcaaaattatagccattcatgatttactttttccagatgactatcattattctagtcctttgaatttgtaaggggaaaaaaaacaaaaacaaaaacttacgatgcacttttctccagcacatcagatttcaaattgaaaattaaagacatgctatggtaatgcacttgctagtactacacactttgtacaacaaaaaacagaggcaagaaacaacggaaagagaaaagccttcctttgttggcccttaaactgagtcaagatctgaaatgtagagatgatctctgacgatacctgtatgttcttattgtgtaaataaaattgctggtatgaaatgaca

SEQ ID NO: 370782 - DNA, 3048 bp, Homo sapiens
agcgggcatggcctgccgggagggggcaggtagccggcgggcccggtccaatgggtgccggcttccgaggagagggcggaggagaggaggaaggaggcgaactgtgggccccggccccattcattgccgtggccggcgggcactggggccccgtgttttcagagtcatggaggcgctaattcctgtcataaacaagctccaggacgtcttcaacacggtgggcgccgacatcatccagctgcctcaaatcgtcgtagtgggaacgcagagcagcggaaagagctcagtgctagaaagcctggtggggagggacctgcttcccagaggtactggaattgtcacccggagacctctcattctgcaactggtccatgtttcacaagaagataaacggaaaacaacaggagaagaaaatggggtggaagcagaagaatggggtaaatttcttcacaccaaaaataagctttacacggattttgatgaaattcgacaagaaattgaaaatgaaacagaaagaatttcaggaaataataagggagtaagccctgaaccaattcatcttaagattttttcacccaacgttgtcaatttgacacttgtggatttgccaggaatgaccaaggtgcctgtaggtgatcaacctaaggatattgagcttcaaatcagagagctcattcttcggttcatcagtaatcctaattccattatcctcgctgtcactgctgctaatacagatatggcaacatcagaggcacttaaaatttcaagagaggtagatccagatggtcgcagaaccctagctgtaatcactaaacttgatctcatggatgcgggtactgatgccatggatgtattgatgggaagggttattccagtcaaacttggaataattggagtagttaacaggagccagctagatattaacaacaagaagagtgtaactgattcaatccgtgatgagtatgcttttcttcaaaagaaatatccatctctggccaatagaaatggaacaaagtatcttgctaggactctaaacaggttactgatgcatcacatcagagattgtttaccagagttgaaaacaagaataaatgttctagctgctcagtatcagtctcttctaaatagctacggtgaacccgtggatgataaaagtgctactttactccaacttattaccaaatttgccacagaatattgtaacactattgaaggaactgcaaaatatattgaaacttcggagctatgcggtggtgctagaatttgttatattttccatgagacttttgggcgaaccttagaatctgttgatccacttggtggccttaacactattgacattttgactgccattagaaatgctactggtcctcgtcctgctttatttgtgcctgaggtttcatttgagttactggtgaagcggcaaatcaaacgtctagaagagcccagcctccgctgtgtggaactggttcatgaggaaatgcaaaggatcattcagcactgtagcaattacagtacacaggaattgttacgatttcctaaacttcatgatgccatagttgaagtggtgacttgtcttcttcgtaaaaggttgcctgttacaaatgaaatggtccataacttagtggcaattgaactggcttatatcaacacaaaacatccagactttgctgatgcttgtgggctaatgaacaataatatagaggaacaaaggagaaacaggctagccagagaattaccttcagctgtatcacgagacaaggtaaaaaaatgtttttaatgcatattcccaatacctaaagatagattgatgagctcagaatattactcagtcctaggagtaattttttcttcttttcctccctttaacactccattggaactaactgagtaaaggcatacaagtttaaaatgggttttgagtgatttaaagataatagtattttgaattcactgacataaatgcttaaaagtagatttaagcatttatttaagcatttaagcatcaagctttttaaaaaaattcagtcagtgactttatcaactttgcacatagctgaaatgactcaagattttattataataagagggtttcttggaaaaaacagtatgcacagaacagaggttttaattactagtaataattaaaatagttgtaatactaaagtgtgtataaaaatcttttaccttgaattctttgccagaaaagaatcttattaaataccaaaaataaaaatgaagcttttggatttggatttttcttatgtattcatctgaaggaaacttttaacaaaggtgacaatggtgaaggaaataaggcagaataaacaatctcccatgattattttcatttttcatgttattttacgatttcattacagaagggaaaaattcatttatagaatgttcctgaatgcatttttgcatccttgattttttttcccccctggattttttgcctttagtcttctaaagttccaagtgctttggcacctgcctcccaggagccctcccccgctgcttctgctgaggctgatggcaaggtctgttctgattcttaatctaagcctgcatgccttgttctctggtacaacataatcttctggaaacaatacactgaatagaagaatattaatatgggatactgtgctaaggtcagatcactttagtctaatatatattttaaaattatataacaatgcaatgcatagtttatattgttgacatgcttttgcttgcaatatagaagatgcacacagaaaaagtaatttaaagaggaaattatcctgcactttttgaatttcaacccattggtatttaaattttgcttgttaaattgcatgttttaacatatcttttaacagttaattcaggacagcagaagagaaactaaaaatgtgagtctcttgcttcagaatggaaatgttggtacctttggttctcactgaaacactgtctataccaccattaaagaacctgcttgtgtagtggtatctatctcttgtctgtgtatgttcttaatgttccttttatctaacctgtggaaga

SEQ ID NO: 370783 - DNA, 1050 bp, Homo sapiens
  misc_feature (12)..(12): n is a, c, g, or t
  misc_feature (24)..(24): n is a, c, g, or t
  misc_feature (44)..(44): n is a, c, g, or t
aaaggcctatantttgaaaactgngccttaatgatggcagtgantttttaagtgtggtaacaaacgttttgggagcatgtaccctctgtcaagatggtactagtaacagattcaaagtagtacccatatcgtatcagactgggaggtggaggttgtggtgagctaagatcgtgccattgcactccagccttggcaacaagagcgaaactccgtctcaaaaaaaaaaaataaaacaacacccagatagatacacatactccttcagacttacagacctaagctgcatttatggggtagtgatgaggtttagaacatatacatattttgttaaaattccccagatgattcttggtatgaacgactatattataaattttaagatgtacttagaaatccttaagacatctagccccgtctctaatagacaacacatttatattgcagatattacttttttttcagtttatgaccaggtatttatgaaggactattggcagggaaaatatgaatatgttaactttagcttatggcatcaatttactaaggaacaacaggctcaccaactgatgtcaaacataaaaacccccacatcagtctgatacgatatggtactactttgaatctgttactagtaccatcttgacagaggatacatgctcccaaaacgtttgttaccacacttaaaaatcactgccatcattaagcatcagtttcaaaattatagccattcatgatttactttttccagatgactatcattattctagtcctttgaatttgtaaggggaaaaaaaacaaaaacaaaaacttacgatgcacttttctccagcacatcagatttcaaattgaaaattaaagacatgctatggtaatgcacttgctagtactacacactttgtacaacaaaaaacagaggcaagaaacaacggaaagagaaaagccttcctttgttggcccttaaactgagtcaagatctgaaatgtagagatgatctctgacgatacctgtatgttcttattgtgtaaataaaattgctggtatgaaatgaca

SEQ ID NO: 370784 - DNA, 630 bp, Homo sapiens
  misc_feature (23)..(23): n is a, c, g, or t
aaacctcatcacctaccccccanaaagccagccttaggtctgtaaagtctgaaggagtatgtgtatcctatctgggtgttgttttaatttttttttttgagacggagtttcgctcttgttgccaaggctggagtgcaatggcacgatctcagctcaccacaacccccacatcagtctgatacgatatggtactactttgaatctgttactagtaccatcttgacagaggatacatgctcccaaaacgtttgttaccacacttaaaaatcactgccatcattaagcatcagtttcaaaattatagccattcatgatttactttttccagatgactatcattattctagtcctttgaatttgtaaggggaaaaaaaacaaaaacaaaaacttacgatgcacttttctccagcacatcagatttcaaattgaaaattaaagacatgctatggtaatgcacttgctagtactacacactttgtacaacaaaaaacagaggcaagaaacaacggaaagagaaaagccttcctttgttggcccttaaactgagtcaagatctgaaatgtagagatgatctctgacgatacctgtatgttcttattgtgtaaataaaattgctggtatgaaatgaca

SEQ ID NO: 370785 - DNA, 302 bp, Homo sapiens
tttcctttaaaataattctgtatgctggtttgttaatatagtttattgaattaacaaaaaatgtgttaagaaactcattttgctcttgtatatattctgttttcagagcagcggaaagagctcagtgctagaaagcctggtggggagggacctgcttcccagaggtactggaattgtcacccggagacctctcattctgcaactggtccatgtttcacaagaagataaacggaaaacaacaggagaagaaaatggtaaatttcagatttgagataattattttacagctcttcatttttgat

SEQ ID NO: 370786 - DNA, 480 bp, Homo sapiens
atataataagagttctaagttttattttctcagggtcctcgtcctgctttatttgtgcctgaggtttcatttgagttactggtgaagcggcaaatcaaacgtctagaagagcccagcctccgctgtgtggaactggttcatgaggaaatgcaaaggatcattcagcactgtagcaattacagtacacaggtaacggagagaaatgtaacaggtttcacatgaactagaaaaggacatgaagtggtggtttcactgggtggaaggaaatgtataagatgggatacaaggtaaaatctgtagttcccttacctgaaagtgatttgaaataggattcttaaatgtagtctccaaattgaattcagtatttctgtgatcattaagtaaaagaaaatgactgttagcctggcatggtggcttctacatgtagtctcagctacttgggaggctaaggtgggaggatggcttagtgagactatgact

SEQ ID NO: 370787 - DNA, 3450 bp, Homo sapiens
agcgggcatggcctgccgggagggggcaggtagccggcgggcccggtccaatgggtgccggcttccgaggagagggcggaggagaggaggaaggaggcgaactgtgggccccggccccattcattgccgtggccggcgggcactggggccccgtgttttcagagtcatggaggcgctaattcctgtcataaacaagctccaggacgtcttcaacacggtgggcgccgacatcatccagctgcctcaaatcgtcgtagtgggaacgcagagcagcggaaagagctcagtgctagaaagcctggtggggagggacctgcttcccagaggtactggaattgtcacccggagacctctcattctgcaactggtccatgtttcacaagaagataaacggaaaacaacaggagaagaaaatggggtggaagcagaagaatggggtaaatttcttcacaccaaaaataagctttacacggattttgatgaaattcgacaagaaattgaaaatgaaacagaaagaatttcaggaaataataagggagtaagccctgaaccaattcatcttaagattttttcacccaacgttgtcaatttgacacttgtggatttgccaggaatgaccaaggtgcctgtaggtgatcaacctaaggatattgagcttcaaatcagagagctcattcttcggttcatcagtaatcctaattccattatcctcgctgtcactgctgctaatacagatatggcaacatcagaggcacttaaaatttcaagagaggtagatccagatggtcgcagaaccctagctgtaatcactaaacttgatctcatggatgcgggtactgatgccatggatgtattgatgggaagggttattccagtcaaacttggaataattggagtagttaacaggagccagctagatattaacaacaagaagagtgtaactgattcaatccgtgatgagtatgcttttcttcaaaagaaatatccatctctggccaatagaaatggaacaaagtatcttgctaggactctaaacaggttactgatgcatcacatcagagattgtttaccagagttgaaaacaagaataaatgttctagctgctcagtatcagtctcttctaaatagctacggtgaacccgtggatgataaaagtgctactttactccaacttattaccaaatttgccacagaatattgtaacactattgaaggaactgcaaaatatattgaaacttcggagctatgcggtggtgctagaatttgttatattttccatgagacttttgggcgaaccttagaatctgttgatccacttggtggccttaacactattgacattttgactgccattagaaatgctactggtcctcgtcctgctttatttgtgcctgaggtttcatttgagttactggtgaagcggcaaatcaaacgtctagaagagcccagcctccgctgtgtggaactggttcatgaggaaatgcaaaggatcattcagcactgtagcaattacagtacacaggaattgttacgatttcctaaacttcatgatgccatagttgaagtggtgacttgtcttcttcgtaaaaggttgcctgttacaaatgaaatggtccataacttagtggcaattgaactggcttatatcaacacaaaacatccagactttgctgatgcttgtgggctaatgaacaataatatagaggaacaaaggagaaacaggctagccagagaattaccttcagctgtatcacgagacaagtcttctaaagttccaagtgctttggcacctgcctcccaggagccctcccccgctgcttctgctgaggctgatggcaagttaattcaggacagcagaagagaaactaaaaatgttgcatctggaggtggtggggttggagatggtgttcaagaaccaaccacaggcaactggagaggaatgctgaaaacttcaaaagctgaagagttattagcagaagaaaaatcaaaacccattccaattatgccagccagtccacaaaaaggtcatgccgtgaacctgctagatgtgccagttcctgttgcacgaaaactatctgctcgggaacagcgagattgtgaggttattgaacgactcattaaatcatattttctcattgtcagaaagaatattcaagacagtgtgccaaaggcagtaatgcattttttggttaatcatgtgaaagacactcttcagagtgagctagtaggccagctgtataaatcatccttattggatgatcttctgacagaatctgaggacatggcacagcgcaggaaagaagcagctgatatgctaaaggcattacaaggagccagtcaaattattgctgaaatccgggagactcatctttggtgaagagaactatgtaatactgagactttgttgactcaaaacttgctagttactgcctacctgagtagaatcttatttatgaactcctgtgtattgcaatggtatgaatctgctcatgtggagactggctataaactgaaaagtgtattccaaattgcagaacacatcacacatttaatccaaataataaatggctgtttctaaagtttcccagtatatataaaatacatcaagtctgtcttgtgacagtttcatctgaacttaacttaaaaacaactgttaatgttctagttgtgcaaagcagtttgcctgtggataagatgacctgtgtaataatctttgttagtagtcttaaagctgctgccatagtcctccaagaagaaagcaccaagacaacatttcatatgactataatgcatgtactatataagctgatctggctttgaaagatgtgagttggcaagttcctcacatagagtcattgtattccacctgtccttcaatttagttttttctgagcttctttgcagcctttgatgtgtttttaagaaagctgaatgcacaagaggatctgtgacactgacatggctgtggtgtgcatactgtgtagttacatagcccttccaattctgggtccatttgcactagcaaattaaaatatgctttgattcatacttaaacctgaaagcaggaatgcctacattaattcctacattaaaaacagccatctacccttgattatctagaaagacttggtaatgatggtcagttccttttagatttcagaaaatcaaatgatgacctaaatttcccttaatttgcaaatacagtagtaattaaggtacatctctaaagtggagcacttacaccaggctctaagattcactttgaggtggaacttaaaaccagtgtactgtatgtatgcattggtaatagctacttttgcttcatagcttcataccaacaaaatatatttattagaatagtatgaaagtactggaggagctgaaagaccagtagacgctcctctactctttgagacatcactggcctataataaatgggttaatttatgt

SEQ ID NO: 370788 - DNA, 4564 bp, Homo sapiens
agcgggcatggcctgccgggagggggcaggtagccggcgggcccggtccaatgggtgccggcttccgaggagagggcggaggagaggaggaaggaggcgaactgtgggccccggccccattcattgccgtggccggcgggcactggggccccgtgttttcagagtcatggaggcgctaattcctgtcataaacaagctccaggacgtcttcaacacggtgggcgccgacatcatccagctgcctcaaatcgtcgtagtgggaacgcagagcagcggaaagagctcagtgctagaaagcctggtggggagggacctgcttcccagaggtactggaattgtcacccggagacctctcattctgcaactggtccatgtttcacaagaagataaacggaaaacaacaggagaagaaaatggggtggaagcagaagaatggggtaaatttcttcacaccaaaaataagctttacacggattttgatgaaattcgacaagaaattgaaaatgaaacagaaagaatttcaggaaataataagggagtaagccctgaaccaattcatcttaagattttttcacccaacgttgtcaatttgacacttgtggatttgccaggaatgaccaaggtgcctgtaggtgatcaacctaaggatattgagcttcaaatcagagagctcattcttcggttcatcagtaatcctaattccattatcctcgctgtcactgctgctaatacagatatggcaacatcagaggcacttaaaatttcaagagaggtagatccagatggtcgcagaaccctagctgtaatcactaaacttgatctcatggatgcgggtactgatgccatggatgtattgatgggaagggttattccagtcaaacttggaataattggagtagttaacaggagccagctagatattaacaacaagaagagtgtaactgattcaatccgtgatgagtatgcttttcttcaaaagaaatatccatctctggccaatagaaatggaacaaagtatcttgctaggactctaaacaggttactgatgcatcacatcagagattgtttaccagagttgaaaacaagaataaatgttctagctgctcagtatcagtctcttctaaatagctacggtgaacccgtggatgataaaagtgctactttactccaacttattaccaaatttgccacagaatattgtaacactattgaaggaactgcaaaatatattgaaacttcggagctatgcggtggtgctagaatttgttatattttccatgagacttttgggcgaaccttagaatctgttgatccacttggtggccttaacactattgacattttgactgccattagaaatgctactggtcctcgtcctgctttatttgtgcctgaggtttcatttgagttactggtgaagcggcaaatcaaacgtctagaagagcccagcctccgctgtgtggaactggttcatgaggaaatgcaaaggatcattcagcactgtagcaattacagtacacaggaattgttacgatttcctaaacttcatgatgccatagttgaagtggtgacttgtcttcttcgtaaaaggttgcctgttacaaatgaaatggtccataacttagtggcaattgaactggcttatatcaacacaaaacatccagactttgctgatgcttgtgggctaatgaacaataatatagaggaacaaaggagaaacaggctagccagagaattaccttcagctgtatcacgagacaagtcttctaaagttccaagtgctttggcacctgcctcccaggagccctcccccgctgcttctgctgaggctgatggcaagttaattcaggacagcagaagagaaactaaaaatgttgcatctggaggtggtggggttggagatggtgttcaagaaccaaccacaggcaactggagaggaatgctgaaaacttcaaaagctgaagagttattagcagaagaaaaatcaaaacccattccaattatgccagccagtccacaaaaaggtcatgccgtgaacctgctagatgtgccagttcctgttgcacgaaaactatctgctcgggaacagcgagattgtgaggttattgaacgactcattaaatcatattttctcattgtcagaaagaatattcaagacagtgtgccaaaggcagtaatgcattttttggttaatcatgtgaaagacactcttcagagtgagctagtaggccagctgtataaatcatccttattggatgatcttctgacagaatctgaggacatggcacagcgcaggaaagaagcagctgatatgctaaaggcattacaaggagccagtcaaattattgctgaaatccgggagactcatctttggtgaagagaactatgtaatactgagactttgttgactcaaaacttgctagttactgcctacctgagtagaatcttatttatgaactcctgtgtattgcaatggtatgaatctgctcatgtggagactggctataaactgaaaagtgtattccaaattgcagaacacatcacacatttaatccaaataataaatggctgtttctaaagtttcccagtatatataaaatacatcaagtctgtcttgtgacagtttcatctgaacttaacttaaaaacaactgttaatgttctagttgtgcaaagcagtttgcctgtggataagatgacctgtgtaataatctttgttagtagtcttaaagctgctgccatagtcctccaagaagaaagcaccaagacaacatttcatatgactataatgcatgtactatataagctgatctggctttgaaagatgtgagttggcaagttcctcacatagagtcattgtattccacctgtccttcaatttagttttttctgagcttctttgcagcctttgatgtgtttttaagaaagctgaatgcacaagaggatctgtgacactgacatggctgtggtgtgcatactgtgtagttacatagcccttccaattctgggtccatttgcactagcaaattaaaatatgctttgattcatacttaaacctgaaagcaggaatgcctacattaattcctacattaaaaacagccatctacccttgattatctagaaagacttggtaatgatggtcagttccttttagatttcagaaaatcaaatgatgacctaaatttcccttaatttgcaaatacagtagtaattaaggtacatctctaaagtggagcacttacaccaggctctaagattcactttgaggtggaacttaaaaccagtgtactgtatgtatgcattggtaatagctacttttgcttcatagcttcataccaacaaaatatatttattagaatagtatgaaagtactggaggagctgaaagaaaaacacccaaggctgggcgtggtggcacacgcctgtaatcccagcactttgggaggccgaggcaggtggatcacctgaggttgggagttggagaccagcttgaccaacatggagaaaccccgtctctactaaaaatacaaaattggccgggcgtggtggcgcatgcctgtaatcccagctactcgggagggtgaggcaggagaattgcttgaccctgggaggtggaggttgtggtgagctaagatcgtgccattgcactccagccttggcaacaagagcgaaactccgtctcaaaaaaaaaaaataaaacaacacccagatagatacacatactccttcagacttacagacctaagctgcatttatggggtagtgatgaggtttagaacatatacatattttgttaaaattccccagatgattcttggtatgaacgactatattataaattttaagatgtacttagaaatccttaagacatctagccccgtctctaatagacaacacatttatattgcagatattacttttttttcagtttatgaccaggtatttatgaaggactattggcagggaaaatatgaatatgttaactttagcttatggcatcaatttactaaggaacaacaggctcaccaactgatgtcaaacataaaaacccccacatcagtctgatacgatatggtactactttgaatctgttactagtaccatcttgacagaggatacatgctcccaaaacgtttgttaccacacttaaaaatcactgccatcattaagcatcagtttcaaaattatagccattcatgatttactttttccagatgactatcattattctagtcctttgaatttgtaaggggaaaaaaaacaaaaacaaaaacttacgatgcacttttctccagcacatcagatttcaaattgaaaattaaagacatgctatggtaatgcacttgctagtactacacactttgtacaacaaaaaacagaggcaagaaacaacggaaagagaaaagccttcctttgttggcccttaaactgagtcaagatctgaaatgtagagatgatctctgacgatacctgtatgttcttattgtgtaaataaaattgctggtatgaaatgacaaaaaaaaggaagagtgggagggagaggggggggggaaaaaaaagtcgacg

SEQ ID NO: 370789 - DNA, 4403 bp, Homo sapiens
agcgggcatggcctgccgggagggggcaggtagccggcgggcccggtccaatgggtgccggcttccgaggagagggcggaggagaggaggaaggaggcgaactgtgggccccggccccattcattgccgtggccggcgggcactggggccccgtgttttcagagtcatggaggcgctaattcctgtcataaacaagctccaggacgtcttcaacacggtgggcgccgacatcatccagctgcctcaaatcgtcgtagtgggaacgcagagcagcggaaagagctcagtgctagaaagcctggtggggagggacctgcttcccagaggtactggaattgtcacccggagacctctcattctgcaactggtccatgtttcacaagaagataaacggaaaacaacaggagaagaaaatggggtggaagcagaagaatggggtaaatttcttcacaccaaaaataagctttacacggattttgatgaaattcgacaagaaattgaaaatgaaacagaaagaatttcaggaaataataagggagtaagccctgaaccaattcatcttaagattttttcacccaacgttgtcaatttgacacttgtggatttgccaggaatgaccaaggtgcctgtaggtgatcaacctaaggatattgagcttcaaatcagagagctcattcttcggttcatcagtaatcctaattccattatcctcgctgtcactgctgctaatacagatatggcaacatcagaggcacttaaaatttcaagagaggtagatccagatggtcgcagaaccctagctgtaatcactaaacttgatctcatggatgcgggtactgatgccatggatgtattgatgggaagggttattccagtcaaacttggaataattggagtagttaacaggagccagctagatattaacaacaagaagagtgtaactgattcaatccgtgatgagtatgcttttcttcaaaagaaatatccatctctggccaatagaaatggaacaaagtatcttgctaggactctaaacaggttactgatgcatcacatcagagattgtttaccagagttgaaaacaagaataaatgttctagctgctcagtatcagtctcttctaaatagctacggtgaacccgtggatgataaaagtgctactttactccaacttattaccaaatttgccacagaatattgtaacactattgaaggaactgcaaaatatattgaaacttcggagctatgcggtggtgctagaatttgttatattttccatgagacttttgggcgaaccttagaatctgttgatccacttggtggccttaacactattgacattttgactgccattagaaatgctactggtcctcgtcctgctttatttgtgcctgaggtttcatttgagttactggtgaagcggcaaatcaaacgtctagaagagcccagcctccgctgtgtggaactggttcatgaggaaatgcaaaggatcattcagcactgtagcaattacagtacacaggaattgttacgatttcctaaacttcatgatgccatagttgaagtggtgacttgtcttcttcgtaaaaggttgcctgttacaaatgaaatggtccataacttagtggcaattgaactggcttatatcaacacaaaacatccagactttgctgatgcttgtgggctaatgaacaataatatagaggaacaaaggagaaacaggctagccagagaattaccttcagctgtatcacgagacaaggttgcatctggaggtggtggggttggagatggtgttcaagaaccaaccacaggcaactggagaggaatgctgaaaacttcaaaagctgaagagttattagcagaagaaaaatcaaaacccattccaattatgccagccagtccacaaaaaggtcatgccgtgaacctgctagatgtgccagttcctgttgcacgaaaactatctgctcgggaacagcgagattgtgaggttattgaacgactcattaaatcatattttctcattgtcagaaagaatattcaagacagtgtgccaaaggcagtaatgcattttttggttaatcatgtgaaagacactcttcagagtgagctagtaggccagctgtataaatcatccttattggatgatcttctgacagaatctgaggacatggcacagcgcaggaaagaagcagctgatatgctaaaggcattacaaggagccagtcaaattattgctgaaatccgggagactcatctttggtgaagagaactatgtaatactgagactttgttgactcaaaacttgctagttactgcctacctgagtagaatcttatttatgaactcctgtgtattgcaatggtatgaatctgctcatgtggagactggctataaactgaaaagtgtattccaaattgcagaacacatcacacatttaatccaaataataaatggctgtttctaaagtttcccagtatatataaaatacatcaagtctgtcttgtgacagtttcatctgaacttaacttaaaaacaactgttaatgttctagttgtgcaaagcagtttgcctgtggataagatgacctgtgtaataatctttgttagtagtcttaaagctgctgccatagtcctccaagaagaaagcaccaagacaacatttcatatgactataatgcatgtactatataagctgatctggctttgaaagatgtgagttggcaagttcctcacatagagtcattgtattccacctgtccttcaatttagttttttctgagcttctttgcagcctttgatgtgtttttaagaaagctgaatgcacaagaggatctgtgacactgacatggctgtggtgtgcatactgtgtagttacatagcccttccaattctgggtccatttgcactagcaaattaaaatatgctttgattcatacttaaacctgaaagcaggaatgcctacattaattcctacattaaaaacagccatctacccttgattatctagaaagacttggtaatgatggtcagttccttttagatttcagaaaatcaaatgatgacctaaatttcccttaatttgcaaatacagtagtaattaaggtacatctctaaagtggagcacttacaccaggctctaagattcactttgaggtggaacttaaaaccagtgtactgtatgtatgcattggtaatagctacttttgcttcatagcttcataccaacaaaatatatttattagaatagtatgaaagtactggaggagctgaaagaaaaacacccaaggctgggcgtggtggcacacgcctgtaatcccagcactttgggaggccgaggcaggtggatcacctgaggttgggagttggagaccagcttgaccaacatggagaaaccccgtctctactaaaaatacaaaattggccgggcgtggtggcgcatgcctgtaatcccagctactcgggagggtgaggcaggagaattgcttgaccctgggaggtggaggttgtggtgagctaagatcgtgccattgcactccagccttggcaacaagagcgaaactccgtctcaaaaaaaaaaaataaaacaacacccagatagatacacatactccttcagacttacagacctaagctgcatttatggggtagtgatgaggtttagaacatatacatattttgttaaaattccccagatgattcttggtatgaacgactatattataaattttaagatgtacttagaaatccttaagacatctagccccgtctctaatagacaacacatttatattgcagatattacttttttttcagtttatgaccaggtatttatgaaggactattggcagggaaaatatgaatatgttaactttagcttatggcatcaatttactaaggaacaacaggctcaccaactgatgtcaaacataaaaacccccacatcagtctgatacgatatggtactactttgaatctgttactagtaccatcttgacagaggatacatgctcccaaaacgtttgttaccacacttaaaaatcactgccatcattaagcatcagtttcaaaattatagccattcatgatttactttttccagatgactatcattattctagtcctttgaatttgtaaggggaaaaaaaacaaaaacaaaaacttacgatgcacttttctccagcacatcagatttcaaattgaaaattaaagacatgctatggtaatgcacttgctagtactacacactttgtacaacaaaaaacagaggcaagaaacaacggaaagagaaaagccttcctttgttggcccttaaactgagtcaagatctgaaatgtagagatgatctctgacgatacctgtatgttcttattgtgtaaataaaattgctggtatgaaatgaca

SEQ ID NO: 370790 - DNA, 4481 bp, Homo sapiens
agcgggcatggcctgccgggagggggcaggtagccggcgggcccggtccaatgggtgccggcttccgaggagagggcggaggagaggaggaaggaggcgaactgtgggccccggccccattcattgccgtggccggcgggcactggggccccgtgttttcagagtcatggaggcgctaattcctgtcataaacaagctccaggacgtcttcaacacggtgggcgccgacatcatccagctgcctcaaatcgtcgtagtgggaacgcagagcagcggaaagagctcagtgctagaaagcctggtggggagggacctgcttcccagaggtactggaattgtcacccggagacctctcattctgcaactggtccatgtttcacaagaagataaacggaaaacaacaggagaagaaaatggggtggaagcagaagaatggggtaaatttcttcacaccaaaaataagctttacacggattttgatgaaattcgacaagaaattgaaaatgaaacagaaagaatttcaggaaataataagggagtaagccctgaaccaattcatcttaagattttttcacccaacgttgtcaatttgacacttgtggatttgccaggaatgaccaaggtgcctgtaggtgatcaacctaaggatattgagcttcaaatcagagagctcattcttcggttcatcagtaatcctaattccattatcctcgctgtcactgctgctaatacagatatggcaacatcagaggcacttaaaatttcaagagaggtagatccagatggtcgcagaaccctagctgtaatcactaaacttgatctcatggatgcgggtactgatgccatggatgtattgatgggaagggttattccagtcaaacttggaataattggagtagttaacaggagccagctagatattaacaacaagaagagtgtaactgattcaatccgtgatgagtatgcttttcttcaaaagaaatatccatctctggccaatagaaatggaacaaagtatcttgctaggactctaaacaggttactgatgcatcacatcagagattgtttaccagagttgaaaacaagaataaatgttctagctgctcagtatcagtctcttctaaatagctacggtgaacccgtggatgataaaagtgctactttactccaacttattaccaaatttgccacagaatattgtaacactattgaaggaactgcaaaatatattgaaacttcggagctatgcggtggtgctagaatttgttatattttccatgagacttttgggcgaaccttagaatctgttgatccacttggtggccttaacactattgacattttgactgccattagaaatgctactggtcctcgtcctgctttatttgtgcctgaggtttcatttgagttactggtgaagcggcaaatcaaacgtctagaagagcccagcctccgctgtgtggaactggttcatgaggaaatgcaaaggatcattcagcactgtagcaattacagtacacaggaattgttacgatttcctaaacttcatgatgccatagttgaagtggtgacttgtcttcttcgtaaaaggttgcctgttacaaatgaaatggtccataacttagtggcaattgaactggcttatatcaacacaaaacatccagactttgctgatgcttgtgggctaatgaacaataatatagaggaacaaaggagaaacaggctagccagagaattaccttcagctgtatcacgagacaagtcttctaaagttccaagtgctttggcacctgcctcccaggagccctcccccgctgcttctgctgaggctgatggcaaggttgcatctggaggtggtggggttggagatggtgttcaagaaccaaccacaggcaactggagaggaatgctgaaaacttcaaaagctgaagagttattagcagaagaaaaatcaaaacccattccaattatgccagccagtccacaaaaaggtcatgccgtgaacctgctagatgtgccagttcctgttgcacgaaaactatctgctcgggaacagcgagattgtgaggttattgaacgactcattaaatcatattttctcattgtcagaaagaatattcaagacagtgtgccaaaggcagtaatgcattttttggttaatcatgtgaaagacactcttcagagtgagctagtaggccagctgtataaatcatccttattggatgatcttctgacagaatctgaggacatggcacagcgcaggaaagaagcagctgatatgctaaaggcattacaaggagccagtcaaattattgctgaaatccgggagactcatctttggtgaagagaactatgtaatactgagactttgttgactcaaaacttgctagttactgcctacctgagtagaatcttatttatgaactcctgtgtattgcaatggtatgaatctgctcatgtggagactggctataaactgaaaagtgtattccaaattgcagaacacatcacacatttaatccaaataataaatggctgtttctaaagtttcccagtatatataaaatacatcaagtctgtcttgtgacagtttcatctgaacttaacttaaaaacaactgttaatgttctagttgtgcaaagcagtttgcctgtggataagatgacctgtgtaataatctttgttagtagtcttaaagctgctgccatagtcctccaagaagaaagcaccaagacaacatttcatatgactataatgcatgtactatataagctgatctggctttgaaagatgtgagttggcaagttcctcacatagagtcattgtattccacctgtccttcaatttagttttttctgagcttctttgcagcctttgatgtgtttttaagaaagctgaatgcacaagaggatctgtgacactgacatggctgtggtgtgcatactgtgtagttacatagcccttccaattctgggtccatttgcactagcaaattaaaatatgctttgattcatacttaaacctgaaagcaggaatgcctacattaattcctacattaaaaacagccatctacccttgattatctagaaagacttggtaatgatggtcagttccttttagatttcagaaaatcaaatgatgacctaaatttcccttaatttgcaaatacagtagtaattaaggtacatctctaaagtggagcacttacaccaggctctaagattcactttgaggtggaacttaaaaccagtgtactgtatgtatgcattggtaatagctacttttgcttcatagcttcataccaacaaaatatatttattagaatagtatgaaagtactggaggagctgaaagaaaaacacccaaggctgggcgtggtggcacacgcctgtaatcccagcactttgggaggccgaggcaggtggatcacctgaggttgggagttggagaccagcttgaccaacatggagaaaccccgtctctactaaaaatacaaaattggccgggcgtggtggcgcatgcctgtaatcccagctactcgggagggtgaggcaggagaattgcttgaccctgggaggtggaggttgtggtgagctaagatcgtgccattgcactccagccttggcaacaagagcgaaactccgtctcaaaaaaaaaaaataaaacaacacccagatagatacacatactccttcagacttacagacctaagctgcatttatggggtagtgatgaggtttagaacatatacatattttgttaaaattccccagatgattcttggtatgaacgactatattataaattttaagatgtacttagaaatccttaagacatctagccccgtctctaatagacaacacatttatattgcagatattacttttttttcagtttatgaccaggtatttatgaaggactattggcagggaaaatatgaatatgttaactttagcttatggcatcaatttactaaggaacaacaggctcaccaactgatgtcaaacataaaaacccccacatcagtctgatacgatatggtactactttgaatctgttactagtaccatcttgacagaggatacatgctcccaaaacgtttgttaccacacttaaaaatcactgccatcattaagcatcagtttcaaaattatagccattcatgatttactttttccagatgactatcattattctagtcctttgaatttgtaaggggaaaaaaaacaaaaacaaaaacttacgatgcacttttctccagcacatcagatttcaaattgaaaattaaagacatgctatggtaatgcacttgctagtactacacactttgtacaacaaaaaacagaggcaagaaacaacggaaagagaaaagccttcctttgttggcccttaaactgagtcaagatctgaaatgtagagatgatctctgacgatacctgtatgttcttattgtgtaaataaaattgctggtatgaaatgaca

SEQ ID NO: 370791 - DNA, 2938 bp, Homo sapiens
agcgggcatggcctgccgggagggggcaggtagccggcgggcccggtccaatgggtgccggcttccgaggagagggcggaggagaggaggaaggaggcgaactgtgggccccggccccattcattgccgtggccggcgggcactggggccccgtgttttcagagtcatggaggcgctaattcctgtcataaacaagctccaggacgtcttcaacacggtgggcgccgacatcatccagctgcctcaaatcgtcgtagtgggaacgcagagcagcggaaagagctcagtgctagaaagcctggtggggagggacctgcttcccagaggtactggaattgtcacccggagacctctcattctgcaactggtccatgtttcacaagaagataaacggaaaacaacaggagaagaaaatggggtggaagcagaagaatggggtaaatttcttcacaccaaaaataagctttacacggattttgatgaaattcgacaagaaattgaaaatgaaacagaaagaatttcaggaaataataagggagtaagccctgaaccaattcatcttaagattttttcacccaacgttgtcaatttgacacttgtggatttgccaggaatgaccaaggtgcctgtaggtgatcaacctaaggatattgagcttcaaatcagagagctcattcttcggttcatcagtaatcctaattccattatcctcgctgtcactgctgctaatacagatatggcaacatcagaggcacttaaaatttcaagagaggtagatccagatggtcgcagaaccctagctgtaatcactaaacttgatctcatggatgcgggtactgatgccatggatgtattgatgggaagggttattccagtcaaacttggaataattggagtagttaacaggagccagctagatattaacaacaagaagagtgtaactgattcaatccgtgatgagtatgcttttcttcaaaagaaatatccatctctggccaatagaaatggaacaaagtatcttgctaggactctaaacaggttactgatgcatcacatcagagattgtttaccagagttgaaaacaagaataaatgttctagctgctcagtatcagtctcttctaaatagctacggtgaacccgtggatgataaaagtgctactttactccaacttattaccaaatttgccacagaatattgtaacactattgaaggaactgcaaaatatattgaaacttcggagctatgcggtggtgctagaatttgttatattttccatgagacttttgggcgaaccttagaatctgttgatccacttggtggccttaacactattgacattttgactgccattagaaatgctactggtcctcgtcctgctttatttgtgcctgaggtttcatttgagttactggtgaagcggcaaatcaaacgtctagaagagcccagcctccgctgtgtggaactggttcatgaggaaatgcaaaggatcattcagcactgtagcaattacagtacacaggaattgttacgatttcctaaacttcatgatgccatagttgaagtggtgacttgtcttcttcgtaaaaggttgcctgttacaaatgaaatggtccataacttagtggcaattgaactggcttatatcaacacaaaacatccagactttgctgatgcttgtgggctaatgaacaataatatagaggaacaaaggagaaacaggctagccagagaattaccttcagctgtatcacgagacaagtcttctaaagttccaagtgctttggcacctgcctcccaggagccctcccccgctgcttctgctgaggctgatggcaagttaattcaggacagcagaagagaaactaaaaatgttgcatctggaggtggtggggttggagatggtgttcaagaaccaaccacaggcaactggagaggaatgctgaaaacttcaaaagctgaagagttattagcagaagaaaaatcaaaacccattccaattatgccagccagtccacaaaaaggtcatgccgtgaacctgctagatgtgccagttcctgttgcacgaaaactatctgctcgggaacagcgagattgtgaggttattgaacgactcattaaatcatattttctcattgtcagaaagaatattcaagacagtgtgccaaaggcagtaatgcattttttggttaatcatgtgaaagacactcttcagagtgagctagtaggccagctgtataaatcatccttattggatgatcttctgacagaatctgaggacatggcacagcgcaggaaagaagcagctgatatgctaaaggcattacaaggagccagtcaaattattgctgaaatccgggagactcatctttggtgaagagaactatgtaatactgagactttgttgactcaaaacttgctagttactgcctacctgagtagaatcttatttatgaactcctgtgtattgcaatggtatgaatctgctcatgtggagactggctataaactgaaaagtgtattccaaattgcagaacacatcacacatttaatccaaataataaatggctgtttctaaagtttcccagtatatataaaatacatcaagtctgtcttgtgacagtttcatctgaacttaacttaaaaacaactgttaatgttctagttgtgcaaagcagtttgcctgtggataagatgacctgtgtaataatctttgttagtagtcttaaagctgctgccatagtcctccaagaagaaagcaccaagacaacatttcatatgactataatgcatgtactatataagctgatctggctttgaaagatgtgagttggcaagttcctcacatagagtcattgtattccacctgtccttcattcactgtcagcctgcagctgtcttacagcctccgatgccttgctaacaaacctgcaggcca

SEQ ID NO: 370792 - DNA, 5538 bp, Homo sapiens
agcgggcatggcctgccgggagggggcaggtagccggcgggcccggtccaatgggtgccggcttccgaggagagggcggaggagaggaggaaggaggcgaactgtgggccccggccccattcattgccgtggccggcgggcactggggccccgtgttttcagagtcatggaggcgctaattcctgtcataaacaagctccaggacgtcttcaacacggtgggcgccgacatcatccagctgcctcaaatcgtcgtagtgggaacgcagagcagcggaaagagctcagtgctagaaagcctggtggggagggacctgcttcccagaggtactggaattgtcacccggagacctctcattctgcaactggtccatgtttcacaagaagataaacggaaaacaacaggagaagaaaatggggtggaagcagaagaatggggtaaatttcttcacaccaaaaataagctttacacggattttgatgaaattcgacaagaaattgaaaatgaaacagaaagaatttcaggaaataataagggagtaagccctgaaccaattcatcttaagattttttcacccaacgttgtcaatttgacacttgtggatttgccaggaatgaccaaggtgcctgtaggtgatcaacctaaggatattgagcttcaaatcagagagctcattcttcggttcatcagtaatcctaattccattatcctcgctgtcactgctgctaatacagatatggcaacatcagaggcacttaaaatttcaagagaggtagatccagatggtcgcagaaccctagctgtaatcactaaacttgatctcatggatgcgggtactgatgccatggatgtattgatgggaagggttattccagtcaaacttggaataattggagtagttaacaggagccagctagatattaacaacaagaagagtgtaactgattcaatccgtgatgagtatgcttttcttcaaaagaaatatccatctctggccaatagaaatggaacaaagtatcttgctaggactctaaacaggttactgatgcatcacatcagagattgtttaccagagttgaaaacaagaataaatgttctagctgctcagtatcagtctcttctaaatagctacggtgaacccgtggatgataaaagtgctactttactccaacttattaccaaatttgccacagaatattgtaacactattgaaggaactgcaaaatatattgaaacttcggagctatgcggtggtgctagaatttgttatattttccatgagacttttgggcgaaccttagaatctgttgatccacttggtggccttaacactattgacattttgactgccattagaaatgctactggtcctcgtcctgctttatttgtgcctgaggtttcatttgagttactggtgaagcggcaaatcaaacgtctagaagagcccagcctccgctgtgtggaactggttcatgaggaaatgcaaaggatcattcagcactgtagcaattacagtacacaggaattgttacgatttcctaaacttcatgatgccatagttgaagtggtgacttgtcttcttcgtaaaaggttgcctgttacaaatgaaatggtccataacttagtggcaattgaactggcttatatcaacacaaaacatccagactttgctgatgcttgtgggctaatgaacaataatatagaggaacaaaggagaaacaggctagccagagaattaccttcagctgtatcacgagacaaggtaaaaaaatgtttttaatgcatattcccaatacctaaagatagattgatgagctcagaatattactcagtcctaggagtaattttttcttcttttcctccctttaacactccattggaactaactgagtaaaggcatacaagtttaaaatgggttttgagtgatttaaagataatagtattttgaattcactgacataaatgcttaaaagtagatttaagcatttatttaagcatttaagcatcaagctttttaaaaaaattcagtcagtgactttatcaactttgcacatagctgaaatgactcaagattttattataataagagggtttcttggaaaaaacagtatgcacagaacagaggttttaattactagtaataattaaaatagttgtaatactaaagtgtgtataaaaatcttttaccttgaattctttgccagaaaagaatcttattaaataccaaaaataaaaatgaagcttttggatttggatttttcttatgtattcatctgaaggaaacttttaacaaaggtgacaatggtgaaggaaataaggcagaataaacaatctcccatgattattttcatttttcatgttattttacgatttcattacagaagggaaaaattcatttatagaatgttcctgaatgcatttttgcatccttgattttttttcccccctggattttttgcctttagtcttctaaagttccaagtgctttggcacctgcctcccaggagccctcccccgctgcttctgctgaggctgatggcaaggtctgttctgattcttaatctaagcctgcatgccttgttctctggtacaacataatcttctggaaacaatacactgaatagaagaatattaatatgggatactgtgctaaggtcagatcactttagtctaatatatattttaaaattatataacaatgcaatgcatagtttatattgttgacatgcttttgcttgcaatatagaagatgcacacagaaaaagtaatttaaagaggaaattatcctgcactttttgaatttcaacccattggtatttaaattttgcttgttaaattgcatgttttaacatatcttttaacagttaattcaggacagcagaagagaaactaaaaatgttgcatctggaggtggtggggttggagatggtgttcaagaaccaaccacaggcaactggagaggaatgctgaaaacttcaaaagctgaagagttattagcagaagaaaaatcaaaacccattccaattatgccagccagtccacaaaaaggtcatgccgtgaacctgctagatgtgccagttcctgttgcacgaaaactatctgctcgggaacagcgagattgtgaggttattgaacgactcattaaatcatattttctcattgtcagaaagaatattcaagacagtgtgccaaaggcagtaatgcattttttggttaatcatgtgaaagacactcttcagagtgagctagtaggccagctgtataaatcatccttattggatgatcttctgacagaatctgaggacatggcacagcgcaggaaagaagcagctgatatgctaaaggcattacaaggagccagtcaaattattgctgaaatccgggagactcatctttggtgaagagaactatgtaatactgagactttgttgactcaaaacttgctagttactgcctacctgagtagaatcttatttatgaactcctgtgtattgcaatggtatgaatctgctcatgtggagactggctataaactgaaaagtgtattccaaattgcagaacacatcacacatttaatccaaataataaatggctgtttctaaagtttcccagtatatataaaatacatcaagtctgtcttgtgacagtttcatctgaacttaacttaaaaacaactgttaatgttctagttgtgcaaagcagtttgcctgtggataagatgacctgtgtaataatctttgttagtagtcttaaagctgctgccatagtcctccaagaagaaagcaccaagacaacatttcatatgactataatgcatgtactatataagctgatctggctttgaaagatgtgagttggcaagttcctcacatagagtcattgtattccacctgtccttcaatttagttttttctgagcttctttgcagcctttgatgtgtttttaagaaagctgaatgcacaagaggatctgtgacactgacatggctgtggtgtgcatactgtgtagttacatagcccttccaattctgggtccatttgcactagcaaattaaaatatgctttgattcatacttaaacctgaaagcaggaatgcctacattaattcctacattaaaaacagccatctacccttgattatctagaaagacttggtaatgatggtcagttccttttagatttcagaaaatcaaatgatgacctaaatttcccttaatttgcaaatacagtagtaattaaggtacatctctaaagtggagcacttacaccaggctctaagattcactttgaggtggaacttaaaaccagtgtactgtatgtatgcattggtaatagctacttttgcttcatagcttcataccaacaaaatatatttattagaatagtatgaaagtactggaggagctgaaagaaaaacacccaaggctgggcgtggtggcacacgcctgtaatcccagcactttgggaggccgaggcaggtggatcacctgaggttgggagttggagaccagcttgaccaacatggagaaaccccgtctctactaaaaatacaaaattggccgggcgtggtggcgcatgcctgtaatcccagctactcgggagggtgaggcaggagaattgcttgaccctgggaggtggaggttgtggtgagctaagatcgtgccattgcactccagccttggcaacaagagcgaaactccgtctcaaaaaaaaaaaataaaacaacacccagatagatacacatactccttcagacttacagacctaagctgcatttatggggtagtgatgaggtttagaacatatacatattttgttaaaattccccagatgattcttggtatgaacgactatattataaattttaagatgtacttagaaatccttaagacatctagccccgtctctaatagacaacacatttatattgcagatattacttttttttcagtttatgaccaggtatttatgaaggactattggcagggaaaatatgaatatgttaactttagcttatggcatcaatttactaaggaacaacaggctcaccaactgatgtcaaacataaaaacccccacatcagtctgatacgatatggtactactttgaatctgttactagtaccatcttgacagaggatacatgctcccaaaacgtttgttaccacacttaaaaatcactgccatcattaagcatcagtttcaaaattatagccattcatgatttactttttccagatgactatcattattctagtcctttgaatttgtaaggggaaaaaaaacaaaaacaaaaacttacgatgcacttttctccagcacatcagatttcaaattgaaaattaaagacatgctatggtaatgcacttgctagtactacacactttgtacaacaaaaaacagaggcaagaaacaacggaaagagaaaagccttcctttgttggcccttaaactgagtcaagatctgaaatgtagagatgatctctgacgatacctgtatgttcttattgtgtaaataaaattgctggtatgaaatgaca

SEQ ID NO: 370793 - DNA, 4520 bp, Homo sapiens
agcgggcatggcctgccgggagggggcaggtagccggcgggcccggtccaatgggtgccggcttccgaggagagggcggaggagaggaggaaggaggcgaactgtgggccccggccccattcattgccgtggccggcgggcactggggccccgtgttttcagagtcatggaggcgctaattcctgtcataaacaagctccaggacgtcttcaacacggtgggcgccgacatcatccagctgcctcaaatcgtcgtagtgggaacgcagagcagcggaaagagctcagtgctagaaagcctggtggggagggacctgcttcccagaggtactggaattgtcacccggagacctctcattctgcaactggtccatgtttcacaagaagataaacggaaaacaacaggagaagaaaatgaccctgctacatggaaaaactcaagacacctttctaaaggggtggaagcagaagaatggggtaaatttcttcacaccaaaaataagctttacacggattttgatgaaattcgacaagaaattgaaaatgaaacagaaagaatttcaggaaataataagggagtaagccctgaaccaattcatcttaagattttttcacccaacgttgtcaatttgacacttgtggatttgccaggaatgaccaaggtgcctgtaggtgatcaacctaaggatattgagcttcaaatcagagagctcattcttcggttcatcagtaatcctaattccattatcctcgctgtcactgctgctaatacagatatggcaacatcagaggcacttaaaatttcaagagaggtagatccagatggtcgcagaaccctagctgtaatcactaaacttgatctcatggatgcgggtactgatgccatggatgtattgatgggaagggttattccagtcaaacttggaataattggagtagttaacaggagccagctagatattaacaacaagaagagtgtaactgattcaatccgtgatgagtatgcttttcttcaaaagaaatatccatctctggccaatagaaatggaacaaagtatcttgctaggactctaaacaggttactgatgcatcacatcagagattgtttaccagagttgaaaacaagaataaatgttctagctgctcagtatcagtctcttctaaatagctacggtgaacccgtggatgataaaagtgctactttactccaacttattaccaaatttgccacagaatattgtaacactattgaaggaactgcaaaatatattgaaacttcggagctatgcggtggtgctagaatttgttatattttccatgagacttttgggcgaaccttagaatctgttgatccacttggtggccttaacactattgacattttgactgccattagaaatgctactggtcctcgtcctgctttatttgtgcctgaggtttcatttgagttactggtgaagcggcaaatcaaacgtctagaagagcccagcctccgctgtgtggaactggttcatgaggaaatgcaaaggatcattcagcactgtagcaattacagtacacaggaattgttacgatttcctaaacttcatgatgccatagttgaagtggtgacttgtcttcttcgtaaaaggttgcctgttacaaatgaaatggtccataacttagtggcaattgaactggcttatatcaacacaaaacatccagactttgctgatgcttgtgggctaatgaacaataatatagaggaacaaaggagaaacaggctagccagagaattaccttcagctgtatcacgagacaagtcttctaaagttccaagtgctttggcacctgcctcccaggagccctcccccgctgcttctgctgaggctgatggcaaggttgcatctggaggtggtggggttggagatggtgttcaagaaccaaccacaggcaactggagaggaatgctgaaaacttcaaaagctgaagagttattagcagaagaaaaatcaaaacccattccaattatgccagccagtccacaaaaaggtcatgccgtgaacctgctagatgtgccagttcctgttgcacgaaaactatctgctcgggaacagcgagattgtgaggttattgaacgactcattaaatcatattttctcattgtcagaaagaatattcaagacagtgtgccaaaggcagtaatgcattttttggttaatcatgtgaaagacactcttcagagtgagctagtaggccagctgtataaatcatccttattggatgatcttctgacagaatctgaggacatggcacagcgcaggaaagaagcagctgatatgctaaaggcattacaaggagccagtcaaattattgctgaaatccgggagactcatctttggtgaagagaactatgtaatactgagactttgttgactcaaaacttgctagttactgcctacctgagtagaatcttatttatgaactcctgtgtattgcaatggtatgaatctgctcatgtggagactggctataaactgaaaagtgtattccaaattgcagaacacatcacacatttaatccaaataataaatggctgtttctaaagtttcccagtatatataaaatacatcaagtctgtcttgtgacagtttcatctgaacttaacttaaaaacaactgttaatgttctagttgtgcaaagcagtttgcctgtggataagatgacctgtgtaataatctttgttagtagtcttaaagctgctgccatagtcctccaagaagaaagcaccaagacaacatttcatatgactataatgcatgtactatataagctgatctggctttgaaagatgtgagttggcaagttcctcacatagagtcattgtattccacctgtccttcaatttagttttttctgagcttctttgcagcctttgatgtgtttttaagaaagctgaatgcacaagaggatctgtgacactgacatggctgtggtgtgcatactgtgtagttacatagcccttccaattctgggtccatttgcactagcaaattaaaatatgctttgattcatacttaaacctgaaagcaggaatgcctacattaattcctacattaaaaacagccatctacccttgattatctagaaagacttggtaatgatggtcagttccttttagatttcagaaaatcaaatgatgacctaaatttcccttaatttgcaaatacagtagtaattaaggtacatctctaaagtggagcacttacaccaggctctaagattcactttgaggtggaacttaaaaccagtgtactgtatgtatgcattggtaatagctacttttgcttcatagcttcataccaacaaaatatatttattagaatagtatgaaagtactggaggagctgaaagaaaaacacccaaggctgggcgtggtggcacacgcctgtaatcccagcactttgggaggccgaggcaggtggatcacctgaggttgggagttggagaccagcttgaccaacatggagaaaccccgtctctactaaaaatacaaaattggccgggcgtggtggcgcatgcctgtaatcccagctactcgggagggtgaggcaggagaattgcttgaccctgggaggtggaggttgtggtgagctaagatcgtgccattgcactccagccttggcaacaagagcgaaactccgtctcaaaaaaaaaaaataaaacaacacccagatagatacacatactccttcagacttacagacctaagctgcatttatggggtagtgatgaggtttagaacatatacatattttgttaaaattccccagatgattcttggtatgaacgactatattataaattttaagatgtacttagaaatccttaagacatctagccccgtctctaatagacaacacatttatattgcagatattacttttttttcagtttatgaccaggtatttatgaaggactattggcagggaaaatatgaatatgttaactttagcttatggcatcaatttactaaggaacaacaggctcaccaactgatgtcaaacataaaaacccccacatcagtctgatacgatatggtactactttgaatctgttactagtaccatcttgacagaggatacatgctcccaaaacgtttgttaccacacttaaaaatcactgccatcattaagcatcagtttcaaaattatagccattcatgatttactttttccagatgactatcattattctagtcctttgaatttgtaaggggaaaaaaaacaaaaacaaaaacttacgatgcacttttctccagcacatcagatttcaaattgaaaattaaagacatgctatggtaatgcacttgctagtactacacactttgtacaacaaaaaacagaggcaagaaacaacggaaagagaaaagccttcctttgttggcccttaaactgagtcaagatctgaaatgtagagatgatctctgacgatacctgtatgttcttattgtgtaaataaaattgctggtatgaaatgaca

SEQ ID NO: 370794 - DNA, 2532 bp, Homo sapiens
agcgggcatggcctgccgggagggggcaggtagccggcgggcccggtccaatgggtgccggcttccgaggagagggcggaggagaggaggaaggaggcgaactgtgggccccggccccattcattgccgtggccggcgggcactggggccccgtgttttcagagtcatggaggcgctaattcctgtcataaacaagctccaggacgtcttcaacacggtgggcgccgacatcatccagctgcctcaaatcgtcgtagtgggaacgcagagcagcggaaagagctcagtgctagaaagcctggtggggagggacctgcttcccagaggtactggaattgtcacccggagacctctcattctgcaactggtccatgtttcacaagaagataaacggaaaacaacaggagaagaaaatggggtggaagcagaagaatggggtaaatttcttcacaccaaaaataagctttacacggattttgatgaaattcgacaagaaattgaaaatgaaacagaaagaatttcaggaaataataagggagtaagccctgaaccaattcatcttaagattttttcacccaacgttgtcaatttgacacttgtggatttgccaggaatgaccaaggtgcctgtaggtgatcaacctaaggatattgagcttcaaatcagagagctcattcttcggttcatcagtaatcctaattccattatcctcgctgtcactgctgctaatacagatatggcaacatcagaggcacttaaaatttcaagagaggtagatccagatggtcgcagaaccctagctgtaatcactaaacttgatctcatggatgcgggtactgatgccatggatgtattgatgggaagggttattccagtcaaacttggaataattggagtagttaacaggagccagctagatattaacaacaagaagagtgtaactgattcaatccgtgatgagtatgcttttcttcaaaagaaatatccatctctggccaatagaaatggaacaaagtatcttgctaggactctaaacaggttactgatgcatcacatcagagattgtttaccagagttgaaaacaagaataaatgttctagctgctcagtatcagtctcttctaaatagctacggtgaacccgtggatgataaaagtgctactttactccaacttattaccaaatttgccacagaatattgtaacactattgaaggaactgcaaaatatattgaaacttcggagctatgcggtggtgctagaatttgttatattttccatgagacttttgggcgaaccttagaatctgttgatccacttggtggccttaacactattgacattttgactgccattagaaatgctactggtcctcgtcctgctttatttgtgcctgaggtttcatttgagttactggtgaagcggcaaatcaaacgtctagaagagcccagcctccgctgtgtggaactggttcatgaggaaatgcaaaggatcattcagcactgtagcaattacagtacacaggaattgttacgatttcctaaacttcatgatgccatagttgaagtggtgacttgtcttcttcgtaaaaggttgcctgttacaaatgaaatggtccataacttagtggcaattgaactggcttatatcaacacaaaacatccagactttgctgatgcttgtgggctaatgaacaataatatagaggaacaaaggagaaacaggctagccagagaattaccttcagctgtatcacgagacaaggttgcatctggaggtggtggggttggagatggtgttcaagaaccaaccacaggcaactggagaggaatgctgaaaacttcaaaagctgaagagttattagcagaagaaaaatcaaaacccattccaattatgccagccagtccacaaaaaggtcatgccgtgaacctgctagatgtgccagttcctgttgcacgaaaactatctgctcgggaacagcgagattgtgaggttattgaacgactcattaaatcatattttctcattgtcagaaagaatattcaagacagtgtgccaaaggcagtaatgcattttttggttaatcatgtgaaagacactcttcagagtgagctagtaggccagctgtataaatcatccttattggatgatcttctgacagaatctgaggacatggcacagcgcaggaaagaagcagctgatatgctaaaggcattacaaggagccagtcaaattattgctgaaatccgggagactcatctttggtgaagagaactatgtaatactgagactttgttgactcaaaacttgctagttactgcctacctgagtagaatcttatttatgaactcctgtgtattgcaatggtatgaatctgctcatgtggagactggctataaactgaaaagtgtattccaaattgcagaacacatcacacatttaatccaaataataaatggcgatcggtgcctttcccttagggagggtaagttatgatctagctactgactactgcagtcagtcgtcagttgcgg

SEQ ID NO: 370795 - DNA, 2399 bp, Homo sapiens
agcgggcatggcctgccgggagggggcaggtagccggcgggcccggtccaatgggtgccggcttccgaggagagggcggaggagaggaggaaggaggcgaactgtgggccccggccccattcattgccgtggccggcgggcactggggccccgtgttttcagagtcatggaggcgctaattcctgtcataaacaagctccaggacgtcttcaacacggtgggcgccgacatcatccagctgcctcaaatcgtcgtagtgggaacgcagagcagcggaaagagctcagtgctagaaagcctggtggggagggacctgcttcccagaggtactggaattgtcacccggagacctctcattctgcaactggtccatgtttcacaagaagataaacggaaaacaacaggagaagaaaatggggtggaagcagaagaatggggtaaatttcttcacaccaaaaataagctttacacggattttgatgaaattcgacaagaaattgaaaatgaaacagaaagaatttcaggaaataataagggagtaagccctgaaccaattcatcttaagattttttcacccaacgttgtcaatttgacacttgtggatttgccaggaatgaccaaggtgcctgtaggtgatcaacctaaggatattgagcttcaaatcagagagctcattcttcggttcatcagtaatcctaattccattatcctcgctgtcactgctgctaatacagatatggcaacatcagaggcacttaaaatttcaagagaggtagatccagatggtcgcagaaccctagctgtaatcactaaacttgatctcatggatgcgggtactgatgccatggatgtattgatgggaagggttattccagtcaaacttggaataattggagtagttaacaggagccagctagatattaacaacaagaagagtgtaactgattcaatccgtgatgagtatgcttttcttcaaaagaaatatccatctctggccaatagaaatggaacaaagtatcttgctaggactctaaacaggttactgatgcatcacatcagagattgtttaccagagttgaaaacaagaataaatgttctagctgctcagtatcagtctcttctaaatagctacggtgaacccgtggatgataaaagtgctactttactccaacttattaccaaatttgccacagaatattgtaacactattgaaggaactgcaaaatatattgaaacttcggagctatgcggtggtgctagaatttgttatattttccatgagacttttgggcgaaccttagaatctgttgatccacttggtggccttaacactattgacattttgactgccattagaaatgctactggtcctcgtcctgctttatttgtgcctgaggtttcatttgagttactggtgaagcggcaaatcaaacgtctagaagagcccagcctccgctgtgtggaactggttcatgaggaaatgcaaaggatcattcagcactgtagcaattacagtacacaggaattgttacgatttcctaaacttcatgatgccatagttgaagtggtgacttgtcttcttcgtaaaaggttgcctgttacaaatgaaatggtccataacttagtggcaattgaactggcttatatcaacacaaaacatccagactttgctgatgcttgtgggctaatgaacaataatatagaggaacaaaggagaaacaggctagccagagaattaccttcagctgtatcacgagacaagtcttctaaagttccaagtgctttggcacctgcctcccaggagccctcccccgctgcttctgctgaggctgatggcaaggttgcatctggaggtggtggggttggagatggtgttcaagaaccaaccacaggcaactggagaggaatgctgaaaacttcaaaagctgaagagttattagcagaagaaaaatcaaaacccattccaattatgccagccagtccacaaaaaggtcatgccgtgaacctgctagatgtgccagttcctgttgcacgaaaactatctgctcgggaacagcgagattgtgaggttattgaacgactcattaaatcatattttctcattgtcagaaagaatattcaagacagtgtgccaaaggcagtaatgcattttttggttaatcatgtgaaagacactcttcagagtgagctagtaggccagctgtataaatcatccttattggatgatcttctgacagaatctgaggacatggcacagcgcaggaaagaagcagctgatatgctaaagttgtaactggagctgttgtaactggagctgttgtaactggagctgttgtaactggagctgttgtaactggagctgttgtaactgagctgttgtaactggagctgttgtaact

SEQ ID NO: 370796 - DNA, 1543 bp, Homo sapiens
agcgggcatggcctgccgggagggggcaggtagccggcgggcccggtccaatgggtgccggcttccgaggagagggcggaggagaggaggaaggaggcgaactgtgggccccggccccattcattgccgtggccggcgggcactggggccccgtgttttcagagtcatggaggcgctaattcctgtcataaacaagctccaggacgtcttcaacacggtgggcgccgacatcatccagctgcctcaaatcgtcgtagtgggaacgcagagcagcggaaagagctcagtgctagaaagcctggtggggagggacctgcttcccagaggtactggaattgtcacccggagacctctcattctgcaactggtccatgtttcacaagaagataaacggaaaacaacaggagaagaaaatggggtggaagcagaagaatggggtaaatttcttcacaccaaaaataagctttacacggattttgatgaaattcgacaagaaattgaaaatgaaacagaaagaatttcaggaaataataagggagtaagccctgaaccaattcatcttaagattttttcacccaacgttgtcaatttgacacttgtggatttgccaggaatgaccaaggtgcctgtaggtgatcaacctaaggatattgagcttcaaatcagagagctcattcttcggttcatcagtaatcctaattccattatcctcgctgtcactgctgctaatacagatatggcaacatcagaggcacttaaaatttcaagagaggtagatccagatggtcgcagaaccctagctgtaatcactaaacttgatctcatggatgcgggtactgatgccatggatgtattgatgggaagggttattccagtcaaacttggaataattggagtagttaacaggagccagctagatattaacaacaagaagagtgtaactgattcaatccgtgatgagtatgcttttcttcaaaagaaatatccatctctggccaatagaaatggaacaaagtatcttgctaggactctaaacaggttactgatgcatcacatcagagattgtttaccagagttgaaaacaagaataaatgttctagctgctcagtatcagtctcttctaaatagctacggtgaacccgtggatgataaaagtgctactttactccaacttattaccaaatttgccacagaatattgtaacactattgaaggaactgcaaaatatattgaaacttcggagctatgcggtggtgtagaaattgaccgtccaatttctacacaagtatattttaaaaggaaagcctagtgtcctgttcataattatcataatggtctatttttttaagcaacaggctcctactatatggccctggctacacttcaactcctagactcaagcaattctctcatctcagtctcctgagtagttgggacaccactgtgccaattcccattattagaagaaattatgttcatctccacagtatacactcttatctgtagtgagtgtagaaatgaacggtacgagccgaatacgaac

SEQ ID NO: 370797 - DNA, 907 bp, Homo sapiens
gggaacgccggctcccggcatgccgcgcgctgacagccttataaatagtcgcctttgccggccgccgcgaggacgggcagggcacgcactggccccggcgcccacccgcacccctccccagagcactgacacggctcccgggacctcggcaggatggaagagaagctgaagaaaaccaagatcatctttgtggtgggtgggcctggctcagggaagggcacccagtgtgagaagatcgtgcagaagtatggctacacccacctctccaccggggacctcctgcggtccgaggtcagctcaggctcggccaggggcaagaagctgtcggaaatcatggagaaggggcagctggttccactggagacagtgttggacatgctccgggatgccatggtggccaaagtcaatacttccaaaggcttcctgattgatggctacccgcgggaggtgcagcaaggagaagagtttgagcgacggattggacagcccacactgctgctgtatgtggacgcaggccctgagaccatgacccagcggctcttgaaacgtggagagaccagcgggcgtgtggacgacaatgaggagaccatcaaaaagcggctggagacctattacaaggccacagaacccgtcatcgccttctatgagaaacgtggcattgtgcgcaaggtcaacgctgagggctccgtggacagtgtcttctcccaggtctgcacccacctggacgccctaaagtagcaacgctggagccgcttccccagctcagagccccgccccaccccgtcctgattagaggtcctcctggcctgagcgcagcgcctccaccctgccctgctgagcacagacggaggaagccgcttatcctgttttcatggacagctgagcactaaaggaatttctaaggaca

SEQ ID NO: 370798 - DNA, 902 bp, Homo sapiens
ggttgctaagcccccactgccgggggaggcgggtgatgggccggcccagggcctgagaggggaagggcagggtgcacaggagacacggcaggacgggaccatgggctgctgctcctcgagtgacccccgcagagaagacgatctgagagccagagagaagctgaagaaaaccaagatcatctttgtggtgggtgggcctggctcagggaagggcacccagtgtgagaagatcgtgcagaagtatggctacacccacctctccaccggggacctcctgcggtccgaggtcagctcaggctcggccaggggcaagaagctgtcggaaatcatggagaaggggcagctggttccactggagacagtgttggacatgctccgggatgccatggtggccaaagtcaatacttccaaaggcttcctgattgatggctacccgcgggaggtgcagcaaggagaagagtttgagcgacggattggacagcccacactgctgctgtatgtggacgcaggccctgagaccatgacccagcggctcttgaaacgtggagagaccagcgggcgtgtggacgacaatgaggagaccatcaaaaagcggctggagacctattacaaggccacagaacccgtcatcgccttctatgagaaacgtggcattgtgcgcaaggtcaacgctgagggctccgtggacagtgtcttctcccaggtctgcacccacctggacgccctaaagtagcaacgctggagccgcttccccagctcagagccccgccccaccccgtcctgattagaggtcctcctggcctgagcgcagcgcctccaccctgccctgctgagcacagacggaggaagccgcttatcctgttttcatggacagctgagcactaaaggaatttctaaggaca

SEQ ID NO: 370799 - DNA, 2355 bp, Homo sapiens
  misc_feature (2286)..(2286): n is a, c, g, or t
gggaacgccggctcccggcatgccgcgcgctgacagccttataaatagtcgcctttgccggccgccgcgaggacgggcagggcacgcactggccccggcgcccacccgcacccctccccagagcactgacacggctcccgggacctcggcaggatggaagagaagctgaagaaaaccaagatcatctttgtggtgggtgggcctggctcagggaagggcacccagtgtgagaagatcgtgcagaagtatggctacacccacctctccaccggggacctcctgcggtccgaggtcagctcaggctcggccaggggcaagaagctgtcggaaatcatggagaaggggcagctggttccactggagacagtgttggacatgctccgggatgccatggtggccaaagtcaatacttccaaaggcttcctgattgatggctacccgcgggaggtgcagcaaggagaagagtttgagcgacggattggacagcccacactgctgctgtatgtggacgcaggccctgagaccatgacccagcggctcttgaaacgtggagagaccagcgggcgtgtggacgacaatgaggagaccatcaaaaagcggctggagacctattacaaggccacagaacccgtcatcgccttctatgagaaacgtggcattgtgcgcaaggtcaacgctgagggctccgtggacagtgtcttctcccaggtctgcacccacctggacgccctaaagtagcaacgctggagccgcttccccagctcagagccccgccccaccccgtcctgattagaggtcctcctggcctgagcgcagcgcctccaccctgccctgctgagcacagacggaggaagccgcttatcctgttttcatggacagctgagcactaaaggaatttctaaggacatttggttttactgctttttctctgcttccagttggagttgattcatgtgcttgtgcctacctggccgcaagtccccagcccctcaaccctccgttcctcctcagcctccctttgccagccacccctcctctagctctggtgggaggcccggggcccttcctcgcacagggcatgcctggcctgaggacccggcgctgagtggcggggcccctgctccgaggggctcatgttcaggcagaaccggtcccagcctgggctcctctgcatcttgctctgtggccttggccctgacccccatcgctctgagcatatgttccatgcctggcccttgccggggcctggactgcacaggcagcaaggtcatggtctgagtggggcttcctgggcagttggggcggcccacgccagctggcccagtgggtagtgaattggcttccttgacgcgagaggctctgagggtctgaaaagggcatctcaatggcatgggtgggtggggagtcagtcatgtcactgaaattgaatgggggaggcccaatgaggtggctcatgcctgtaatcccagcactttgggaagctgaggcaggaggatcacctgaggtcaggagttcgagagcagcctggccaacatggcaaaaccccttatttactaaaaatacaaaaattagccgggcatggtggcatgtgcctgtattcccagctactcatgaggctgaggcaggagaatggcgtgaacccgggaggtggagcttgcaatgagccaagattgcgccactgcactccagcctgggtgacagagcaagactccgtctcaaaaaaaaaaaaaaaaaaaaagaaattgaattgggggagtcatggtcaggggtgagacctgaaggacctccccctgtgtggccctggacacagcccaccctctgtgagccgtttccaattctaaaacagactcaatgtccccctcacccccacctcaaggtcaggatgcgaacacactgagtgaggagtggacgctgtccattgccacggccatgagggctggagaccagaacagcatggcccgaagcgtgcggggccccggatgacttggggacaccccagaatcccctggggagaacccttcctgcgcgctttcattttttgacctcatcactgagaaaggctcaatttggtgctcacgtgtccttaacacctgatctggcccaagctgggctccctttaagccaagagagcctcttgtggaccccgcctgcccgaatgaaatccgaacagttggggctgttcatggcaagtggggctggtttttcatttccattggttatttaaagtttcctttaaaataaacgattttaagttataaaaggtgaatctattgaaagaagaacatnaaagaaataaacaggagttcagcggagtagcagaagacaaggcatgtagggggagccattctgtcccag

SEQ ID NO: 370800 - DNA, 2257 bp, Homo sapiens
gggaacgccggctcccggcatgccgcgcgctgacagccttataaatagtcgcctttgccggccgccgcgaggacgggcagggcacgcactggccccggcgcccacccgcacccctccccagagcactgacacggctcccgggacctcggcaggatggaagagaagctgaagaaaaccaagatcatctttgtggtgggtgggcctggctcagggaagggcacccagtgtgagaagatcgtgcagaagtatggctacacccacctctccaccggggacctcctgcggtccgaggtcagctcaggctcggccaggggcaagaagctgtcggaaatcatggagaaggggcagctggttccactggagacagtgttggacatgctccgggatgccatggtggccaaagtcaatacttccaaaggcttcctgattgatggctacccgcgggaggtgcagcaaggagaagagtttgagcgacggattggacagcccacactgctgctgtatgtggacgcaggccctgagaccatgacccagcggctcttgaaacgtggagagaccagcgggcgtgtggacgacaatgaggagaccatcaaaaagcggctggagacctattacaaggccacagaacccgtcatcgccttctatgagaaacgtggcattgtgcgcaaggtcaacgctgagggctccgtggacagtgtcttctcccaggtctgcacccacctggacgccctaaagtagcaacgctggagccgcttccccagctcagagccccgccccaccccgtcctgattagaggtcctcctggcctgagcgcagcgcctccaccctgccctgctgagcacagacggaggaagccgcttatcctgttttcatggacagctgagcactaaaggaatttctaaggacatttggttttactgctttttctctgcttccagttggagttgattcatgtgcttgtgcctacctggccgcaagtccccagcccctcaaccctccgttcctcctcagcctccctttgccagccacccctcctctagctctggtgggaggcccggggcccttcctcgcacagggcatgcctggcctgaggacccggcgctgagtggcggggcccctgctccgaggggctcatgttcaggcagaaccggtcccagcctgggctcctctgcatcttgctctgtggccttggccctgacccccatcgctctgagcatatgttccatgcctggcccttgccggggcctggactgcacaggcagcaaggtcatggtctgagtggggcttcctgggcagttggggcggcccacgccagctggcccagtgggtagtgaattggcttccttgacgcgagaggctctgagggtctgaaaagggcatctcaatggcatgggtgggtggggagtcagtcatgtcactgaaattgaatgggggaggcccaatgaggtggctcatgcctgtaatcccagcactttgggaagctgaggcaggaggatcacctgaggtcaggagttcgagagcagcctggccaacatggcaaaaccccttatttactaaaaatacaaaaattagccgggcatggtggcatgtgcctgtattcccagctactcatgaggctgaggcaggagaatggcgtgaacccgggaggtggagcttgcaatgagccaagattgcgccactgcactccagcctgggtgacagagcaagactccgtctcaaaaaaaaaaaaaaaaaaaaagaaattgaattgggggagtcatggtcaggggtgagacctgaaggacctccccctgtgtggccctggacacagcccaccctctgtgagccgtttccaattctaaaacagactcaatgtccccctcacccccacctcaaggtcaggatgcgaacacactgagtgaggagtggacgctgtccattgccacggccatgagggctggagaccagaacagcatggcccgaagcgtgcggggccccggatgacttggggacaccccagaatcccctggggagaacccttcctgcgcgctttcattttttgacctcatcactgagaaaggctcaatttggtgctcacgtgtccttaacacctgatctggcccaagctgggctccctttaagccaagagagcctcttgtggaccccgcctgcccgaatgaaatccgaacagttggggctgttcatggcaagtggggctggtttttcatttccattggttatttaaagtttcctttaaaataaacgattttaagttata

SEQ ID NO: 370801 - DNA, 857 bp, Homo sapiens
gggaacgccggctcccggcatgccgcgcgctgacagccttataaatagtcgcctttgccggccgccgcgaggacgggcagggcacgcactggccccggcgcccacccgcacccctccccagagcactgacacggctcccgggacctcggcaggatggaagagaagctgaagaaaaccaagatcatctttgtggtgggtgggcctggctcagggaagggcacccagtgtgagaagatcgtgcagaagtatggctacacccacctctccaccggggacctcctgcggtccgaggtcagctcaggctcggccaggggcaagaagctgtcggaaatcatggagaaggggcagctggttccactggagacagtgttggacatgctccgggatgccatggtggccaaagtcaatacttccaaaggcttcctgattgatggctacccgcgggaggtgcagcaaggagaagagtttgagcgacggattggacagcccacactgctgctgtatgtggacgcaggccctgagaccatgacccagcggctcttgaaacgtggagagaccagcgggcgtgtggacgacaatgaggagaccatcaaaaagcggctggagacctattacaaggccacagaacccgtcatcgccttctatgagaaacgtggcattgtgcgcaaggtcaacgctgagggctccgtggacagtgtcttctccatttgcttctttctcttttcctgctccactttatcttccagctttctgattttctcttcatactcctctcttatccgcgctttctctctctccagctccactctgtggagttcttgcattgcttgtgtttgcttctggatctcctcctccgc

SEQ ID NO: 370802 - DNA, 1048 bp, Homo sapiens
gggccggacgaatgtgtcacctacatccagaatgagcacagtcgcaagggcaaccaccaccgcttcatcaccgagaaaagggtcttctcatcgtgggcccagctgaataaacacacctacgctccggcttcgtgtcctgtgtcgcctgggtcgagcacagccttctggtccagcgctgcatgcggcctcaggaccacgtcttccggttgggggctcccagtaaagcgatcctcagcttcttcagcagccagtggccagtgagagcactgacacggctcccgggacctcggcaggatggaagagaagctgaagaaaaccaagatcatctttgtggtgggtgggcctggctcagggaagggcacccagtgtgagaagatcgtgcagaagtatggctacacccacctctccaccggggacctcctgcggtccgaggtcagctcaggctcggccaggggcaagaagctgtcggaaatcatggagaaggggcagctggttccactggagacagtgttggacatgctccgggatgccatggtggccaaagtcaatacttccaaaggcttcctgattgatggctacccgcgggaggtgcagcaaggagaagagtttgagcgacggattggacagcccacactgctgctgtatgtggacgcaggccctgagaccatgacccagcggctcttgaaacgtggagagaccagcgggcgtgtggacgacaatgaggagaccatcaaaaagcggctggagacctattacaaggccacagaacccgtcatcgccttctatgagaaacgtggcattgtgcgcaaggtcaacgctgagggctccgtggacagtgtcttctcccaggtctgcacccacctggacgccctaaagtagcaacgctggagccgcttccccagctcagagccccgccccaccccgtcctgattagaggtcctcctggcctgagcgcagcgcctccaccctgccctgctgagcacagacggaggaagccgcttatcctgttttcatggacagctgagcactaaaggaatttctaaggaca

SEQ ID NO: 370803 - DNA, 921 bp, Homo sapiens
ttctgggagtttcgaggggagcagctctgcagttgtgtggccgctgtttatgtccctcggtgccatcctcactgtcccagcccctccagcgggaacccaggtggatgggagggggctactgcccttctgtgacagagcactgacacggctcccgggacctcggcaggatggaagagaagctgaagaaaaccaagatcatctttgtggtgggtgggcctggctcagggaagggcacccagtgtgagaagatcgtgcagaagtatggctacacccacctctccaccggggacctcctgcggtccgaggtcagctcaggctcggccaggggcaagaagctgtcggaaatcatggagaaggggcagctggttccactggagacagtgttggacatgctccgggatgccatggtggccaaagtcaatacttccaaaggcttcctgattgatggctacccgcgggaggtgcagcaaggagaagagtttgagcgacggattggacagcccacactgctgctgtatgtggacgcaggccctgagaccatgacccagcggctcttgaaacgtggagagaccagcgggcgtgtggacgacaatgaggagaccatcaaaaagcggctggagacctattacaaggccacagaacccgtcatcgccttctatgagaaacgtggcattgtgcgcaaggtcaacgctgagggctccgtggacagtgtcttctcccaggtctgcacccacctggacgccctaaagtagcaacgctggagccgcttccccagctcagagccccgccccaccccgtcctgattagaggtcctcctggcctgagcgcagcgcctccaccctgccctgctgagcacagacggaggaagccgcttatcctgttttcatggacagctgagcactaaaggaatttctaaggaca

SEQ ID NO: 370804 - DNA, 598 bp, Homo sapiens
gggccggacgaatgtgtcacctacatccagaatgagcacagtcgcaagggcaaccaccaccgcttcatcaccgagaaaagggtcttctcatcgtgggcccagctgaataaacacacctacgctccggcttcgtgtcctgtgtcgcctgggtcgagcacagccttctggtccagcgctgcatgcggcctcaggaccacgtcttccggttgggggctcccagtaaagcgatcctcagcttcttcagcagccagtggccagtgaggtgtgtatttttgcatcttgagtggagacctgggggctctggggatggtgggggcgtgcggagccaggcccgtctggcttttcctgtccccacctcaccctgcctgtgtgaccacgggcaagtcacttcgcctctgagagccccaattccttcaagggcaaaaggggaccagacactgccctcaaggagctcaggttccaggaggggaggagccccgtggtacactaggaagaattcccacagaagctgggaaaagagtttgagcagtgaatgcagaaggggtgaggggaaagacatcccaggccacagagccagaggtctctcagctccttaagc

SEQ ID NO: 370805 - DNA, 3440 bp, Homo sapiens
cgagagttggtccgcggacgccggaagtagttcgtcgctccctagcggccgaaggggcgggctcgcggggtctcgactgctttcggcttgctcggcggagcaagatggcggacatctccctggacgaactcatcaggaagcgcggggcggcggcgaaaggacggcttaatgccagaccgggagttggaggtgtccgatctcgagttgggatccagcaaggccttctcagccagtcaacacgcacagccaccttccagcagagatttgatgcccggcagaagattggcctctcagatgcccggctcaaactgggagtcaaggatgcccgggagaagcttttgcagaaagatgcccgatttcgaatcaaagggaaagtgcaggatgccagagagatgttgaactctcgcaagcagcagaccacggtgccccagaagccccgccaggttgctgatgcccgggagaagatcagcttgaagaggagttcccctgctgccttcataaacccacccattgggacagtgacccctgctctgaagctcaccaaaaccatccaggttccacagcagaaagccatggcaccacttcatccccatcctgccggaatgagaatcaatgttgtcaataaccaccaggccaaacagaatttatatgacctggatgaagatgatgatggtatagcttccgttcctactaaacagatgaagtttgcagcctcaggcggctttctccaccacatggctgggctaagcagttccaagctttccatgtccaaggccctccctctcaccaaagtggttcagaatgatgcatacacagctcctgctctcccttcctctattcgaacaaaagccttgaccaacatgtcccggacactggtgaacaaggaagaaccccccaaagagctgccagctgctgagcctgttctcagcccattggaaggcaccaagatgactgtgaataatctgcaccctcgagtcactgaggaggacattgttgagcttttctgtgtgtgtggggccctcaagcgagctcgactggtccatcctggggtagcggaggtggtgtttgtgaaaaaggacgatgccatcaccgcatataagaagtacaacaaccggtgtctggacgggcagccgatgaagtgcaaccttcacatgaatgggaatgttatcacctcagaccagcccatcctgctgcggctgagtgacagcccatcaatgaaaaaggagagcgagctgcctcgcagggtgaactctgcctcctcctccaacccccctgccgaagtggaccctgacaccatcctgaaggcactcttcaagtcctcaggggcctctgtgaccacgcagcccacagaattcaaaatcaagctttgagcaggggagtgaggcagccagaagtgggggcagaggagggtggctctgtttccccaaggcaaagcttatgaccaatgggccatcggactggagacccctgattgtgggaagggttgccagggataaagagcttcctcactggatgggacccgcctttctgtgttgtgttctgccctgtgctcttctctctacgttaacgtttcctgtagtatgtttcttcatctcatcgccaaggtaggcttgtgtttttcagtgtgtgcctccccgagcctcagccccaagctgatttcttatctggaaatggtacactgaattctctgggtggctttcttgtggccccatgggatgcagcgtgggggctgtctgaaggaccctgctttttccaggggccgaggggctgcctttcctttgtgtgtattaagcttttcaaacaatggaggggatggagagccctggtgtcctgacgggagccaggtcggcctgagagctgtgccgctcctctgtcttgtcagtggaggtgcctgggtggggagcaggtctcaggcctcttgtcctctccccagtggctccaggcctcactagtggcaagggcaggatgaggctgcaccgctgggaagagtctatctaagctcttggcttggagtcccgtgtcgtctccacccagaggaagttctccagagttcacctttcccttttccttgagttgtgctgaatgccccaccccagctctctttcccttctgggtgtctttgctgggagggggctgtgttgtgagccctcccggttctcacctcgcctggcacttaaccacaccctggttttgtgtagccgccagctctcttctggttgggcctttgaaaggctcagcctcccattgtgcagtgcttgggtttggagcttatttgaatggaagaggtcagtttgttcctggctctccatttctggcctcagttgtctacaggacagtggtcagggatgcctggaggcatatatccagctgccaccaaggggcactgtttgttcccacttatgtgagtgaccccatccatccatgaccagaggattattttcctgccttggcagaggaggaggagtcaagggagcagggcagctctaccaggcaaggtgtttccccagcataggcgcagacagttgggacgaaacttcagagcccaggcagtccctgaatgaccaggccagtgttgtcactgagtggtcccctgctggttgggagtgaagagaatccaggctggcagagctggagccagttggggagcacggttctgggagctctgcaaaatcagtagcaagtgctggaaaaggcacatgccgaagatactcaagagctcccaagatttgcttgaggctagcccagtgaaaaaaaccagagactcatgtttccaggggtcagtctgtcaggcaggaaggacccaggatttgaacccagcttcagtgtgcaggctctgaggctgcccaggacgggaaagtccaaggaaggggcctggtggtgctccacttgcagttctttaaagaatgctgctttttattctcctaaccctttcaagtgggtgcagacttctcgttagcagctggaagacattcctcccacacttttcccttcctggcccaagagagcatccagaaggcagtaggacctggtttttcaggtactgggagccgggggctcactgcttgcactgtgcttagggtagggatggtaaatatcctccctgcatggctttatcctccctctcatcccaaagcaggtatcttctggttgtcacagagtttcattgagtccagctgcagccacgtggccatctggagctggtgctataggtgaccatctggtacattgaggggacctgtttgcctcctccactctataagcagtcatcttgggagaccgggaggagaaggtggtgggctagtcctgtgtcctcctccacttcccatgcctctatgttacccatctgtgtctcctgtgcagaaggagaggaaggggcattaagagatgaagggtgattatgtattacttatccatttctgaataaacatttgttattccta

SEQ ID NO: 370806 - DNA, 643 bp, Homo sapiens
tgagcaaaaataggcagagggctgggtaatcggacgaggtggtacatgaggggactgttgcctcctccactctataagcagtcatcttgggagaccgggaggagaaggtggtgggctagtcctgtgtcctcctccacttcccatgcctctatgttacccatctgtgtctcctgtgcagaaggagaggaaggggcattaagagatgaagggtgattatgtattacttatccatttctgaataaacatttgttattcctaaaaaaaaaaaaaaaaaaaaaaaaaaaaaaaaaaaaaaaaaaaaaaaaaaaaaaaaaaaaaaaaaaaaaagaaaaaaaaagaaaaaaaaacgagagaagggaggagaagaaaaagagaaaaaaggggggggggggcccaaagacccaccgcaggcggggtcgttcacaaaggggccgcccccatatagtgtggaaagaggagagcgagcgccagcagcggtagggagcgtaatatataaaaagcagcgcgcggccgggtggacaagacaacaagcgtgagggctgaaggacgaaaaaaactcgctaagttgtgtgtaggaggcaacaaacaacacactcgtagggcgacgacacaacaagttgtggggcgcacagcgcgcgaaacg

SEQ ID NO: 370807 - DNA, 3441 bp, Homo sapiens
aacggagattacgaggcgtcccctgggttttaatttagtcacgagggcggcgttacagtttacttaggttggccattggctgtacagcttgctcggcggagcaagatggcggacatctccctggacgaactcatcaggaagcgcggggcggcggcgaaaggacggcttaatgccagaccgggagttggaggtgtccgatctcgagttgggatccagcaaggccttctcagccagtcaacacgcacagccaccttccagcagagatttgatgcccggcagaagattggcctctcagatgcccggctcaaactgggagtcaaggatgcccgggagaagcttttgcagaaagatgcccgatttcgaatcaaagggaaagtgcaggatgccagagagatgttgaactctcgcaagcagcagaccacggtgccccagaagccccgccaggttgctgatgcccgggagaagatcagcttgaagaggagttcccctgctgccttcataaacccacccattgggacagtgacccctgctctgaagctcaccaaaaccatccaggttccacagcagaaagccatggcaccacttcatccccatcctgccggaatgagaatcaatgttgtcaataaccaccaggccaaacagaatttatatgacctggatgaagatgatgatggtatagcttccgttcctactaaacagatgaagtttgcagcctcaggcggctttctccaccacatggctgggctaagcagttccaagctttccatgtccaaggccctccctctcaccaaagtggttcagaatgatgcatacacagctcctgctctcccttcctctattcgaacaaaagccttgaccaacatgtcccggacactggtgaacaaggaagaaccccccaaagagctgccagctgctgagcctgttctcagcccattggaaggcaccaagatgactgtgaataatctgcaccctcgagtcactgaggaggacattgttgagcttttctgtgtgtgtggggccctcaagcgagctcgactggtccatcctggggtagcggaggtggtgtttgtgaaaaaggacgatgccatcaccgcatataagaagtacaacaaccggtgtctggacgggcagccgatgaagtgcaaccttcacatgaatgggaatgttatcacctcagaccagcccatcctgctgcggctgagtgacagcccatcaatgaaaaaggagagcgagctgcctcgcagggtgaactctgcctcctcctccaacccccctgccgaagtggaccctgacaccatcctgaaggcactcttcaagtcctcaggggcctctgtgaccacgcagcccacagaattcaaaatcaagctttgagcaggggagtgaggcagccagaagtgggggcagaggagggtggctctgtttccccaaggcaaagcttatgaccaatgggccatcggactggagacccctgattgtgggaagggttgccagggataaagagcttcctcactggatgggacccgcctttctgtgttgtgttctgccctgtgctcttctctctacgttaacgtttcctgtagtatgtttcttcatctcatcgccaaggtaggcttgtgtttttcagtgtgtgcctccccgagcctcagccccaagctgatttcttatctggaaatggtacactgaattctctgggtggctttcttgtggccccatgggatgcagcgtgggggctgtctgaaggaccctgctttttccaggggccgaggggctgcctttcctttgtgtgtattaagcttttcaaacaatggaggggatggagagccctggtgtcctgacgggagccaggtcggcctgagagctgtgccgctcctctgtcttgtcagtggaggtgcctgggtggggagcaggtctcaggcctcttgtcctctccccagtggctccaggcctcactagtggcaagggcaggatgaggctgcaccgctgggaagagtctatctaagctcttggcttggagtcccgtgtcgtctccacccagaggaagttctccagagttcacctttcccttttccttgagttgtgctgaatgccccaccccagctctctttcccttctgggtgtctttgctgggagggggctgtgttgtgagccctcccggttctcacctcgcctggcacttaaccacaccctggttttgtgtagccgccagctctcttctggttgggcctttgaaaggctcagcctcccattgtgcagtgcttgggtttggagcttatttgaatggaagaggtcagtttgttcctggctctccatttctggcctcagttgtctacaggacagtggtcagggatgcctggaggcatatatccagctgccaccaaggggcactgtttgttcccacttatgtgagtgaccccatccatccatgaccagaggattattttcctgccttggcagaggaggaggagtcaagggagcagggcagctctaccaggcaaggtgtttccccagcataggcgcagacagttgggacgaaacttcagagcccaggcagtccctgaatgaccaggccagtgttgtcactgagtggtcccctgctggttgggagtgaagagaatccaggctggcagagctggagccagttggggagcacggttctgggagctctgcaaaatcagtagcaagtgctggaaaaggcacatgccgaagatactcaagagctcccaagatttgcttgaggctagcccagtgaaaaaaaccagagactcatgtttccaggggtcagtctgtcaggcaggaaggacccaggatttgaacccagcttcagtgtgcaggctctgaggctgcccaggacgggaaagtccaaggaaggggcctggtggtgctccacttgcagttctttaaagaatgctgctttttattctcctaaccctttcaagtgggtgcagacttctcgttagcagctggaagacattcctcccacacttttcccttcctggcccaagagagcatccagaaggcagtaggacctggtttttcaggtactgggagccgggggctcactgcttgcactgtgcttagggtagggatggtaaatatcctccctgcatggctttatcctccctctcatcccaaagcaggtatcttctggttgtcacagagtttcattgagtccagctgcagccacgtggccatctggagctggtgctataggtgaccatctggtacattgaggggacctgtttgcctcctccactctataagcagtcatcttgggagaccgggaggagaaggtggtgggctagtcctgtgtcctcctccacttcccatgcctctatgttacccatctgtgtctcctgtgcagaaggagaggaaggggcattaagagatgaagggtgattatgtattacttatccatttctgaataaacatttgttattccta

SEQ ID NO: 370808 - DNA, 3372 bp, Homo sapiens
cgagagttggtccgcggacgccggaagtagttcgtcgctccctagcggccgaaggggcgggctcgcggggtctcgactgctttcggcttgctcggcggagcaagatggcggacatctccctggacgaactcatcaggaagcgcggggcggcggcgaaaggacggcttaatgccagaccgggagttggaggtgtccgatctcgagttgggatccagcaaggccttctcagccagtcaacacgcacagccaccttccagcagagatttgatgcccggcagaagattggcctctcagatgcccggctcaaactgggagtcaaggatgcccgggagaagcttttgcagaaagatgcccgatttcgaatcaaagggaaagtgcaggatgccagagagatgttgaactctcgcaagcagcagaccacggtgccccagaagccccgccaggttgctgatgcccgggagaagatcagcttgaagaggagttcccctgctgccttcataaacccacccattgggacagtgacccctgctctgaagctcaccaaaaccatccaggttccacagcagaaagccatggcaccacttcatccccatcctgccggaatgagaatcaatgttgtcaataaccaccaggccaaacagaatttatatgacctggatgaagatgatgatggtatagcttccgttcctactaaacagatgaagtttgcagcctcaggcggctttctccaccacatggctgggctaagcagttccaagctttccatgtccaaggccctccctctcaccaaagtggttcagaatgatgcatacacagctcctgctctcccttcctctattcgaacaaaagccttgaccaacatgtcccggacactggtgaacaaggaagaaccccccaaagagctgccagctgctgagcctgttctcagcccattggaaggcaccaagatgactgtgaataatctgcaccctcgagtcactgaggaggacattgttgagcttttctgtgtgtgtggggccctcaagcgagctcgactggtccatcctggggtagcggaggtggtgtttgtgaaaaaggacgatgccatcaccgcatataagaagtacaacaaccggtgtctggacgcggctgagtgacagcccatcaatgaaaaaggagagcgagctgcctcgcagggtgaactctgcctcctcctccaacccccctgccgaagtggaccctgacaccatcctgaaggcactcttcaagtcctcaggggcctctgtgaccacgcagcccacagaattcaaaatcaagctttgagcaggggagtgaggcagccagaagtgggggcagaggagggtggctctgtttccccaaggcaaagcttatgaccaatgggccatcggactggagacccctgattgtgggaagggttgccagggataaagagcttcctcactggatgggacccgcctttctgtgttgtgttctgccctgtgctcttctctctacgttaacgtttcctgtagtatgtttcttcatctcatcgccaaggtaggcttgtgtttttcagtgtgtgcctccccgagcctcagccccaagctgatttcttatctggaaatggtacactgaattctctgggtggctttcttgtggccccatgggatgcagcgtgggggctgtctgaaggaccctgctttttccaggggccgaggggctgcctttcctttgtgtgtattaagcttttcaaacaatggaggggatggagagccctggtgtcctgacgggagccaggtcggcctgagagctgtgccgctcctctgtcttgtcagtggaggtgcctgggtggggagcaggtctcaggcctcttgtcctctccccagtggctccaggcctcactagtggcaagggcaggatgaggctgcaccgctgggaagagtctatctaagctcttggcttggagtcccgtgtcgtctccacccagaggaagttctccagagttcacctttcccttttccttgagttgtgctgaatgccccaccccagctctctttcccttctgggtgtctttgctgggagggggctgtgttgtgagccctcccggttctcacctcgcctggcacttaaccacaccctggttttgtgtagccgccagctctcttctggttgggcctttgaaaggctcagcctcccattgtgcagtgcttgggtttggagcttatttgaatggaagaggtcagtttgttcctggctctccatttctggcctcagttgtctacaggacagtggtcagggatgcctggaggcatatatccagctgccaccaaggggcactgtttgttcccacttatgtgagtgaccccatccatccatgaccagaggattattttcctgccttggcagaggaggaggagtcaagggagcagggcagctctaccaggcaaggtgtttccccagcataggcgcagacagttgggacgaaacttcagagcccaggcagtccctgaatgaccaggccagtgttgtcactgagtggtcccctgctggttgggagtgaagagaatccaggctggcagagctggagccagttggggagcacggttctgggagctctgcaaaatcagtagcaagtgctggaaaaggcacatgccgaagatactcaagagctcccaagatttgcttgaggctagcccagtgaaaaaaaccagagactcatgtttccaggggtcagtctgtcaggcaggaaggacccaggatttgaacccagcttcagtgtgcaggctctgaggctgcccaggacgggaaagtccaaggaaggggcctggtggtgctccacttgcagttctttaaagaatgctgctttttattctcctaaccctttcaagtgggtgcagacttctcgttagcagctggaagacattcctcccacacttttcccttcctggcccaagagagcatccagaaggcagtaggacctggtttttcaggtactgggagccgggggctcactgcttgcactgtgcttagggtagggatggtaaatatcctccctgcatggctttatcctccctctcatcccaaagcaggtatcttctggttgtcacagagtttcattgagtccagctgcagccacgtggccatctggagctggtgctataggtgaccatctggtacattgaggggacctgtttgcctcctccactctataagcagtcatcttgggagaccgggaggagaaggtggtgggctagtcctgtgtcctcctccacttcccatgcctctatgttacccatctgtgtctcctgtgcagaaggagaggaaggggcattaagagatgaagggtgattatgtattacttatccatttctgaataaacatttgttattccta

SEQ ID NO: 370809 - DNA, 4973 bp, Homo sapiens
  misc_feature (1686)..(1686): n is a, c, g, or t
  misc_feature (2128)..(2128): n is a, c, g, or t
  misc_feature (2228)..(2228): n is a, c, g, or t
cgagagttggtccgcggacgccggaagtagttcgtcgctccctagcggccgaaggggcgggctcgcggggtctcgactgctttcggcttgctcggcggagcaagatggcggacatctccctggacgaactcatcaggaagcgcggggcggcggcgaaaggacggcttaatgccagaccgggagttggaggtgtccgatctcgagttgggatccagcaaggccttctcagccagtcaacacgcacagccaccttccagcagagatttgatgcccggcagaagattggcctctcagatgcccggctcaaactgggagtcaaggatgcccgggagaagcttttgcagaaagatgcccgatttcgaatcaaagggaaagtgcaggatgccagagagatgttgaactctcgcaagcagcagaccacggtgccccagaagccccgccaggttgctgatgcccgggagaagatcagcttgaagaggagttcccctgctgccttcataaacccacccattgggacagtgacccctgctctgaagctcaccaaaaccatccaggttccacagcagaaagccatggcaccacttcatccccatcctgccggaatgagaatcaatgttgtcaataaccaccaggccaaacagaatttatatgacctggatgaagatgatgatggtatagcttccgttcctactaaacagatgaagtttgcagcctcaggcggctttctccaccacatggctgggctaagcagttccaagctttccatgtccaaggccctccctctcaccaaagtggttcagaatgatgcatacacagctcctgctctcccttcctctattcgaacaaaagccttgaccaacatgtcccggacactggtgaacaaggaagaaccccccaaagagctgccagctgctgagcctgttctcagcccattggaaggcaccaagatgactgtgaataatctgcaccctcgagtcactgaggaggacattgttgagcttttctgtgtgtgtggggccctcaagcgagctcgactggtccatcctggggtagcggaggtggtgtttgtgaaaaaggacgatgccatcaccgcatataagaagtacaacaaccggtgtctggacgggcagccgatgaagtgcaaccttcacatgaatgggaatgttatcacctcagaccagcccatcctgctgtgagttccaaaggcggggtgctggggagaggcagctccgtccatctctttttgttctaatgggtaaactgcctgcatcacagctccccttcatccccccattccgtttcctctgttctaatggcagctggccgtttcatatgcttaaacttgaccaaaatggtttgctttgttatttccccagggcttgaccctatagggactagcattatgatctcgttctcagctttctgatttagaaatatctgagtggaagttggagggggaggctgcttgggtctcctagctgtgtgcatcatcccgggaacagagaactccactgcatgattggctctgatggagacagtgccagatgctaccccttattttgttccccagtgaggttttttgtttgtttgtttgtttgttttttgctttttcagttattttgagagtctcactgtgttgcccaggttggtttcaaactcctggggtcaagcaaccctctcccctcngcctcctgaggacctgggactataggcgcacaccatcacgcccagctggatttggcttttaagtacagtgggaagccattgaaggcttttgttgcacacagctgagtatacatgcctggcccaggactgagggatgttttgaagcctgagatgcataaaatgttgagactgtgaggacttcaccttctagataaggaagcagataccagggaggaggttagacttgccagggtgagtgggatagtgtggggcagggctgaaatagactttgagatttaaaaagactaggatttgaaccctgggtaatgaattatgtgatttggataagttcttaaactgtgttcaaggaataagaaatatttcttagggttttgtaacctaataagtttgggaactactgggctaaacagagttacatctgtttcactttcgggcttctcanattgtgtaatatgctaatggatgttaccatccagaaggaacatgcagtgtttcctaaacttaaaaccacaattagccaggtgtggtggcatgcacctatngtcccagttacttggggggccgaggtgggaggatcgcttgagcctggaagatcgagactagtgagccatcatcatgccactgcacttcagcctgggtgacagagtgagattctgtctcaaaaaaaccccacaaaaccctagaacatacagcactgcctgcgtctccattttctcatcagtaaataagaaaaacacagcctgggccacatagcaagacctggtctctacaaaaaattttaaaaatgagccaggcatggtggtacacgcctgtagtcctagctccttaggaggctgtggcaggagaactgcttgagcctaggagatggaggctgatgtgagctgtgattgagtttgctgcgaggtggaatgagatgaaggggtatggaaagtgttacacccagtgcctagctcatgacagatgcccagtaaatggtgggtcccctccccatctaaggaaaaactgacaagaatttttgactcttctctgctctccacaggcggctgagtgacagcccatcaatgaaaaaggagagcgagctgcctcgcagggtgaactctgcctcctcctccaacccccctgccgaagtggaccctgacaccatcctgaaggcactcttcaagtcctcaggggcctctgtgaccacgcagcccacagaattcaaaatcaagctttgagcaggggagtgaggcagccagaagtgggggcagaggagggtggctctgtttccccaaggcaaagcttatgaccaatgggccatcggactggagacccctgattgtgggaagggttgccagggataaagagcttcctcactggatgggacccgcctttctgtgttgtgttctgccctgtgctcttctctctacgttaacgtttcctgtagtatgtttcttcatctcatcgccaaggtaggcttgtgtttttcagtgtgtgcctccccgagcctcagccccaagctgatttcttatctggaaatggtacactgaattctctgggtggctttcttgtggccccatgggatgcagcgtgggggctgtctgaaggaccctgctttttccaggggccgaggggctgcctttcctttgtgtgtattaagcttttcaaacaatggaggggatggagagccctggtgtcctgacgggagccaggtcggcctgagagctgtgccgctcctctgtcttgtcagtggaggtgcctgggtggggagcaggtctcaggcctcttgtcctctccccagtggctccaggcctcactagtggcaagggcaggatgaggctgcaccgctgggaagagtctatctaagctcttggcttggagtcccgtgtcgtctccacccagaggaagttctccagagttcacctttcccttttccttgagttgtgctgaatgccccaccccagctctctttcccttctgggtgtctttgctgggagggggctgtgttgtgagccctcccggttctcacctcgcctggcacttaaccacaccctggttttgtgtagccgccagctctcttctggttgggcctttgaaaggctcagcctcccattgtgcagtgcttgggtttggagcttatttgaatggaagaggtcagtttgttcctggctctccatttctggcctcagttgtctacaggacagtggtcagggatgcctggaggcatatatccagctgccaccaaggggcactgtttgttcccacttatgtgagtgaccccatccatccatgaccagaggattattttcctgccttggcagaggaggaggagtcaagggagcagggcagctctaccaggcaaggtgtttccccagcataggcgcagacagttgggacgaaacttcagagcccaggcagtccctgaatgaccaggccagtgttgtcactgagtggtcccctgctggttgggagtgaagagaatccaggctggcagagctggagccagttggggagcacggttctgggagctctgcaaaatcagtagcaagtgctggaaaaggcacatgccgaagatactcaagagctcccaagatttgcttgaggctagcccagtgaaaaaaaccagagactcatgtttccaggggtcagtctgtcaggcaggaaggacccaggatttgaacccagcttcagtgtgcaggctctgaggctgcccaggacgggaaagtccaaggaaggggcctggtggtgctccacttgcagttctttaaagaatgctgctttttattctcctaaccctttcaagtgggtgcagacttctcgttagcagctggaagacattcctcccacacttttcccttcctggcccaagagagcatccagaaggcagtaggacctggtttttcaggtactgggagccgggggctcactgcttgcactgtgcttagggtagggatggtaaatatcctccctgcatggctttatcctccctctcatcccaaagcaggtatcttctggttgtcacagagtttcattgagtccagctgcagccacgtggccatctggagctggtgctataggtgaccatctggtacattgaggggacctgtttgcctcctccactctataagcagtcatcttgggagaccgggaggagaaggtggtgggctagtcctgtgtcctcctccacttcccatgcctctatgttacccatctgtgtctcctgtgcagaaggagaggaaggggcattaagagatgaagggtgattatgtattacttatccatttctgaataaacatttgttattccta

SEQ ID NO: 370810 - DNA, 3507 bp, Homo sapiens
cgagagttggtccgcggacgccggaagtagttcgtcgctccctagcggccgaaggggcgggctcgcggggtctcgactgctttcggcttgctcggcggagcaagatggcggacatctccctggacgaactcatcaggaagcgcggggcggcggcgaaaggacggcttaatgccagaccgggagttggaggtgtccgatctcgagttgggatccagcaaggccttctcagccagtcaacacgcacagccaccttccagcagagatttgatgcccggcagaagattggcctctcagatgcccggctcaaactgggagtcaaggatgcccgggagaagcttttgcagaaagatgcccgatttcgaatcaaagggaaagtgcaggatgccagagagatgttgaactctcgcaagcagcagaccacggtgccccagaagccccgccaggttgctgatgcccgggagaagatcagcttgaagaggagttcccctgctgccttcataaacccacccattgggacagtgacccctgctctgaagctcaccaaaaccatccaggttccacagcagaaagccatggcaccacttcatccccatcctgccggaatgagaatcaatgttgtcaataaccaccaggccaaacagaatttatatgacctggatgaagatgatgatggtatagcttccgttcctactaaacagatgaagtttgcagcctcaggcggctttctccaccacatgggaccaggcctttccagtaattagactgctcaagtctgctatcaagggaactatcagcttgctcagggctgggctaagcagttccaagctttccatgtccaaggccctccctctcaccaaagtggttcagaatgatgcatacacagctcctgctctcccttcctctattcgaacaaaagccttgaccaacatgtcccggacactggtgaacaaggaagaaccccccaaagagctgccagctgctgagcctgttctcagcccattggaaggcaccaagatgactgtgaataatctgcaccctcgagtcactgaggaggacattgttgagcttttctgtgtgtgtggggccctcaagcgagctcgactggtccatcctggggtagcggaggtggtgtttgtgaaaaaggacgatgccatcaccgcatataagaagtacaacaaccggtgtctggacgggcagccgatgaagtgcaaccttcacatgaatgggaatgttatcacctcagaccagcccatcctgctgcggctgagtgacagcccatcaatgaaaaaggagagcgagctgcctcgcagggtgaactctgcctcctcctccaacccccctgccgaagtggaccctgacaccatcctgaaggcactcttcaagtcctcaggggcctctgtgaccacgcagcccacagaattcaaaatcaagctttgagcaggggagtgaggcagccagaagtgggggcagaggagggtggctctgtttccccaaggcaaagcttatgaccaatgggccatcggactggagacccctgattgtgggaagggttgccagggataaagagcttcctcactggatgggacccgcctttctgtgttgtgttctgccctgtgctcttctctctacgttaacgtttcctgtagtatgtttcttcatctcatcgccaaggtaggcttgtgtttttcagtgtgtgcctccccgagcctcagccccaagctgatttcttatctggaaatggtacactgaattctctgggtggctttcttgtggccccatgggatgcagcgtgggggctgtctgaaggaccctgctttttccaggggccgaggggctgcctttcctttgtgtgtattaagcttttcaaacaatggaggggatggagagccctggtgtcctgacgggagccaggtcggcctgagagctgtgccgctcctctgtcttgtcagtggaggtgcctgggtggggagcaggtctcaggcctcttgtcctctccccagtggctccaggcctcactagtggcaagggcaggatgaggctgcaccgctgggaagagtctatctaagctcttggcttggagtcccgtgtcgtctccacccagaggaagttctccagagttcacctttcccttttccttgagttgtgctgaatgccccaccccagctctctttcccttctgggtgtctttgctgggagggggctgtgttgtgagccctcccggttctcacctcgcctggcacttaaccacaccctggttttgtgtagccgccagctctcttctggttgggcctttgaaaggctcagcctcccattgtgcagtgcttgggtttggagcttatttgaatggaagaggtcagtttgttcctggctctccatttctggcctcagttgtctacaggacagtggtcagggatgcctggaggcatatatccagctgccaccaaggggcactgtttgttcccacttatgtgagtgaccccatccatccatgaccagaggattattttcctgccttggcagaggaggaggagtcaagggagcagggcagctctaccaggcaaggtgtttccccagcataggcgcagacagttgggacgaaacttcagagcccaggcagtccctgaatgaccaggccagtgttgtcactgagtggtcccctgctggttgggagtgaagagaatccaggctggcagagctggagccagttggggagcacggttctgggagctctgcaaaatcagtagcaagtgctggaaaaggcacatgccgaagatactcaagagctcccaagatttgcttgaggctagcccagtgaaaaaaaccagagactcatgtttccaggggtcagtctgtcaggcaggaaggacccaggatttgaacccagcttcagtgtgcaggctctgaggctgcccaggacgggaaagtccaaggaaggggcctggtggtgctccacttgcagttctttaaagaatgctgctttttattctcctaaccctttcaagtgggtgcagacttctcgttagcagctggaagacattcctcccacacttttcccttcctggcccaagagagcatccagaaggcagtaggacctggtttttcaggtactgggagccgggggctcactgcttgcactgtgcttagggtagggatggtaaatatcctccctgcatggctttatcctccctctcatcccaaagcaggtatcttctggttgtcacagagtttcattgagtccagctgcagccacgtggccatctggagctggtgctataggtgaccatctggtacattgaggggacctgtttgcctcctccactctataagcagtcatcttgggagaccgggaggagaaggtggtgggctagtcctgtgtcctcctccacttcccatgcctctatgttacccatctgtgtctcctgtgcagaaggagaggaaggggcattaagagatgaagggtgattatgtattacttatccatttctgaataaacatttgttattccta

SEQ ID NO: 370811 - DNA, 6850 bp, Homo sapiens
  misc_feature (1686)..(1686): n is a, c, g, or t
  misc_feature (2128)..(2128): n is a, c, g, or t
  misc_feature (2228)..(2228): n is a, c, g, or t
  misc_feature (5093)..(5093): n is a, c, g, or t
  misc_feature (5148)..(5148): n is a, c, g, or t
  misc_feature (5155)..(5155): n is a, c, g, or t
  misc_feature (5181)..(5181): n is a, c, g, or t
  misc_feature (5215)..(5215): n is a, c, g, or t
  misc_feature (5243)..(5243): n is a, c, g, or t
  misc_feature (5684)..(5684): n is a, c, g, or t
  misc_feature (5690)..(5690): n is a, c, g, or t
  misc_feature (5697)..(5698): n is a, c, g, or t
  misc_feature (6616)..(6616): n is a, c, g, or t
  misc_feature (6784)..(6784): n is a, c, g, or t
cgagagttggtccgcggacgccggaagtagttcgtcgctccctagcggccgaaggggcgggctcgcggggtctcgactgctttcggcttgctcggcggagcaagatggcggacatctccctggacgaactcatcaggaagcgcggggcggcggcgaaaggacggcttaatgccagaccgggagttggaggtgtccgatctcgagttgggatccagcaaggccttctcagccagtcaacacgcacagccaccttccagcagagatttgatgcccggcagaagattggcctctcagatgcccggctcaaactgggagtcaaggatgcccgggagaagcttttgcagaaagatgcccgatttcgaatcaaagggaaagtgcaggatgccagagagatgttgaactctcgcaagcagcagaccacggtgccccagaagccccgccaggttgctgatgcccgggagaagatcagcttgaagaggagttcccctgctgccttcataaacccacccattgggacagtgacccctgctctgaagctcaccaaaaccatccaggttccacagcagaaagccatggcaccacttcatccccatcctgccggaatgagaatcaatgttgtcaataaccaccaggccaaacagaatttatatgacctggatgaagatgatgatggtatagcttccgttcctactaaacagatgaagtttgcagcctcaggcggctttctccaccacatggctgggctaagcagttccaagctttccatgtccaaggccctccctctcaccaaagtggttcagaatgatgcatacacagctcctgctctcccttcctctattcgaacaaaagccttgaccaacatgtcccggacactggtgaacaaggaagaaccccccaaagagctgccagctgctgagcctgttctcagcccattggaaggcaccaagatgactgtgaataatctgcaccctcgagtcactgaggaggacattgttgagcttttctgtgtgtgtggggccctcaagcgagctcgactggtccatcctggggtagcggaggtggtgtttgtgaaaaaggacgatgccatcaccgcatataagaagtacaacaaccggtgtctggacgggcagccgatgaagtgcaaccttcacatgaatgggaatgttatcacctcagaccagcccatcctgctgtgagttccaaaggcggggtgctggggagaggcagctccgtccatctctttttgttctaatgggtaaactgcctgcatcacagctccccttcatccccccattccgtttcctctgttctaatggcagctggccgtttcatatgcttaaacttgaccaaaatggtttgctttgttatttccccagggcttgaccctatagggactagcattatgatctcgttctcagctttctgatttagaaatatctgagtggaagttggagggggaggctgcttgggtctcctagctgtgtgcatcatcccgggaacagagaactccactgcatgattggctctgatggagacagtgccagatgctaccccttattttgttccccagtgaggttttttgtttgtttgtttgtttgttttttgctttttcagttattttgagagtctcactgtgttgcccaggttggtttcaaactcctggggtcaagcaaccctctcccctcngcctcctgaggacctgggactataggcgcacaccatcacgcccagctggatttggcttttaagtacagtgggaagccattgaaggcttttgttgcacacagctgagtatacatgcctggcccaggactgagggatgttttgaagcctgagatgcataaaatgttgagactgtgaggacttcaccttctagataaggaagcagataccagggaggaggttagacttgccagggtgagtgggatagtgtggggcagggctgaaatagactttgagatttaaaaagactaggatttgaaccctgggtaatgaattatgtgatttggataagttcttaaactgtgttcaaggaataagaaatatttcttagggttttgtaacctaataagtttgggaactactgggctaaacagagttacatctgtttcactttcgggcttctcanattgtgtaatatgctaatggatgttaccatccagaaggaacatgcagtgtttcctaaacttaaaaccacaattagccaggtgtggtggcatgcacctatngtcccagttacttggggggccgaggtgggaggatcgcttgagcctggaagatcgagactagtgagccatcatcatgccactgcacttcagcctgggtgacagagtgagattctgtctcaaaaaaaccccacaaaaccctagaacatacagcactgcctgcgtctccattttctcatcagtaaataagaaaaacacagcctgggccacatagcaagacctggtctctacaaaaaattttaaaaatgagccaggcatggtggtacacgcctgtagtcctagctccttaggaggctgtggcaggagaactgcttgagcctaggagatggaggctgatgtgagctgtgattgagtttgctgcgaggtggaatgagatgaaggggtatggaaagtgttacacccagtgcctagctcatgacagatgcccagtaaatggtgggtcccctccccatctaaggaaaaactgacaagaatttttgactcttctctgctctccacaggcggctgagtgacagcccatcaatgaaaaaggagagcgagctgcctcgcagggtgaactctgcctcctcctccaacccccctgccgaagtggaccctgacaccatcctgaaggcactcttcaagtcctcaggggcctctgtgaccacgcagcccacagaattcaaaatcaagctttgagcaggggagtgaggcagccagaagtgggggcagaggagggtggctctgtttccccaaggcaaagcttatgaccaatgggccatcggactggagacccctgattgtgggaagggttgccagggataaagagcttcctcactggatgggacccgcctttctgtgttgtgttctgccctgtgctcttctctctacgttaacgtttcctgtagtatgtttcttcatctcatcgccaaggtaggcttgtgtttttcagtgtgtgcctccccgagcctcagccccaagctgatttcttatctggaaatggtacactgaattctctgggtggctttcttgtggccccatgggatgcagcgtgggggctgtctgaaggaccctgctttttccaggggccgaggggctgcctttcctttgtgtgtattaagcttttcaaacaatggaggggatggagagccctggtgtcctgacgggagccaggtcggcctgagagctgtgccgctcctctgtcttgtcagtggaggtgcctgggtggggagcaggtctcaggcctcttgtcctctccccagtggctccaggcctcactagtggcaagggcaggatgaggctgcaccgctgggaagagtctatctaagctcttggcttggagtcccgtgtcgtctccacccagaggaagttctccagagttcacctttcccttttccttgagttgtgctgaatgccccaccccagctctctttcccttctgggtgtctttgctgggagggggctgtgttgtgagccctcccggttctcacctcgcctggcacttaaccacaccctggttttgtgtagccgccagctctcttctggttgggcctttgaaaggctcagcctcccattgtgcagtgcttgggtttggagcttatttgaatggaagaggtcagtttgttcctggctctccatttctggcctcagttgtctacaggacagtggtcagggatgcctggaggcatatatccagctgccaccaaggggcactgtttgttcccacttatgtgagtgaccccatccatccatgaccagaggattattttcctgccttggcagaggaggaggagtcaagggagcagggcagctctaccaggcaaggtgtttccccagcataggcgcagacagttgggacgaaacttcagagcccaggcagtccctgaatgaccaggccagtgttgtcactgagtggtcccctgctggttgggagtgaagagaatccaggctggcagagctggagccagttggggagcacggttctgggagctctgcaaaatcagtagcaagtgctggaaaaggcacatgccgaagatactcaagagctcccaagatttgcttgaggctagcccagtgaaaaaaaccagagactcatgtttccaggggtcagtctgtcaggcaggaaggacccaggatttgaacccagcttcagtgtgcaggctctgaggctgcccaggacgggaaagtccaaggaaggggcctggtggtgctccacttgcagttctttaaagaatgctgctttttattctcctaaccctttcaagtgggtgcagacttctcgttagcagctggaagacattcctcccacacttttcccttcctggcccaagagagcatccagaaggcagtaggacctggtttttcaggtactgggagccgggggctcactgcttgcactgtgcttagggtagggatggtaaatatcctccctgcatggctttatcctccctctcatcccaaagcaggtatcttctggttgtcacagagtttcattgagtccagctgcagccacgtggccatctggagctggtgctataggtgaccatctggtacattgaggggacctgtttgcctcctccactctataagcagtcatcttgggagaccgggaggagaaggtggtgggctagtcctgtgtcctcctccacttcccatgcctctatgttacccatctgtgtctcctgtgcagaaggagaggaaggggcattaagagatgaagggtgattatgtattacttatccatttctgaataaacatttgttattcctacctttgagttatcttttttttttttttttttttttgagacaaagtctcactctgttgccaaggctggagtgcagtggcactatctcagctcactgcaacctccgcagccagactcaagtnatcctcccacctcagcctcccaattagctgggactgcaggcgtgcatcaccatgnctggctnatttttgtagagatgaggtttcaccntgttgcacaagctggtcttgaaatcctgacctcnggtggtctgcctgcctcggcctcccaangttggaattaacaggcgtgagccaccacgcccagccaagggttttaatcttgcagggatttcaacatttggggtggaacttaattatttaaaaaatagagacagattcttgctatgatacccaggatggtcttgaactcctgggcacaagtgatcctcctgcttcagcctctcaaagtgttggagttacaggcatgagccactgctccccaccagggatgcaaattacttgatactcctctccagaaggtggggtcctgtgcccctcctgaacccaagtgtgctctgttactactttgaccagatgtgactctgccatttctgtgcctaggcttttaaagatggtcacttctccatttcctgtgcctggaacattctctgggagccttgacaccacatttgaagttgcctattggggccagcatggtggctcacgcctgtnatcccngcacttnngaaggccgaggcaggcagatcgcatgaaatcaggagtttgagaccagcctaaccaacgtggtaaaaccctgtctctactaaaaattacaaaaattagaggggcgcggtggtgggcgcttgtaatcccagctattcaggaggctgaggcaggagaatcacttgaacccgggaggcggagtttgcagtgaggtgaaatcacgccactgcactccagcctgtgcaacagagcgaggctctgtctcaaaagaaaaaaaatagttgactgtcggtttggcatggtggctcatgcctcttgtcccagcactttgggatgctgaggcaggaagattactggagctcaggagttcgagaccagcttgggcaatatagtgaagccctatctttacaaaaaacgaaaaattagctactcaggagcctgaaatggaggatcatttgtgcccaggaggcagaggtcgcagtgagctgtgatcatgccactatactccatcctgggcaacacagtgagacggcagaaaaaaaaaaatagttgactattgagtctcatatctgattgcccacctgacatctcccctgagtggcctaatgggcatctcaccacggcccacagagaactgatctactcgattttccctaagctggcccctctcctgcagtctacccatgtcagtcaatggcaacaccatcctcttagttgctcagactgaaaagctagcagccatcctggatttctctcacactgcctattcaacgtgtgaatgcatgagtggaaagctgagttcgcactcgtgactggccggggtcgactctgacattcactcccactttggcgcgctgatttgcctctgagcggatgaaggttgagccatggcgggcggggccggggaggcgggcttggagcgagggggcggggcaggcgcnacaaaaacgcgctcgcgccggcgccgaaccgcaactcccggcgacccccgcgctcccgggtggcaagatggtggcgcgcaggacgaagctcgcggcgcgggacccggaggacggtatcccgagcccaccgtgctacgcaggtgaggggatccggaacgcgagaccggnggcggccagcatcgccgggaggtgtttgggggctggcggcggccgggggtccccaggagcggccgc

SEQ ID NO: 370812 - DNA, 3825 bp, Homo sapiens
cgagagttggtccgcggacgccggaagtagttcgtcgctccctagcggccgaaggggcgggctcgcggggtctcgactgctttcggcttgctcggcggagcaagatggcggacatctccctggacgaactcatcaggaagcgcggggcggcggcgaaaggacggcttaatgccagaccgggagttggaggtgtccgatctcgagttgggatccagcaaggccttctcagccagtcaacacgcacagccaccttccagcagagatttgatgcccggcagaagattggcctctcagatgcccggctcaaactgggagtcaaggatgcccgggagaagcttttgcagaaagatgcccgatttcgaatcaaagggaaagtgcaggatgccagagagatgttgaactctcgcaagcagcagaccacggtgccccagaagccccgccaggttgctgatgcccgggagaagatcagcttgaagaggagttcccctgctgccttcataaacccacccattgggacagtgacccctgctctgaagctcaccaaaaccatccaggttccacagcagaaagccatggcaccacttcatccccatcctgccggaatgagaatcaatgttgtcaataaccaccaggccaaacagaatttatatgacctggatgaagatgatgatggtatagcttccgttcctactaaacagatgaagtttgcagcctcaggcggctttctccaccacatggctgggctaagcagttccaagctttccatgtccaaggccctccctctcaccaaagtggttcagaatgatgcatacacagctcctgctctcccttcctctattcgaacaaaagccttgaccaacatgtcccggacactggtgaacaaggaagaaccccccaaagagctgccagctgctgagcctgttctcagcccattggaaggcaccaagatgactgtgaataatctgcaccctcgagtcactgaggaggacattgttgagcttttctgtgtgtgtggggccctcaagcgagctcgactggtccatcctggggtagcggaggtggtgtttgtgaaaaaggacgatgccatcaccgcatataagaagtacaacaaccggtgtctggacgggcagccgatgaagtgcaaccttcacatgaatgggaatgttatcacctcagaccagcccatcctgctgcggctgagtgacagcccatcaatgaaaaaggagagcgagctgcctcgcagggtgaactctgcctcctcctccaacccccctgccgaagtggaccctgacaccatcctgaaggcactcttcaagtcctcaggggcctctgtgaccacgcagcccacagaattcaaaatcaagctttgagcaggggagtgaggcagccagaagtgggggcagaggagggtggctctgtttccccaaggcaaagcttatgaccaatgggccatcggactggagacccctgattgtgggaagggttgccagggataaagagcttcctcactggatgggacccgcctttctgtgttgtgttctgccctgtgctcttctctctacgttaacgtttcctgtagtatgtttcttcatctcatcgccaaggtaggcttgtgtttttcagtgtgtgcctccccgagcctcagccccaagctgatttcttatctggaaatggtacactgaattctctgggtggctttcttgtggccccatgggatgcagcgtgggggctgtctgaaggaccctgctttttccaggggccgaggggctgcctttcctttgtgtgtattaagcttttcaaacaatggaggggatggagagccctggtgtcctgacgggagccaggtcggcctgagagctgtgccgctcctctgtcttgtcagtggaggtgcctgggtggggagcaggtctcaggcctcttgtcctctccccagtggctccaggcctcactagtggcaagggcaggatgaggctgcaccgctgggaagagtctatctaagctcttggcttggagtcccgtgtcgtctccacccagaggaagttctccagagttcacctttcccttttccttgagttgtgctgaatgccccaccccagctctctttcccttctgggtgtctttgctgggagggggctgtgttgtgagccctcccggttctcacctcgcctggcacttaaccacaccctggttttgtgtagccgccagctctcttctggttgggcctttgaaaggctcagcctcccattgtgcagtgcttgggtttggagcttatttgaatggaagaggtcagtttgttcctggctctccatttctggcctcagttgtctacaggacagtggtcagggatgcctggaggcatatatccagctgccaccaaggggcactgtttgttcccacttatgtgagtgaccccatccatccatgaccagaggattattttcctgccttggcagaggaggaggagtcaagggagcagggcagctctaccaggcaaggtgtttccccagcataggcgcagacagttgggacgaaacttcagagcccaggcagtccctgaatgaccaggccagtgttgtcactgagtggtcccctgctggttgggagtgaagagaatccaggctggcagagctggagccagttggggagcacggttctgggagctctgcaaaatcagtagcaagtgctggaaaaggcacatgccgaagatactcaagagctcccaagatttgcttgaggctagcccagtgaaaaaaaccagagactcatgtttccaggggtcagtctgtcaggcaggaaggacccaggatttgaacccagcttcagtgtgcaggctctgaggctgcccaggacgggaaagtccaaggaaggggcctggtggtgctccacttgcagttctttaaagaatgctgctttttattctcctaaccctttcaagtgggtgcagacttctcgttagcagctggaagacattcctcccacacttttcccttcctggcccaagagagcatccagaaggcagtaggacctggtttttcaggtactgggagccgggggctcactgcttgcactgtgcttagggtagggatggtaaatatcctccctgcatggctttatcctccctctcatcccaaagcaggtatcttctggttgtcacagagtttcattgagtccagctgcagccacgtggccatctggagctggtgctataggtgaccatctggtacattgaggggacctgtttgcctcctccactctataagcagtcatcttgggagaccgggaggagaaggtggtgggctagtcctgtgtcctcctccacttcccatgcctctatgttacccatctgtgtctcctgtgcagaaggagaggaaggggcattaagagatgaagggtgattatgtattacttatccatttctgaataaacatttgttattcctaaaaaaaaaaaaaaaaaaaaaaaaaaaaaaaaaaaaaaaaaaaaaaaaaaaaaaaaaaaaaaaaaaaaaagaaaaaaaaagaaaaaaaaacgagagaagggaggagaagaaaaagagaaaaaaggggggggggggcccaaagacccaccgcaggcggggtcgttcacaaaggggccgcccccatatagtgtggaaagaggagagcgagcgccagcagcggtagggagcgtaatatataaaaagcagcgcgcggccgggtggacaagacaacaagcgtgagggctgaaggacgaaaaaaactcgctaagttgtgtgtaggaggcaacaaacaacacactcgtagggcgacgacacaacaagttgtggggcgcacagcgcgcgaaacg

SEQ ID NO: 370813 - DNA, 3159 bp, Homo sapiens
cgagagttggtccgcggacgccggaagtagttcgtcgctccctagcggccgaaggggcgggctcgcggggtctcgactgctttcggcttgctcggcggagcaagatggcggacatctccctggacgaactcatcaggaagcgcggggcggcggcgaaaggacggcttaatgccagaccgggagttggaggtgtccgatctcgagttgggatccagcaaggccttctcagccagtcaacacgcacagccaccttccagcagagatttgatgcccggcagaagattggcctctcagatgcccggctcaaactgggagtcaaggatgcccgggagaagcttttgcagaaagatgcccgatttcgaatcaaagggaaagtgcaggatgccagagagatgttgaactctcgcaagcagcagaccacggtgccccagaagccccgccaggttgctgatgcccgggagaagatcagcttgaagaggagttcccctgctgccttcataaacccacccattgggacagtgacccctgctctgaagctcaccaaaaccatccaggttccacagcagaaagccatggcaccacttcatccccatcctgccggaatgagaatcaatgttgtcaataaccaccaggccaaacagaatttatatgacctggatgaagatgatgatggtatagcttccgttcctactaaacagatgaagtttgcagcctcaggcggctttctccaccacatggctgggctaagcagttccaagctttccatgtccaaggccctccctctcaccaaagtggttcagaatgatgcatacacagctcctgctctcccttcctctattcgaacaaaagccttgaccaacatgtcccggacactggtgaacaaggaagaaccccccaaagagctgccagctgctgagcctgttctcagcccattggaaggcaccaagatgactgtgaataatctgcaccctcgagtcactgaggaggacattgttgagcttttctgtgtgtgtggggccctcaagcgagctcgactggtccatcctggggtagcggaggtggtgtttgtgaaaaaggacgatgccatcaccgcatataagaagtacaacaaccggtgtctggacgggcagccgatgaagtgcaaccttcacatgaatgggaatgttatcacctcagaccagcccatcctgctgcggctgagtgacagcccatcaatgaaaaaggagagcgagctgcctcgcagggtgaactctgcctcctcctccaacccccctgccgaagtggaccctgacaccatcctgaaggcactcttcaagtcctcaggggcctctgtgaccacgcagcccacagaattcaaaatcaagctttgagcaggggagtgaggcagccagaagtgggggcagaggagggtggctctgtttccccaaggcaaagcttatgaccaatgggccatcggactggagacccctgattgtgggaagggttgccagggataaagagcttcctcactggatgggacccgcctttctgtgttgtgttctgccctgtgctcttctctctacgttaacgtttcctgtagtatgtttcttcatctcatcgccaaggtaggcttgtgtttttcagtgtgtgcctccccgagcctcagccccaagctgatttcttatctggaaatggtacactgaattctctgggtggctttcttgtggccccatgggatgcagcgtgggggctgtctgaaggaccctgctttttccaggggccgaggggctgcctttcctttgtgtgtattaagcttttcaaacaatggaggggatggagagccctggtgtcctgacgggagccaggtcggcctgagagctgtgccgctcctctgtcttgtcagtggaggtgcctgggtggggagcaggtctcaggcctcttgtcctctccccagtggctccaggcctcactagtggcaagggcaggatgaggctgcaccgctgggaagagtctatctaagctcttggcttggagtcccgtgtcgtctccacccagaggaagttctccagagttcacctttcccttttccttgagttgtgctgaatgccccaccccagctctctttcccttctgggtgtctttgctgggagggggctgtgttgtgagccctcccggttctcacctcgcctggcacttaaccacaccctggttttgtgtagccgccagctctcttctggttgggcctttgaaaggctcagcctcccattgtgcagtgcttgggtttggagcttatttgaatgaccaggccagtgttgtcactgagtggtcccctgctggttgggagtgaagagaatccaggctggcagagctggagccagttggggagcacggttctgggagctctgcaaaatcagtagcaagtgctggaaaaggcacatgccgaagatactcaagagctcccaagatttgcttgaggctagcccagtgaaaaaaaccagagactcatgtttccaggggtcagtctgtcaggcaggaaggacccaggatttgaacccagcttcagtgtgcaggctctgaggctgcccaggacgggaaagtccaaggaaggggcctggtggtgctccacttgcagttctttaaagaatgctgctttttattctcctaaccctttcaagtgggtgcagacttctcgttagcagctggaagacattcctcccacacttttcccttcctggcccaagagagcatccagaaggcagtaggacctggtttttcaggtactgggagccgggggctcactgcttgcactgtgcttagggtagggatggtaaatatcctccctgcatggctttatcctccctctcatcccaaagcaggtatcttctggttgtcacagagtttcattgagtccagctgcagccacgtggccatctggagctggtgctataggtgaccatctggtacattgaggggacctgtttgcctcctccactctataagcagtcatcttgggagaccgggaggagaaggtggtgggctagtcctgtgtcctcctccacttcccatgcctctatgttacccatctgtgtctcctgtgcagaaggagaggaaggggcattaagagatgaagggtgattatgtattacttatccatttctgaataaacatttgttattccta

SEQ ID NO: 370814 - DNA, 3373 bp, Homo sapiens
cgagagttggtccgcggacgccggaagtagttcgtcgctccctagcggccgaaggggcgggctcgcggggtctcgactgctttcggcttgctcggcggagcaagatggcggacatctccctggacgaactcatcaggaagcgcggggcggcggcgaaaggacggcttaatgccagaccgggagttggaggtgtccgatctcgagttgggatccagcaaggccttctcagccagtcaacacgcacagccaccttccagcagagatttgatgcccggcagaagattggcctctcagatgcccggctcaaactgggagtcaaggatgcccgggagaagcttttgcagaaagatgcccgatttcgaatcaaagggaaagtgcaggatgccagagagatgttgaactctcgcaagcagcagaccacggtgccccagaagccccgccaggttgctgatgcccgggagaagatcagcttgaagaggagttcccctgctgccttcataaacccacccattgggacagtgacccctgctctgaagctcaccaaaaccatccaggttccacagcagaaagccatggcaccacttcatccccatcctgccggaatgagaatcaatgttgtcaataaccaccaggccaaacagaatttatatgacctggatgaagatgatgatggtatagcttccgttcctactaaacagatgaagtttgcagcctcaggcggctttctccaccacatggctgggctaagcagttccaagctttccatgtccaaggccctccctctcaccaaagtggttcagaatgatgcatacacagctcctgctctcccttcctctattcgaacaaaagccttgaccaacatgtcccggacactggtgaacaaggaagaaccccccaaagagctgccagctgctgagcctgttctcagcccattggaaggcaccaagatgactgtgaataatctgcaccctcgagtcactgaggaggacattgttgagcttttctgtgtgtgtggggccctcaagcgagctcgactggtccatcctggggtagcggaggtggtgtttgtgaaaaaggacgatgccatcaccgcatataagaagtacaacaaccggtgtctggacgggcagccgatgaagtgcaaccttcacatgaatgggaatgttatcacctcagaccagcccatcctgctgcggctgagtgacagcccatcaatgaaaaaggagagcgagctgcctcgcagggtgaactctgcctcctcctccaacccccctgccgaagtggaccctgacaccatcctgaaggcactcttcaagtcctcaggggcctctgtgaccacgcagcccacagaattcaaaatcaagctttgagcaggggagtgaggcagccagaagtgggggcagaggagggtggctctgtttccccaaggcaaagcttatgaccaatgggccatcggactggagacccctgattgtgggaagggttgccagggataaagagcttcctcactggatgggacccgcctttctgtgttgtgttctgccctgtgctcttctctctacgttaacgtttcctgtagtatgtttcttcatctcatcgccaaggtaggcttgtgtttttcagtgtgtgcctccccgagcctcagccccaagctgatttcttatctggaaatggtacactgaattctctgggtggctttcttgtggccccatgggatgcagcgtgggggctgtctgaaggaccctgctttttccaggggccgaggggctgcctttcctttgtgtgtattaagcttttcaaacaatggaggggatggagagccctggtgtcctgacgggagccaggtcggcctgagagctgtgccgctcctctgtcttgtcagtggaggtgcctgggtggggagcaggtctcaggcctcttgtcctctccccagtggctccaggcctcactagtggcaagggcaggatgaggctgcaccgctgggaagagtctatctaagctcttggcttggagtcccgtgtcgtctccacccagaggaagttctccagagttcacctttcccttttccttgagttgtgctgaatgccccaccccagctctctttcccttctgggtgtctttgctgggagggggctgtgttgtgagccctcccggttctcacctcgcctggcacttaaccacaccctggttttgtgtagccgccagctctcttctggttgggcctttgaaaggctcagcctcccattgtgcagtgcttgggtttggagcttatttgaatggaagaggtcagtttgttcctggctctccatttctggcctcagttgtctacaggacagtggtcagggatgcctggaggcatatatccagctgccaccaaggggcactgtttgttcccacttatgtgagtgaccccatccatccatgaccagaggattattttcctgccttggcagaggaggaggagtcaagggagcagggcagctctaccaggcaaggtgtttccccagcataggcgcagacagttgggacgaaacttcagagcccaggcagtccctgaatgaccaggccagtgttgtcactgagtggtcccctgctggttgggagtgaagagaatccaggctggcagagctggagccagttggggagcacggttctgggagctctgcaaaatcagtagcaagtgctggaaaaggcacatgccgaagatactcaagagctcccaagatttgcttgaggctagcccagtgaaaaaaaccagagactcatgtttccaggggtcagtctgtcaggcaggaaggacccaggatttgaacccagcttcagtgtgcaggctctgaggctgcccaggacgggaaagtccaaggaaggggcctggtggtgctccacttgcagttctttaaagaatgctgctttttattctcctaaccctttcaagtgggtgcagacttctcgttagcagctggaagacattcctcccacacttttcccttcctggcccaagagagcatccagaaggcagtaggacctggtttttcaggtactgggagccgggggctcactgcttgcactgtgcttagggtagggatggtaaatatcctccctgcatggctttatcctccctctcatcccaaagcaggtatcttctggttgtcacagagtttcattgagtccagctgcagccacgtggccatctggagctggtgctataggtgaccatctggtacattgaggggacctgtttgcctcctccacttcccatgcctctatgttacccatctgtgtctcctgtgcagaaggagaggaaggggcattaagagatgaagggtgattatgtattacttatccatttctgaataaacatttgttattccta

SEQ ID NO: 370815 - DNA, 3288 bp, Homo sapiens
cgagagttggtccgcggacgccggaagtagttcgtcgctccctagcggccgaaggggcgggctcgcggggtctcgactgctttcggcttgctcggcggagcaagatggcggacatctccctggacgaactcatcaggaagcgcggggcggcggcgaaaggacggcttaatgccagaccgggagttggaggtgtccgatctcgagttgggatccagcaaggccttctcagccagtcaacacgcacagccaccttccagcagagatttgatgcccggcagaagattggcctctcagatgcccggctcaaactgggagtcaaggatgcccgggagaagcttttgcagaaagatgcccgatttcgaatcaaagggaaagtgcaggatgccagagagatgttgaactctcgcaagcagcagaccacggtgccccagaagccccgccaggttgctgatgcccgggagaagatcagcttgaagaggagttcccctgctgccttcataaacccacccattgggacagtgacccctgctctgaagctcaccaaaaccatccaggttccacagcagaaagccatggcaccacttcatccccatcctgccggaatgagaatcaatgttgtcaataaccaccaggccaaacagaatttatatgacctggatgaagatgatgatggtatagcttccgttcctactaaacagatgaagtttgcagcctcaggcggctttctccaccacatggctgggctaagcagttccaagctttccatgtccaaggccctccctctcaccaaagtggttcagaatgatgcatacacagctcctgctctcccttcctctattcgaacaaaagccttgaccaacatgtcccggacactggtgaacaaggaagaaccccccaaagagctgccagctgctgagcctgttctcagcccattggaaggcaccaagatgactgtgaataatctgcaccctcgagtcactgaggaggacattgttgagcttttctgtgtgtgtggggccctcaagcgagctcgactggtccatcctggggtagcggaggtggtgtttgtgaaaaaggacgatgccatcaccgcatataagaagtacaacaaccggtgtctggacgggcagccgatgaagtgcaaccttcacatgaatgggaatgttatcacctcagaccagcccatcctgctgcggctgagtgacagcccatcaatgaaaaaggagagcgagctgcctcgcagggtgaactctgcctcctcctccaacccccctgccgaagtggaccctgacaccatcctgaaggcactcttcaagtcctcaggggcctctgtgaccacgcagcccacagaattcaaaatcaagctttgagcaggggagtgaggcagccagaagtgggggcagaggagggtggctctgtttccccaaggcaaagcttatgaccaatgggccatcggactggagacccctgattgtgggaagggttgccagggataaagagcttcctcactggatgggacccgcctttctgtgttgtgttctgccctgtgctcttctctctacgttaacgtttcctgtagtatgtttcttcatctcatcgccaaggtaggcttgtgtttttcagtgtgtgcctccccgagcctcagccccaagctgatttcttatctggaaatggtacactgaattctctgggtggctttcttgtggccccatgggatgcagcgtgggggctgtctgaaggaccctgctttttccaggggccgaggggctgcctttcctttgtgtgtattaagcttttcaaacaatggaggggatggagagccctggtgtcctgacgggagccaggtcggcctgagagctgtgccgctcctctgtcttgtcagtggaggtgcctgggtggggagcaggtctcaggcctcttgtcctctccccagtggctccaggcctcactagtggcaagggcaggatgaggctgcaccgctgggaagagtctatctaagctcttggcttggagtcccgtgtcgtctccacccagaggaagttctccagagttcacctttcccttttccttgagttgtgctgaatgccccaccccagctctctttcccttctgggtgtctttgctgggagggggctgtgttgtgagccctcccggttctcacctcgcctggcacttaaccacaccctggttttgtgtagccgccagctctcttctggttgggcctttgaaaggctcagcctcccattgtgcagtgcttgggtttggagcttatttgaatggaagaggtcagtttgttcctggctctccatttctggcctcagttgtctacaggacagtggtcagggatgcctggaggcatatatccagctgccaccaaggggcactgtttgttcccacttatgtgagtgaccccatccatccatgaccagaggattattttcctgccttggcagaggaggaggagtcaagggagcagggcagctctaccaggcaaggtgtttccccagcataggcgcagacagttgggacgaaacttcagagcccaggcagtccctgaatgaccaggccagtgttgtcactgagtggtcccctgctggttgggagtgaagagaatccaggctggcagagctggagccagttggggagcacggttctgggagctctgcaaaatcagtagcaagtgctggaaaaggcacatgccgaagatactcaagagctcccaagatttgcttgaggctagcccagtgaaaaaaaccagagactcatgtttccaggggtcagtctgtcaggcaggaaggacccaggatttgaacccagcttcagtgtgcaggctctgaggctgcccaggacgggaaagtccaaggaaggggcctggtggtgctccacttgcagttctttaaagaatgctgctttttattctcctaaccctttcaagtgggtgcagacttctcgttagcagctggaagacattcctcccacacttttcccttcctggttgtcacagagtttcattgagtccagctgcagccacgtggccatctggagctggtgctataggtgaccatctggtacattgaggggacctgtttgcctcctccactctataagcagtcatcttgggagaccgggaggagaaggtggtgggctagtcctgtgtcctcctccacttcccatgcctctatgttacccatctgtgtctcctgtgcagaaggagaggaaggggcattaagagatgaagggtgattatgtattacttatccatttctgaataaacatttgttattccta

SEQ ID NO: 370816 - DNA, 1871 bp, Homo sapiens
cttaccggttcgcatgtgtcccatctcattgccaaggtagcttgtgttgttcagtgtgtgcctccccgagcctcagccccaagctgatttcttatctggaaatggtacactgaattctctgggtggctttcttgtggccccatgggatgcagcgtgggggctgtctgaaggaccctgctttttccaggggccgaggggctgcctttcctttgtgtgtattaagcttttcaaacaatggaggggatggagagccctggtgtcctgacgggagccaggtcggcctgagagctgtgccgctcctctgtcttgtcagtggaggtgcctgggtggggagcaggtctcaggcctcttgtcctctccccagtggctccaggcctcactagtggcaagggcaggatgaggctgcaccgctgggaagagtctatctaagctcttggcttggagtcccgtgtcgtctccacccagaggaagttctccagagttcacctttcccttttccttgagttgtgctgaatgccccaccccagctctctttcccttctgggtgtctttgctgggagggggctgtgttgtgagccctcccggttctcacctcgcctggcacttaaccacaccctggttttgtgtagccgccagctctcttctggttgggcctttgaaaggctcagcctcccattgtgcagtgcttgggtttggagcttatttgaatggaagaggtcagtttgttcctggctctccatttctggcctcagttgtctacaggacagtggtcagggatgcctggaggcatatatccagctgccaccaaggggcactgtttgttcccacttatgtgagtgaccccatccatccatgaccagaggattattttcctgccttggcagaggaggaggagtcaagggagcagggcagctctaccaggcaaggtgtttccccagcataggcgcagacagttgggacgaaacttcagagcccaggcagtccctgaatgaccaggccagtgttgtcactgagtggtcccctgctggttgggagtgaagagaatccaggctggcagagctggagccagttggggagcacggttctgggagctctgcaaaatcagtagcaagtgctggaaaaggcacatgccgaagatactcaagagctcccaagatttgcttgaggctagcccagtgaaaaaaaccagagactcatgtttccaggggtcagtctgtcaggcaggaaggacccaggatttgaacccagcttcagtgtgcaggctctgaggctgcccaggacgggaaagtccaaggaaggggcctggtggtgctccacttgcagttctttaaagaatgctgctttttattctcctaaccctttcaagtgggtgcagacttctcgttagcagctggaagacattcctcccacacttttcccttcctggcccaagagagcatccagaaggcagtaggacctggtttttcaggtactgggagccgggggctcactgcttgcactgtgcttagggtagggatggtaaatatcctccctgcatggctttatcctccctctcatcccaaagcaggtatcttctggttgtcacagagtttcattgagtccagctgcagccacgtggccatctggagctggtgctataggtgaccatctggtacattgaggggacctgtttgcctcctccactctataagcagtcatcttgggagaccgggaggagaaggtggtgggctagtcctgtgtcctcctccacttcccatgcctctatgttacccatctgtgtctcctgtgcagaaggagaggaaggggcattaagagatgaagggtgattatgtattacttatccatttctgaataaacatttgttattccta

SEQ ID NO: 370817 - DNA, 2781 bp, Homo sapiens
cgagagttggtccgcggacgccggaagtagttcgtcgctccctagcggccgaaggggcgggctcgcggggtctcgactgctttcggcttgctcggcggagcaagatggcggacatctccctggacgaactcatcaggaagcgcggggcggcggcgaaaggacggcttaatgccagaccgggagttggaggtgtccgatctcgagttgggatccagcaaggccttctcagccagtcaacacgcacagccaccttccagcagagatttgatgcccggcagaagattggcctctcagatgcccggctcaaactgggagtcaaggatgcccgggagaagcttttgcagaaagatgcccgatttcgaatcaaagggaaagtgcaggatgccagagagatgttgaactctcgcaagcagcagaccacggtgccccagaagccccgccaggttgctgatgcccgggagaagatcagcttgaagaggagttcccctgctgccttcataaacccacccattgggacagtgacccctgctctgaagctcaccaaaaccatccaggttccacagcagaaagccatggcaccacttcatccccatcctgccggaatgagaatcaatgttgtcaataaccaccaggccaaacagaatttatatgacctggatgaagatgatgatggtatagcttccgttcctactaaacagatgaagtttgcagcctcaggcggctttctccaccacatggctgggctaagcagttccaagctttccatgtccaaggccctccctctcaccaaagtggttcagaatgatgcatacacagctcctgctctcccttcctctattcgaacaaaagccttgaccaacatgtcccggacactggtgaacaaggaagaaccccccaaagagctgccagctgctgagcctgttctcagcccattggaaggcaccaagatgactgtgaataatctgcaccctcgagtcactgaggaggacattgttgagcttttctgtgtgtgtggggccctcaagcgagctcgactggtccatcctggggtagcggaggtggtgtttgtgaaaaaggacgatgccatcaccgcatataagaagtacaacaaccggtgtctggacgggcagccgatgaagtgcaaccttcacatgaatgggaatgttatcacctcagaccagcccatcctgctgcggctgagtgacagcccatcaatgaaaaaggagagcgagctgcctcgcagggtgaactctgcctcctcctccaacccccctgccgaagtggaccctgacaccatcctgaaggcactcttcaagtcctcaggggcctctgtgaccacgcagcccacagaattcaaaatcaagctttgagcaggggagtgaggcagccagaagtgggggcagaggagggtggctctgtttccccaaggcaaagcttatgaccaatgggccatcggactggagacccctgattgtgggaagggttgccagggataaagagcttcctcactggatgggacccgcctttctgtgttgtgttctgccctgtgctcttctctctacgttaacgtttcctgtagtatgtttcttcatctcatcgccaaggtaggcttgtgtttttcagtgtgtgcctccccgagcctcagccccaagctgatttcttatctggaaatggtacactgaattctctgggtggctttcttgtggccccatgggatgcagcgtgggggctgtctgaaggaccctgctttttccaggggccgaggggctgcctttcctttgtgtgtattaagcttttcaaacaatggaggggatggagagccctggtgtcctgacgggagccaggtcggcctgagagctgtgccgctcctctgtcttgtcagtggaggtgcctgggtggggagcaggtctcaggcctcttgtcctctccccagtggctccaggcctcactagtggcaagggcaggatgaggctgcaccgctgggaagagtctatctaagctcttggcttggagtcccgtgtcgtctccacccagaggaagttctccagagttcacctttcccttttccttgagttgtgctgaatgccccaccccagctctctttcccttctgggtgtctttgctgggagggggctgtgttgtgagccctcccggttctcacctcgcctggcacttaaccacaccctggttttgtgtagccgccagctctcttctggttgggcctttgaaaggctcagcctcccattgtgcagtgcttgggtttggagcttatttgaatggaagaggtcagtttgttcctggctctccatttctggcctcagttgtctacaggacagtggtcagggatgcctggaggcatatatccagctgccaccaaggggcactgtttgttcccacttatgtgagtgaccccatccatccatgaccagaggattatttccctgcatggctttatcctccctctcatcccaaagcaggtatcttctggttgtcacagagtttcattgagtccagctgcagccacgtggccatctggagctggtgctataggtgaccatctggtacattgaggggacctgtttgcctcctccactctataagcagtcatcttgggagaccgggaggagaaggtggtgggctagtcctgtgtcctcctccacttcccatgcctctatgttacccatctgtgtctcctgtgcagaaggagaggaaggggcattaagagatgaagggtgattatgtattacttatccatttctgaataaacatttgttattccta

SEQ ID NO: 370818 - DNA, 1428 bp, Homo sapiens
cgagagttggtccgcggacgccggaagtagttcgtcgctccctagcggccgaaggggcgggctcgcggggtctcgactgctttcggcttgctcggcggagcaagatggcggacatctccctggacgaactcatcaggaagcgcggggcggcggcgaaaggacggcttaatgccagaccgggagttggaggtgtccgatctcgagttgggatccagcaaggccttctcagccagtcaacacgcacagccaccttccagcagagatttgatgcccggcagaagattggcctctcagatgcccggctcaaactgggagtcaaggatgcccgggagaagcttttgcagaaagatgcccgatttcgaatcaaagggaaagtgcaggatgccagagagatgttgaactctcgcaagcagcagaccacggtgccccagaagccccgccaggttgctgatgcccgggagaagatcagcttgaagaggagttcccctgctgccttcataaacccacccattgggacagtgacccctgctctgaagctcaccaaaaccatccaggttccacagcagaaagccatggcaccacttcatccccatcctgccggaatgagaatcaatgttgtcaataaccaccaggccaaacagaatttatatgacctggatgaagatgatgatggtatagcttccgttcctactaaacagatgaagtttgcagcctcaggcggctttctccaccacatggctgggctaagcagttccaagctttccatgtccaaggccctccctctcaccaaagtggttcagaatgatgcatacacagctcctgctctcccttcctctattcgaacaaaagccttgaccaacatgtcccggacactggtgaacaaggaagaaccccccaaagagctgccagctgctgagcctgttctcagcccattggaaggcaccaagatgactgtgaataatctgcaccctcgagtcactgaggaggacattgttgagcttttctgtgtgtgtggggccctcaagcgagctcgactggtccatcctggggtagcggaggtggtgtttgtgaaaaaggacgatgccatcaccgcatataagaagtacaacaaccggtgtctggacgggcagccgatgaagtgcaaccttcacatgaatgggaatgttatcacctcagaccagcccatcctgctgcggctgagtgacagcccatcaatgaaaaaggagagcgagctgcctcgcagggtgaactctgcctcctcctccaacccccctgccgaagtggaccctgacaccatcctgaaggcactcttcaagtcctcagggtggctctgtttccccaaggcaaagcttatgaccaatgggccatcggactggagacccctgattgtgggaagggttgccagggataaagagcttcctcactgga

SEQ ID NO: 370819 - DNA, 1458 bp, Homo sapiens
cgagagttggtccgcggacgccggaagtagttcgtcgctccctagcggccgaaggggcgggctcgcggggtctcgactgctttcggcttgctcggcggagcaagatggcggacatctccctggacgaactcatcaggaagcgcggggcggcggcgaaaggacggcttaatgccagaccgggagttggaggtgtccgatctcgagttgggatccagcaaggccttctcagccagtcaacacgcacagccaccttccagcagagatttgatgcccggcagaagattggcctctcagatgcccggctcaaactgggagtcaaggatgcccgggagaagcttttgcagaaagatgcccgatttcgaatcaaagggaaagtgcaggatgccagagagatgttgaactctcgcaagcagcagaccacggtgccccagaagccccgccaggttgctgatgcccgggagaagatcagcttgaagaggagttcccctgctgccttcataaacccacccattgggacagtgacccctgctctgaagctcaccaaaaccatccaggttccacagcagaaagccatggcaccacttcatccccatcctgccggaatgagaatcaatgttgtcaataaccaccaggccaaacagaatttatatgacctggatgaagatgatgatggtatagcttccgttcctactaaacagatgaagtttgcagcctcaggcggctttctccaccacatggctgggctaagcagttccaagctttccatgtccaaggccctccctctcaccaaagtggttcagaatgatgcatacacagctcctgctctcccttcctctattcgaacaaaagccttgaccaacatgtcccggacactggtgaacaaggaagaaccccccaaagagctgccagctgctgagcctgttctcagcccattggaaggcaccaagatgactgtgaataatctgcaccctcgagtcactgaggaggacattgttgagcttttctgtgtgtgtggggccctcaagcgagctcgactggtccatcctggggtagcggaggtggtgtttgtgaaaaaggacgatgccatcaccgcatataagaagtacaacaaccggtgtctggacgggcagccgatgaagtgcaaccttcacatgaatgggaatgttatcacctcagaccagcccatcctgcttgcagccacgtggccatctggagctggtgctataggtgaccatctggtacattgaggggacctgtttgcctcctccactctataagcagtcatcttgggagaccgggaggagaaggtggtgggctagtcctgtgtcctcctccacttcccatgcctctatgttacccatctgtgtctcctgtgcagaaggagaggaaggggcattaagagatgaagggtgattatgtattacttatccatttctgaataaacatttgttattccta

SEQ ID NO: 370820 - DNA, 1077 bp, Homo sapiens
cagtcagttgtaaggtctcaaaacctggacactttggaacgtagcaatcggatgaacgatcttggaaacatctctcgggactcctgggctgtgtacttgaaatagttctggggatgggccaggacatcaaacagagccttgataagtttcttatccttaagtatttcctgatggttctcagatgcatagagcctgccatctcgaactatgtcttcaatgagttcctggtagtcctcatcatatgtcacgtatgggacctggaaccctctagcgctgttcccttcattggacttgaactgaatccacagcttctttgacctggaggtgaaggcgatggggcgttcgtaggtctggcaggtttcatatgttgtcacagaattggatgaagaggttttccgcatcaccagatagtccccacagtcgtcctctatgggcaggaagatctcagggaccacgatcaggatgcggcgcttgggttgcccaggacgggaaagtccaaggaaggggcctggtggtgctccacttgcagttctttaaagaatgctgctttttattctcctaaccctttcaagtgggtgcagacttctcgttagcagctggaagacattcctcccacacttttcccttcctggcccaagagagcatccagaaggcagtaggacctggtttttcaggtactgggagccgggggctcactgcttgcactgtgcttagggtagggatggtaaatatcctccctgcatggctttatcctccctctcatcccaaagcaggtatcttctggttgtcacagagtttcattgagtccagctgcagccacgtggccatctggagctggtgctataggtgaccatctggtacattgaggggacctgtttgcctcctccactctataagcagtcatcttgggagaccgggaggagaaggtggtgggctagtcctgtgtcctcctccacttcccatgcctctatgttacccatctgtgtctcctgtgcagaaggagaggaaggggcattaagagatgaagggtgattatgtattacttatccatttctgaataaacatttgttattccta

SEQ ID NO: 370821 - DNA, 1086 bp, Homo sapiens
cgagagttggtccgcggacgccggaagtagttcgtcgctccctagcggccgaaggggcgggctcgcggggtctcgactgctttcggcttgctcggcggagcaagatggcggacatctccctggacgaactcatcaggaagcgcggggcggcggcgaaaggacggcttaatgccagaccgggagttggaggtgtccgatctcgagttgggatccagcaaggccttctcagccagtcaacacgcacagccaccttccagcagagatttgatgcccggcagaagattggcctctcagatgcccggctcaaactgggagtcaaggatgcccgggagaagcttttgcagaaagatgcccgatttcgaatcaaagggaaagtgcaggatgccagagagatgttgaactctcgcaagcagcagaccacggtgccccagaagccccgccaggttgctgatgcccgggagaagatcagcttgaagaggagttcccctgctgccttcataaacccacccattgggacagtgacccctgctctgaagctcaccaaaaccatccaggttccacagcagaaagccatggcaccacttcatccccatcctgccggaatgagaatcaatgttgtcaataaccaccaggccaaacagaatttatatgacctggatgaagatgatgatggtatagcttccgttcctactaaacagatgaagtttgcagcctcaggcggctttctccaccacatggctgggctaagcagttccaagctttccatgtccaaggccctccctctcaccaaagtggttcagaatgatgcatacacagctcctgctctcccttcctctattcgaacaaaagccttgaccaacatgtcccggacactggtgaacaaggaagaaccccccaaagagctgccagctgctgagcctgttctcagcccattggaaggcaccaagatgactgtcctcctccacttcccatgcctctatgttacccatctgtgtctcctgtgcagaaggagaggaaggggcattaagagatgaagggtgattatgtattacttatccatttctgaataaacatttgttattccta

SEQ ID NO: 370822 - DNA, 1153 bp, Homo sapiens
cgagagttggtccgcggacgccggaagtagttcgtcgctccctagcggccgaaggggcgggctcgcggggtctcgactgctttcggcttgctcggcggagcaagatggcggacatctccctggacgaactcatcaggaagcgcggggcggcggcgaaaggacggcttaatgccagaccgggagttggaggtgtccgatctcgagttgggatccagcaaggccttctcagccagtcaacacgcacagccaccttccagcagagatttgatgcccggcagaagattggcctctcagatgcccggctcaaactgggagtcaaggatgcccgggagaagcttttgcagaaagatgcccgatttcgaatcaaagggaaagtgcaggatgccagagagatgttgaactctcgcaagcagcagaccacggtgccccagaagccccgccaggttgctgatgcccgggagaagatcagcttgaagaggagttcccctgctgccttcataaacccacccattgggacagtgacccctgctctgaagctcaccaaaaccatccaggttccacagcagaaagccatggcaccacttcatccccatcctgccggaatgagaatcaatgttgtcaataaccaccaggccaaacagaatttatatgacctggatgaagatgatgatggtatagcttccgttcctactaaacagatgaagtttgcagcctcaggcggctttctccaccacatgggaccaggcctttccagtaattagactgctcaagtctgctatcaagggaactatcagcttgctcagggctgggctaagcagttccaagctttccatgtccaaggccctccctctcaccaaagtggttcagaatgatgcatacacagctcctgctctcccttcctctattcgaacaaaagccttgaccaacatgtcccggacactggtgaacaaggaagaaccccccaaagagctgccagctgctgagcctgttctcagcccattggaaggcaccaagatgactgtcctcctccacttcccatgcctctatgttacccatctgtgtctcctgtgcagaaggagaggaaggggcattaagagatgaagggtgattatgtattacttatccatttctgaataaacatttgttattccta

SEQ ID NO: 370823 - DNA, 1018 bp, Homo sapiens
cgagagttggtccgcggacgccggaagtagttcgtcgctccctagcggccgaaggggcgggctcgcggggtctcgactgctttcggcttgctcggcggagcaagatggcggacatctccctggacgaactcatcaggaagcgcggggcggcggcgaaaggacggcttaatgccagaccgggagttggaggtgtccgatctcgagttgggatccagcaaggccttctcagccagtcaacacgcacagccaccttccagcagagatttgatgcccggcagaagattggcctctcagatgcccggctcaaactgggagtcaaggatgcccgggagaagcttttgcagaaagatgcccgatttcgaatcaaagggaaagtgcaggatgccagagagatgttgaactctcgcaagcagcagaccacggtgccccagaagccccgccaggttgctgatgcccgggagaagatcagcttgaagaggagttcccctgctgccttcataaacccacccattgggacagtgacccctgctctgaagctcaccaaaaccatccaggtgagttgtggcttttgtcatgaattcccagaaagctagtaacaaaggtagatttagaggcaaggtgccaggagtgactgggcaaaaatactatcctctcaagtgttggcataatacagactttgctccttacagaggctttaagtacgttatagccaaggaactatacaaggaaggaaaggtattatctcagttctaaaaaaaaagaaaaaggaggcccatagaaatttggtgactttcccaggtgagatactggtggaagaaagagagaggaaaggacaaaagatttattgagcacatgctatgtggcaggcccttaatatctgtgaccttacaagtcctcactccacccccaggcccagtgggatttggcccctagtccaaggccctggccacccttcacagctgccaccacagagggaaaggaaacaatgtcatttaaccttcatagcagctttggtaat

SEQ ID NO: 370824 - DNA, 445 bp, Homo sapiens
acaacaaccggtgtctggacggtaagttagggagaaagcagtcccctgaccctcccactcatctctacttgctgtcaggtagcaggccttccaggggaagtctctgtgagatgggtggaacccatctctggggcctcgtctgcaccaggaactgccgtgcagtctctgagtagtcctgagctgtgggttacacagggccctggattttcacccagcccttaagcttttgagcccagcaaaaaggaaaacagcatttctccatggatggttctcttaaggggtcttgccaggggagccaagaggcacagctgttgcctcccagatgttgatctgtttagtgctagggcagaagttcctcccagccctggagttttgtctgaatgttgacacctgggtgagagctgctcctggtgggtaaacaacagactttattgacttgaggttc

SEQ ID NO: 370825 - DNA, 297 bp, Homo sapiens
tgtatcaagttcagtaacccccttcttctagagaatgcatgtggaccctgtggggtggattctgaccactgagtgtttccaggttccacagcagaaagccatggcaccacttcatccccatcctgccggaatgagaatcaatgttgtcaataaccaccaggccaaacaggtagagtgagtgagtgagagagagagagagaatctgtgtgtacatagcgaacatgtaggtgtgcacgtgttttgatgaggcctacttgggtggatggactgaggcttgctcagttggtagttcccagt

SEQ ID NO: 370826 - DNA, 1464 bp, Homo sapiens
ccaggaaagatgtagcgagtgccgtcactcgggtgtaaatttcagtgacgcggggcaggagtgtcaggatcatatacctgggccgctcgcattacagaagcgcggggcggcggcgaaaggacggcttaatgccagaccgggagttggaggtgtccgatctcgagttgggatccagcaaggccttctcagccagtcaacacgcacagccaccttccagcagagatttgatgcccggcagaagattggcctctcagatgcccggctcaaactgggagtcaaggatgcccgggagaagcttttgcagaaagatgcccgatttcgaatcaaagggaaagtgcaggatgccagagagatgttgaactctcgcaagcagcagaccacggtgccccagaagccccgccaggttgctgatgcccgggagaagatcagcttgaagaggagttcccctgctgccttcataaacccacccattgggacagtgacccctgctctgaagctcaccaaaaccatccaggttccacagcagaaagccatggcaccacttcatccccatcctgccggaatgagaatcaatgttgtcaataaccaccaggccaaacagaatttatatgacctggatgaagatgatgatggtatagcttccgttcctactaaacagatgaagtttgcagcctcaggcggctttctccaccacatggtatggcatttcatgttttcttacactgcgtgtctgatcaggcaggtgggagaggtcgtgttgaatagaacctgttgttttttttgttttgagacgacatctcgctcttctcccccaggctgctggagtgcaatggcgcaatcttggctcactgcaacctccgtctcctgggttcaagctattatcctgcctcagcctccctagtagctgggattacaggcgcctgccgccacgcccagctaatttttgtatttttagtagagatgaggtttcaccatgttggccaggctggtctcaaactcctgacctcaggtgatccgcacgcctcggcctcccaaggtgctgggattacaggcgtaagccactgcgcccggcgtgaatagagcctttcaatgcagaaatatttctttgtttgggccgtaagattttcagagctggaactagtccattcccttagttttataaacgctgagacactggggtgccttctgatttgttcaaggtcccacagcaagtgaagtacagggctgcagctcctaggtgctgtgtttgagacactatagggaaagtgtgagtgatcccacagtggggagtctgtgttctttccttggtggctggccattctgcatgcttcgtaaccctttgtggtcagcagctctggcgctgctcttggagtctggattccgttggttaacattagcaggaatacatctcacctgatctgtgggctctaccaggtgcagcctgcatgcagggaaagcttgcta

SEQ ID NO: 370827 - DNA, 3351 bp, Homo sapiens
cgagagttggtccgcggacgccggaagtagttcgtcgctccctagcggccgaaggggcgggctcgcggggtctcgactgctttcggcttgctcggcggagcaagatggcggacatctccctggacgaactcatcaggaagcgcggggcggcggcgaaaggacggcttaatgccagaccgggagttggaggtgtccgatctcgagttgggatccagcaaggccttctcagccagtcaacacgcacagccaccttccagcagagatttgatgcccggcagaagattggcctctcagatgcccggctcaaactgggagtcaaggatgcccgggagaagcttttgcagaaagatgcccgatttcgaatcaaagggaaagtgcaggatgccagagagatgttgaactctcgcaagcagcagaccacggtgccccagaagccccgccaggttgctgatgcccgggagaagatcagcttgaagaggagttcccctgctgccttcataaacccacccattgggacagtgacccctgctctgaagctcaccaaaaccacagaatttatatgacctggatgaagatgatgatggtatagcttccgttcctactaaacagatgaagtttgcagcctcaggcggctttctccaccacatggctgggctaagcagttccaagctttccatgtccaaggccctccctctcaccaaagtggttcagaatgatgcatacacagctcctgctctcccttcctctattcgaacaaaagccttgaccaacatgtcccggacactggtgaacaaggaagaaccccccaaagagctgccagctgctgagcctgttctcagcccattggaaggcaccaagatgactgtgaataatctgcaccctcgagtcactgaggaggacattgttgagcttttctgtgtgtgtggggccctcaagcgagctcgactggtccatcctggggtagcggaggtggtgtttgtgaaaaaggacgatgccatcaccgcatataagaagtacaacaaccggtgtctggacgggcagccgatgaagtgcaaccttcacatgaatgggaatgttatcacctcagaccagcccatcctgctgcggctgagtgacagcccatcaatgaaaaaggagagcgagctgcctcgcagggtgaactctgcctcctcctccaacccccctgccgaagtggaccctgacaccatcctgaaggcactcttcaagtcctcaggggcctctgtgaccacgcagcccacagaattcaaaatcaagctttgagcaggggagtgaggcagccagaagtgggggcagaggagggtggctctgtttccccaaggcaaagcttatgaccaatgggccatcggactggagacccctgattgtgggaagggttgccagggataaagagcttcctcactggatgggacccgcctttctgtgttgtgttctgccctgtgctcttctctctacgttaacgtttcctgtagtatgtttcttcatctcatcgccaaggtaggcttgtgtttttcagtgtgtgcctccccgagcctcagccccaagctgatttcttatctggaaatggtacactgaattctctgggtggctttcttgtggccccatgggatgcagcgtgggggctgtctgaaggaccctgctttttccaggggccgaggggctgcctttcctttgtgtgtattaagcttttcaaacaatggaggggatggagagccctggtgtcctgacgggagccaggtcggcctgagagctgtgccgctcctctgtcttgtcagtggaggtgcctgggtggggagcaggtctcaggcctcttgtcctctccccagtggctccaggcctcactagtggcaagggcaggatgaggctgcaccgctgggaagagtctatctaagctcttggcttggagtcccgtgtcgtctccacccagaggaagttctccagagttcacctttcccttttccttgagttgtgctgaatgccccaccccagctctctttcccttctgggtgtctttgctgggagggggctgtgttgtgagccctcccggttctcacctcgcctggcacttaaccacaccctggttttgtgtagccgccagctctcttctggttgggcctttgaaaggctcagcctcccattgtgcagtgcttgggtttggagcttatttgaatggaagaggtcagtttgttcctggctctccatttctggcctcagttgtctacaggacagtggtcagggatgcctggaggcatatatccagctgccaccaaggggcactgtttgttcccacttatgtgagtgaccccatccatccatgaccagaggattattttcctgccttggcagaggaggaggagtcaagggagcagggcagctctaccaggcaaggtgtttccccagcataggcgcagacagttgggacgaaacttcagagcccaggcagtccctgaatgaccaggccagtgttgtcactgagtggtcccctgctggttgggagtgaagagaatccaggctggcagagctggagccagttggggagcacggttctgggagctctgcaaaatcagtagcaagtgctggaaaaggcacatgccgaagatactcaagagctcccaagatttgcttgaggctagcccagtgaaaaaaaccagagactcatgtttccaggggtcagtctgtcaggcaggaaggacccaggatttgaacccagcttcagtgtgcaggctctgaggctgcccaggacgggaaagtccaaggaaggggcctggtggtgctccacttgcagttctttaaagaatgctgctttttattctcctaaccctttcaagtgggtgcagacttctcgttagcagctggaagacattcctcccacacttttcccttcctggcccaagagagcatccagaaggcagtaggacctggtttttcaggtactgggagccgggggctcactgcttgcactgtgcttagggtagggatggtaaatatcctccctgcatggctttatcctccctctcatcccaaagcaggtatcttctggttgtcacagagtttcattgagtccagctgcagccacgtggccatctggagctggtgctataggtgaccatctggtacattgaggggacctgtttgcctcctccactctataagcagtcatcttgggagaccgggaggagaaggtggtgggctagtcctgtgtcctcctccacttcccatgcctctatgttacccatctgtgtctcctgtgcagaaggagaggaaggggcattaagagatgaagggtgattatgtattacttatccatttctgaataaacatttgttattccta

SEQ ID NO: 370828 - DNA, 3275 bp, Homo sapiens
cgagagttggtccgcggacgccggaagtagttcgtcgctccctagcggccgaaggggcgggctcgcggggtctcgactgctttcggcttgctcggcggagcaagatggcggacatctccctggacgaactcatcaggaagcgcggggcggcggcgaaaggacggcttaatgccagaccgggagttggaggtgtccgatctcgagttgggatccagcaaggccttctcagccagtcaacacgcacagccaccttccagcagagatttgatgcccggcagaagattggcctctcagatgcccggctcaaactgggagtcaaggatgcccgggagaagcttttgcagaaagatgcccgatttcgaatcaaagggaaagtgcaggatgccagagagatgttgaactctcgcaagcagcagaccacggtgccccagaagccccgccaggttgctgatgcccgggagaagatcagcttgaagaggagttcccctgctgccttcataaacccacccattgggacagtgacccctgctctgaagctcaccaaaaccatccaggttccacagcagaaagccatggcaccacttcatccccatcctgccggaatgagaatcaatgttgtcaataaccaccaggccaaacagaatttatatgacctggatgaagatgatgatggtatagcttccgttcctactaaacagatgaagtttgcagcctcaggcggctttctccaccacatggctgggctaagcagttccaagctttccatgtccaaggccctccctctcaccaaagtggttcagaatgatgcatacacagctcctgctctcccttcctctattcgaacaaaagccttgaccaacatgtcccggacactggtgaacaaggaagaaccccccaaagagctgccagctgctgagcctgttctcagcccattggaaggcaccaagatgactgtgaataatctgcaccctcgagtcactgaggaggacattgttgagcttttctgtgtgtgtggggccctcaagcgagctcgactggtccatcctggggtagcggaggtggtgtttgtgaaaaaggacgatgccatcaccgcatataagaagtacaacaaccggtgtctggacgggcagccgatgaagtgcaaccttcacatgaatgggaatgttatcacctcagaccagcccatcctgctgcggctgagtgacagcccatcaatgaaaaaggagagcgagctgcctcgcagggtggctctgtttccccaaggcaaagcttatgaccaatgggccatcggactggagacccctgattgtgggaagggttgccagggataaagagcttcctcactggatgggacccgcctttctgtgttgtgttctgccctgtgctcttctctctacgttaacgtttcctgtagtatgtttcttcatctcatcgccaaggtaggcttgtgtttttcagtgtgtgcctccccgagcctcagccccaagctgatttcttatctggaaatggtacactgaattctctgggtggctttcttgtggccccatgggatgcagcgtgggggctgtctgaaggaccctgctttttccaggggccgaggggctgcctttcctttgtgtgtattaagcttttcaaacaatggaggggatggagagccctggtgtcctgacgggagccaggtcggcctgagagctgtgccgctcctctgtcttgtcagtggaggtgcctgggtggggagcaggtctcaggcctcttgtcctctccccagtggctccaggcctcactagtggcaagggcaggatgaggctgcaccgctgggaagagtctatctaagctcttggcttggagtcccgtgtcgtctccacccagaggaagttctccagagttcacctttcccttttccttgagttgtgctgaatgccccaccccagctctctttcccttctgggtgtctttgctgggagggggctgtgttgtgagccctcccggttctcacctcgcctggcacttaaccacaccctggttttgtgtagccgccagctctcttctggttgggcctttgaaaggctcagcctcccattgtgcagtgcttgggtttggagcttatttgaatggaagaggtcagtttgttcctggctctccatttctggcctcagttgtctacaggacagtggtcagggatgcctggaggcatatatccagctgccaccaaggggcactgtttgttcccacttatgtgagtgaccccatccatccatgaccagaggattattttcctgccttggcagaggaggaggagtcaagggagcagggcagctctaccaggcaaggtgtttccccagcataggcgcagacagttgggacgaaacttcagagcccaggcagtccctgaatgaccaggccagtgttgtcactgagtggtcccctgctggttgggagtgaagagaatccaggctggcagagctggagccagttggggagcacggttctgggagctctgcaaaatcagtagcaagtgctggaaaaggcacatgccgaagatactcaagagctcccaagatttgcttgaggctagcccagtgaaaaaaaccagagactcatgtttccaggggtcagtctgtcaggcaggaaggacccaggatttgaacccagcttcagtgtgcaggctctgaggctgcccaggacgggaaagtccaaggaaggggcctggtggtgctccacttgcagttctttaaagaatgctgctttttattctcctaaccctttcaagtgggtgcagacttctcgttagcagctggaagacattcctcccacacttttcccttcctggcccaagagagcatccagaaggcagtaggacctggtttttcaggtactgggagccgggggctcactgcttgcactgtgcttagggtagggatggtaaatatcctccctgcatggctttatcctccctctcatcccaaagcaggtatcttctggttgtcacagagtttcattgagtccagctgcagccacgtggccatctggagctggtgctataggtgaccatctggtacattgaggggacctgtttgcctcctccactctataagcagtcatcttgggagaccgggaggagaaggtggtgggctagtcctgtgtcctcctccacttcccatgcctctatgttacccatctgtgtctcctgtgcagaaggagaggaaggggcattaagagatgaagggtgattatgtattacttatccatttctgaataaacatttgttattccta

SEQ ID NO: 370829 - DNA, 3171 bp, Homo sapiens
cgagagttggtccgcggacgccggaagtagttcgtcgctccctagcggccgaaggggcgggctcgcggggtctcgactgctttcggcttgctcggcggagcaagatggcggacatctccctggacgaactcatcaggaagcgcggggcggcggcgaaaggacggcttaatgccagaccgggagttggaggtgtccgatctcgagttgggatccagcaaggccttctcagccagtcaacacgcacagccaccttccagcagagatttgatgcccggcagaagattggcctctcagatgcccggctcaaactgggagtcaaggatgcccgggagaagcttttgcagaaagatgcccgatttcgaatcaaagggaaagtgcaggatgccagagagatgttgaactctcgcaagcagcagaccacggtgccccagaagccccgccaggttgctgatgcccgggagaagatcagcttgaagaggagttcccctgctgccttcataaacccacccattgggacagtgacccctgctctgaagctcaccaaaaccatccaggttccacagcagaaagccatggcaccacttcatccccatcctgccggaatgagaatcaatgttgtcaataaccaccaggccaaacagaatttatatgacctggatgaagatgatgatggtatagcttccgttcctactaaacagatgaagtttgcagcctcaggcggctttctccaccacatggctgggctaagcagttccaagctttccatgtccaaggccctccctctcaccaaagtggttcagaatgatgcatacacagctcctgctctcccttcctctattcgaacaaaagccttgaccaacatgtcccggacactggtgaacaaggaagaaccccccaaagagctgccagctgctgagcctgttctcagcccattggaaggcaccaagatgactgtgaataatctgcaccctcgagtcactgaggaggacattgttgagcttttctgtgtgtgtggggccctcaagcgagctcgactggtccatcctggggtagcggaggtggtgtttgtgaaaaaggacgatgccatcaccgcatataagaagtacaacaaccggtgtctggacgggcagccgatgaagtgcaaccttcacatgaatgggaatgttatcacctcagaccagcccatcctgctgcggctgagtgacagcccatcaatgaaaaaggagagcgagctgcctcgcagggtgaactctgcctcctcctccaacccccctgccgaagtggaccctgacaccatcctgaaggcactcttcaagtcctcaggggcctctgtgaccacgcagcccacagaattcaaaatcaagctttgagcaggggagtgaggcagccagaagtgggggcagaggagggtggctctgtttccccaaggcaaagcttatgaccaatgggccatcggactggagacccctgattgtgggaagggttgccagggataaagagcttcctcactggatgggacccgcctttctgtgttgtgttctgccctgtgctcttctctctacgttaacgtttcctgtagtatgtttcttcatctcatcgccaaggtaggcttgtgtttttcagtgtgtgcctccccgagcctcagccccaagctgatttcttatctggaaatggtacactgaattctctgggtggctttcttgtggccccatgggatgcagcgtgggggctgtctgaaggaccctgctttttccaggggccgaggggctgcctttcctttgtgtgtattaagcttttccttgagttgtgctgaatgccccaccccagctctctttcccttctgggtgtctttgctgggagggggctgtgttgtgagccctcccggttctcacctcgcctggcacttaaccacaccctggttttgtgtagccgccagctctcttctggttgggcctttgaaaggctcagcctcccattgtgcagtgcttgggtttggagcttatttgaatggaagaggtcagtttgttcctggctctccatttctggcctcagttgtctacaggacagtggtcagggatgcctggaggcatatatccagctgccaccaaggggcactgtttgttcccacttatgtgagtgaccccatccatccatgaccagaggattattttcctgccttggcagaggaggaggagtcaagggagcagggcagctctaccaggcaaggtgtttccccagcataggcgcagacagttgggacgaaacttcagagcccaggcagtccctgaatgaccaggccagtgttgtcactgagtggtcccctgctggttgggagtgaagagaatccaggctggcagagctggagccagttggggagcacggttctgggagctctgcaaaatcagtagcaagtgctggaaaaggcacatgccgaagatactcaagagctcccaagatttgcttgaggctagcccagtgaaaaaaaccagagactcatgtttccaggggtcagtctgtcaggcaggaaggacccaggatttgaacccagcttcagtgtgcaggctctgaggctgcccaggacgggaaagtccaaggaaggggcctggtggtgctccacttgcagttctttaaagaatgctgctttttattctcctaaccctttcaagtgggtgcagacttctcgttagcagctggaagacattcctcccacacttttcccttcctggcccaagagagcatccagaaggcagtaggacctggtttttcaggtactgggagccgggggctcactgcttgcactgtgcttagggtagggatggtaaatatcctccctgcatggctttatcctccctctcatcccaaagcaggtatcttctggttgtcacagagtttcattgagtccagctgcagccacgtggccatctggagctggtgctataggtgaccatctggtacattgaggggacctgtttgcctcctccactctataagcagtcatcttgggagaccgggaggagaaggtggtgggctagtcctgtgtcctcctccacttcccatgcctctatgttacccatctgtgtctcctgtgcagaaggagaggaaggggcattaagagatgaagggtgattatgtattacttatccatttctgaataaacatttgttattccta

SEQ ID NO: 370830 - DNA, 4530 bp, Homo sapiens
cgagagttggtccgcggacgccggaagtagttcgtcgctccctagcggccgaaggggcgggctcgcggggtctcgactgctttcggcttgctcggcggagcaagatggcggacatctccctggacgaactcatcaggaagcgcggggcggcggcgaaaggacggcttaatgccagaccgggagttggaggtgtccgatctcgagttgggatccagcaaggccttctcagccagtcaacacgcacagccaccttccagcagagatttgatgcccggcagaagattggcctctcagatgcccggctcaaactgggagtcaaggatgcccgggagaagcttttgcagaaagatgcccgatttcgaatcaaagggaaagtgcaggatgccagagagatgttgaactctcgcaagcagcagaccacggtgccccagaagccccgccaggttgctgatgcccgggagaagatcagcttgaagaggagttcccctgctgccttcataaacccacccattgggacagtgacccctgctctgaagctcaccaaaaccatccaggttccacagcagaaagccatggcaccacttcatccccatcctgccggaatgagaatcaatgttgtcaataaccaccaggccaaacagaatttatatgacctggatgaagatgatgatggtatagcttccgttcctactaaacagatgaagtttgcagcctcaggcggctttctccaccacatggctgggctaagcagttccaagctttccatgtccaaggccctccctctcaccaaagtggttcagaatgatgcatacacagctcctgctctcccttcctctattcgaacaaaagccttgaccaacatgtcccggacactggtgaacaaggaagaaccccccaaagagctgccagctgctgagcctgttctcagcccattggaaggcaccaagatgactgtgaataatctgcaccctcgagtcactgaggaggacattgttgagcttttctgtgtgtgtggggccctcaagcgagctcgactggtccatcctggggtagcggaggtggtgtttgtgaaaaaggacgatgccatcaccgcatataagaagtacaacaaccggtgtctggacgggcagccgatgaagtgcaaccttcacatgaatgggaatgttatcacctcagaccagcccatcctgctgcggctgagtgacagcccatcaatgaaaaaggagagcgagctgcctcgcagggtgaactctgcctcctcctccaacccccctgccgaagtggaccctgacaccatcctgaaggcactcttcaagtcctcaggggcctctgtgaccacgcagcccacagaattcaaaatcaagctttgagcaggggagtgaggcagccagaagtgggggcagaggagggtggctctgtttccccaaggcaaagcttatgaccaatgggccatcggactggagacccctgattgtgggaagggttgccagggataaagagcttcctcactggatgggacccgcctttctgtgttgtgttctgccctgtgctcttctctctacgttaacgtttcctgtagtatgtttcttcatctcatcgccaaggtaggcttgtgtttttcagtgtgtgcctccccgagcctcagccccaagctgatttcttatctggaaatggtacactgaattctctgggtggctttcttgtggccccatgggatgcagcgtgggggctgtctgaaggaccctgctttttccaggggccgaggggctgcctttcctttgtgtgtattaagcttttcaaacaatggaggggatggagagccctggtgtcctgacgggagccaggtcggcctgagagctgtgccgctcctctgtcttgtcagtggaggtgcctgggtggggagcaggtctcaggcctcttgtcctctccccagtggctccaggcctcactagtggcaagggcaggatgaggctgcaccgctgggaagagtctatctaagctcttggcttggagtcccgtgtcgtctccacccagaggaagttctccagagttcacctttcccttttccttgagttgtgctgaatgccccaccccagctctctttcccttctgggtgtctttgctgggagggggctgtgttgtgagccctcccggttctcacctcgcctggcacttaaccacaccctggttttgtgtagccgccagctctcttctggttgggcctttgaaaggctcagcctcccattgtgcagtgcttgggtttggagcttatttgaatggaagaggtcagtttgttcctggctctccatttctggcctcagttgtctacaggacagtggtcagggatgcctggaggcatatatccagctgccaccaaggggcactgtttgttcccacttatgtgagtgaccccatccatccatgaccagaggattattttcctgccttggcagaggaggaggagtcaagggagcagggcagctctaccaggcaaggtgtttccccagcataggcgcagacagttgggacgaaacttcagagcccaggcagtccctgaatgaccaggccagtgttgtcactgagtggtcccctgctggttgggagtgaagagaatccaggctggcagagctggagccagttggggagcacggttctgggagctctgcaaaatcagtagcaagtgctggaaaaggcacatgccgaagatactcaagagctcccaagatttgcttgaggctagcccagtgaaaaaaaccagagactcatgtttccaggggtcagtctgtcaggcaggaaggacccaggatttgaacccagcttcagtgtgcaggctctgaggctgcccaggacgggaaagtccaaggaaggggcctggtggtgctccacttgcagttctttaaagaatgctgctttttattctcctaaccctttcaagtgggtgcagacttctcgttagcagctggaagacattcctcccacacttttcccttcctggcccaagagagcatccagaaggcagtaggacctggtttttcaggtactgggagccgggggctcactgcttgcactgtgcttagggtagggatggtaaatatcctccctgcatggctttatcctccctctcatcccaaagcaggtatcttctggttgtcacagagtttcattgagtccagctgcagccacgtggccatctggagctggtgctataggtgaccatctggtacattgaggggacctgtttgcctcctccactctataagcagtcatcttgggagaccgggaggagaaggtggtgggctagtcctgtgtcctcctccacttcccatgcctctatgttacccatctgtgtctcctgtgcagaaggagaggaaggggcattaagagatgaagggtgattatgtattacttatccatttctgaataaacatttgttattcctaaaaaaaaaaaaacagaaacacaaaaacaacaatgaaaggagccgcgcctcgcatcaagaatactccgcacgcgagaggccagaacgacctacccgcgcgctgccaggcagcatcgcctgtcatcacacggggaggaccacgaacatcatgaagagccaagtaatatcaacacatgatgcacacgagcacacgctgcagaccacaagcgtccgacaagtgtgcgaaatacctgtgcggacgcagctggagaaccacctgcgcgtccaatgacacaccccgtcaagccatccacagacgcgggctcgaccaacacagtgggagaaacaccgacacgtgcacaagcgaattccacaatgccccaagacgcgaccaacaccattaacacaacgtgcaaccacgaggcagaaaaaacgtgcgtgtaaaacatctcccaagcgatgccaattcatgactcggcgccctggcccaatcccacacaccaacatccttggcgctcatcaaaccgcgcgaccatacaaaactactgatccagctgaacacccgaaagccctgttcacacagccccggcggcggcactacacagcggcagaaaaagaagggaccaaacgccaaggcacaccaggaatccaccgcgcaatagcccctgacatcacagagaagaaccaggcacgacatggcggaccgcaaagaagccagcagcgggtagagacaggcgatcacggccagggcacaaaccggaagagaaggaacaaaacaggcacgcgacggccgagagagccaaaggccgggacacacacaagaatgagagcaataacatgcgacatcacgaacacaaagcacaaagcacatagacaatgcactaggaccaaccaccaacagcggagaatcgagcccaataccgacagcctggacgtcacagacgaacaccaagtcacacaacaacgaacgaggtcggaaatttgcgagaggtaggggacacactgcgaagacatgcaaacagacacacacacaactcgcgccacaccgcacgacacttacgccgggacaatcaccgcgcatatagcgctaagaacgcatccacacccgccca

SEQ ID NO: 370831 - DNA, 3331 bp, Homo sapiens
cgagagttggtccgcggacgccggaagtagttcgtcgctccctagcggccgaaggggcgggctcgcggggtctcgactgctttcggcttgctcggcggagcaagatggcggacatctccctggacgaactcatcaggaagcgcggggcggcggcgaaaggacggcttaatgccagaccgggagttggaggtgtccgatctcgagttgggatccagcaaggccttctcagccagtcaacacgcacagccaccttccagcagagatttgatgcccggcagaagattggcctctcagatgcccggctcaaactgggagtcaaggatgcccgggagaagcttttgcagaaagatgcccgatttcgaatcaaagggaaagtgcaggatgccagagagatgttgaactctcgcaagcagcagaccacggtgccccagaagccccgccaggttgctgatgcccgggagaagatcagcttgaagaggagttcccctgctgccttcataaacccacccattgggacagtgacccctgctctgaagctcaccaaaaccatccaggttccacagcagaaagccatggcaccacttcatccccatcctgccggaatgagaatcaatgttgtcaataaccaccaggccaaacagaatttatatgacctggatgaagatgatgatggtatagcttccgttcctactaaacagatgaagtttgcagcctcaggcggctttctccaccacatggctgggctaagcagttccaagctttccatgtccaaggccctccctctcaccaaagtggttcagaatgatgcatacacagctcctgctctcccttcctctattcgaacaaaagccttgaccaacatgtcccggacactggtgaacaaggaagaaccccccaaagagctgccagctgctgagcctgttctcagcccattggaaggcaccaagatgactgtgaataatctgcaccctcgagtcactgaggaggacattgttgagcttttctgtgtgtgtggggccctcaagcgagctcgactggtccatcctggggtagcggaggtggtgtttgtgaaaaaggacgatgccatcaccgcatataagaagtacaacaaccggtgtctggacgggcagccgatgaagtgcaaccttcacatgaatgggaatgttatcacctcagaccagcccatcctgctgcggctgagtgacagcccatcaatgaaaaaggagagcgagctgcctcgcagggtgaactctgcctcctcctccaacccccctgccgaagtggaccctgacaccatcctgaaggcactcttcaagtcctcaggggcctctgtgaccacgcagcccacagaattcaaaatcaagctttgagcaggggagtgaggcagccagaagtgggggcagaggagggtggctctgtttccccaaggcaaagcttatgaccaatgggccatcggactggagacccctgattgtgggaagggttgccagggataaagagcttcctcactggatgggacccgcctttctgtgttgtgttctgccctgtgctcttctctctacgttaacgtttcctgtagtatgtttcttcatctcatcgccaaggtaggcttgtgtttttcagtgtgtgcctccccgagcctcagccccaagctgatttcttatctggaaatggtacactgaattctctgggtggctttcttgtggccccatgggatgcagcgtgggggctgtctgaaggaccctgctttttccaggggccgaggggctgcctttcctttgtgtgtattaagcttttcaaacaatggaggggatggagagccctggtgtcctgacgggagccaggtcggcctgagagctgtgccgctcctctgtcttgtcagtggaggtgcctgggtggggagcaggtctcaggcctcttgtcctctccccagtggctccaggcctcactagtggcaagggcaggatgaggctgcaccgctgggaagagtctatctaagctcttggcttggagtcccgtgtcgtctccacccagaggaagttctccagagttcacctttcccttttccttgagttgtgctgaatgccccaccccagctctctttcccttctgggtgtctttgctgggagggggctgtgttgtgagccctcccggttctcacctcgcctggcacttaaccacaccctggttttgtgtagccgccagctctcttctggttgggcctttgaaaggctcagcctcccattgtgcagtgcttgggtttggagcttatttgaatggaagaggtcagtttgttcctggctctccatttctggcctcagttgtctacaggacagtggtcagggatgcctggaggcatatatccagctgccaccaaggggcactgtttgttcccacttatgtgagtgaccccatccatccatgaccagaggattattttcctgccttggcagaggaggaggagtcaagggagcagggcagctctaccaggcaaggtgtttccccagcataggcgcagacagttgggacgaaacttcagagcccaggcagtccctgaatgaccaggccagtgttgtcactgagtggtcccctgctggttgggagtgaagagaatccaggctggcagagctggagccagttggggagcacggttctgggagctctgcaaaatcagtagcaagtgctggaaaaggcacatgccgaagatactcaagagctcccaagatttgcttgaggctagcccagtgaaaaaaaccagagactcatgtttccaggggtcagtctgtcaggcaggaaggacccaggatttgaacccagcttcagtgtgcaggctctgaggctgcccaggacgggaaagtccaaggaaggggcctggtggtgctccacttgcagttctttaaagaatgctgctttttattctcctaaccctttcaagtgggtgcagacttctcgttagcagctggaagacattcctcccacacttttcccttcctggcccaagagagcatccagaaggcagtaggacctggtttttctggttgtcacagagtttcattgagtccagctgcagccacgtggccatctggagctggtgctataggtgaccatctggtacattgaggggacctgtttgcctcctccactctataagcagtcatcttgggagaccgggaggagaaggtggtgggctagtcctgtgtcctcctccacttcccatgcctctatgttacccatctgtgtctcctgtgcagaaggagaggaaggggcattaagagatgaagggtgattatgtattacttatccatttctgaataaacatttgttattccta

SEQ ID NO: 370832 - DNA, 4378 bp, Homo sapiens
cgagagttggtccgcggacgccggaagtagttcgtcgctccctagcggccgaaggggcgggctcgcggggtctcgactgctttcggcttgctcggcggagcaagatggcggacatctccctggacgaactcatcaggaagcgcggggcggcggcgaaaggacggcttaatgccagaccgggagttggaggtgtccgatctcgagttgggatccagcaaggccttctcagccagtcaacacgcacagccaccttccagcagagatttgatgcccggcagaagattggcctctcagatgcccggctcaaactgggagtcaaggatgcccgggagaagcttttgcagaaagatgcccgatttcgaatcaaagggaaagtgcaggatgccagagagatgttgaactctcgcaagcagcagaccacggtgccccagaagccccgccaggttgctgatgcccgggagaagatcagcttgaagaggagttcccctgctgccttcataaacccacccattgggacagtgacccctgctctgaagctcaccaaaaccatccaggttccacagcagaaagccatggcaccacttcatccccatcctgccggaatgagaatcaatgttgtcaataaccaccaggccaaacagaatttatatgacctggatgaagatgatgatggtatagcttccgttcctactaaacagatgaagtttgcagcctcaggcggctttctccaccacatggctgggctaagcagttccaagctttccatgtccaaggccctccctctcaccaaagtggttcagaatgatgcatacacagctcctgctctcccttcctctattcgaacaaaagccttgaccaacatgtcccggacactggtgaacaaggaagaaccccccaaagagctgccagctgctgagcctgttctcagcccattggaaggcaccaagatgactgtgaataatctgcaccctcgagtcactgaggaggacattgttgagcttttctgtgtgtgtggggccctcaagcgagctcgactggtccatcctggggtagcggaggtggtgtttgtgaaaaaggacgatgccatcaccgcatataagaagtacaacaaccggtgtctggacgggcagccgatgaagtgcaaccttcacatgaatgggaatgttatcacctcagaccagcccatcctgctgcggctgagtgacagcccatcaatgaaaaaggagagcgagctgcctcgcagggtgaactctgcctcctcctccaacccccctgccgaagtggaccctgacaccatcctgaaggcactcttcaagtcctcaggggcctctgtgaccacgcagcccacagaattcaaaatcaagctttgagcaggggagtgaggcagccagaagtgggggcagaggagggtggctctgtttccccaaggcaaagcttatgaccaatgggccatcggactggagacccctgattgtgggaagggttgccagggataaagagcttcctcactggatgggacccgcctttctgtgttgtgttctgccctgtgctcttctctctacgttaacgtttcctgtagtatgtttcttcatctcatcgccaaggtaggcttgtgtttttcagtgtgtgcctccccgagcctcagccccaagctgatttcttatctggaaatggtacactgaattctctgggtggctttcttgtggccccatgggatgcagcgtgggggctgtctgaaggaccctgctttttccaggggccgaggggctgcctttcctttgtgtgtattaagcttttcaaacaatggaggggatggagagccctggtgtcctgacgggagccaggtcggcctgagagctgtgccgctcctctgtcttgtcagtggaggtgcctgggtggggagcaggtctcaggcctcttgtcctctccccagtggctccaggcctcactagtggcaagggcaggatgaggctgcaccgctgggaagagtctatctaagctcttggcttggagtcccgtgtcgtctccacccagaggaagttctccagagttcacctttcccttttccttgagttgtgctgaatgccccaccccagctctctttcccttctgggtgtctttgctgggagggggctgtgttgtgagccctcccggttctcacctcgcctggcacttaaccacaccctggttttgtgtagccgccagctctcttctggttgggcctttgaaaggctcagcctcccattgtgcagtgcttgggtttggagcttatttgaatggaagaggtcagtttgttcctggctctccatttctggcctcagttgtctacaggacagtggtcagggatgcctggaggcatatatccagctgccaccaaggggcactgtttgttcccacttatgtgagtgaccccatccatccatgaccagaggattattttcctgccttggcagaggaggaggagtcaagggagcagggcagctctaccaggcaaggtgtttccccagcataggcgcagacagttgggacgaaacttcagagcccaggcagtccctgaatgaccaggccagtgttgtcactgagtggtcccctgctggttgggagtgaagagaatccaggctggcagagctggagccagttggggagcacggttctgggagctctgcaaaatcagtagcaagtgctggaaaaggcacatgccgaagatactcaagagctcccaagatttgcttgaggctagcccagtgaaaaaaaccagagactcatgtttccaggggtcagtctgtcaggcaggaaggacccaggatttgaacccagcttcagtgtgcaggctctgaggctgcccaggacgggaaagtccaaggaaggggcctggtggtgctccacttgcagttctttaaagaatgctgctttttattctcctaaccctttcaagtgggtgcagacttctcgttagcagctggaagacattcctcccacacttttcccttcctggttgtcacagagtttcattgagtccagctgcagccacgtggccatctggagctggtgctataggtgaccatctggtacattgaggggacctgtttgcctcctccactctataagcagtcatcttgggagaccgggaggagaaggtggtgggctagtcctgtgtcctcctccacttcccatgcctctatgttacccatctgtgtctcctgtgcagaaggagaggaaggggcattaagagatgaagggtgattatgtattacttatccatttctgaataaacatttgttattcctaaaaaaaaaaaaacagaaacacaaaaacaacaatgaaaggagccgcgcctcgcatcaagaatactccgcacgcgagaggccagaacgacctacccgcgcgctgccaggcagcatcgcctgtcatcacacggggaggaccacgaacatcatgaagagccaagtaatatcaacacatgatgcacacgagcacacgctgcagaccacaagcgtccgacaagtgtgcgaaatacctgtgcggacgcagctggagaaccacctgcgcgtccaatgacacaccccgtcaagccatccacagacgcgggctcgaccaacacagtgggagaaacaccgacacgtgcacaagcgaattccacaatgccccaagacgcgaccaacaccattaacacaacgtgcaaccacgaggcagaaaaaacgtgcgtgtaaaacatctcccaagcgatgccaattcatgactcggcgccctggcccaatcccacacaccaacatccttggcgctcatcaaaccgcgcgaccatacaaaactactgatccagctgaacacccgaaagccctgttcacacagccccggcggcggcactacacagcggcagaaaaagaagggaccaaacgccaaggcacaccaggaatccaccgcgcaatagcccctgacatcacagagaagaaccaggcacgacatggcggaccgcaaagaagccagcagcgggtagagacaggcgatcacggccagggcacaaaccggaagagaaggaacaaaacaggcacgcgacggccgagagagccaaaggccgggacacacacaagaatgagagcaataacatgcgacatcacgaacacaaagcacaaagcacatagacaatgcactaggaccaaccaccaacagcggagaatcgagcccaataccgacagcctggacgtcacagacgaacaccaagtcacacaacaacgaacgaggtcggaaatttgcgagaggtaggggacacactgcgaagacatgcaaacagacacacacacaactcgcgccacaccgcacgacacttacgccgggacaatcaccgcgcatatagcgctaagaacgcatccacacccgccca

SEQ ID NO: 370833 - DNA, 1513 bp, Homo sapiens
cgagagttggtccgcggacgccggaagtagttcgtcgctccctagcggccgaaggggcgggctcgcggggtctcgactgctttcggcttgctcggcggagcaagatggcggacatctccctggacgaactcatcaggaagcgcggggcggcggcgaaaggacggcttaatgccagaccgggagttggaggtgtccgatctcgagttgggatccagcaaggccttctcagccagtcaacacgcacagccaccttccagcagagatttgatgcccggcagaagattggcctctcagatgcccggctcaaactgggagtcaaggatgcccgggagaagcttttgcagaaagatgcccgatttcgaatcaaagggaaagtgcaggatgccagagagatgttgaactctcgcaagcagcagaccacggtgccccagaagccccgccaggttgctgatgcccgggagaagatcagcttgaagaggagttcccctgctgccttcataaacccacccattgggacagtgacccctgctctgaagctcaccaaaaccatccaggttccacagcagaaagccatggcaccacttcatccccatcctgccggaatgagaatcaatgttgtcaataaccaccaggccaaacagaatttatatgacctggatgaagatgatgatggtatagcttccgttcctactaaacagatgaagtttgcagcctcaggcggctttctccaccacatggctgggctaagcagttccaagctttccatgtccaaggccctccctctcaccaaagtggttcagaatgatgcatacacagctcctgctctcccttcctctattcgaacaaaagccttgaccaacatgtcccggacactggtgaacaaggaagaaccccccaaagagctgccagctgctgagcctgttctcagcccattggaaggcaccaagatgactgtgaataatctgcaccctcgagtcactgaggaggacattgttgagcttttctgtgtgtgtggggccctcaagcgagctcgactggtccatcctggggtagcggaggtggtgtttgtgaaaaaggacgatgccatcaccgcatataagaagtacaacaaccggtgtctggacgggcagccgatgaagtgcaaccttcacatgaatgggaatgttatcacctcagaccagcccatcctgctgcggctgagtgacagcccatcaatgaaaaaggagagcgagctgcctcgcagggtgaactctgcctcctcctccaacccccctgccgaagtggaccctgacaccatcctgaaggcactcttcaagtcctcaggggcctctgtgaccacgcagcccacagaattcaaaatcaagctttgagcaggggagtgaggcagccagaagtgggggcagaggagggtggctctgtttccccaaggcaaagcttatgaccaatgggccatcggactggagacccctgattgtgggaagggttgccagggataaagagcttcctcactgga

SEQ ID NO: 370834 - DNA, 1191 bp, Homo sapiens
cgagagttggtccgcggacgccggaagtagttcgtcgctccctagcggccgaaggggcgggctcgcggggtctcgactgctttcggcttgctcggcggagcaagatggcggacatctccctggacgaactcatcaggaagcgcggggcggcggcgaaaggacggcttaatgccagaccgggagttggaggtgtccgatctcgagttgggatccagcaaggccttctcagccagtcaacacgcacagccaccttccagcagagatttgatgcccggcagaagattggcctctcagatgcccggctcaaactgggagtcaaggatgcccgggagaagcttttgcagaaagatgcccgatttcgaatcaaagggaaagtgcaggatgccagagagatgttgaactctcgcaagcagcagaccacggtgccccagaagccccgccaggttgctgatgcccgggagaagatcagcttgaagaggagttcccctgctgccttcataaacccacccattgggacagtgacccctgctctgaagctcaccaaaaccatccaggttccacagcagaaagccatggcaccacttcatccccatcctgccggaatgagaatcaatgttgtcaataaccaccaggccaaacagaatttatatgacctggatgaagatgatgatggtatagcttccgttcctactaaacagatgaagtttgcagcctcaggcggctttctccaccacatggctgggctaagcagttccaagctttccatgtccaaggccctccctctcaccaaagtggttcagaatgatgcatacacagctcctgctctcccttcctctattcgaacaaaagccttgaccaacatgtcccggacactggtgaacaaggaagaaccccccaaagagctgccagctgctgagcctgttctcagcccattggaaggcaccaagatgactgtgaataatctgcaccctcgagtcactgaggaggacattgttgagcttttctgtgtgtgtggggccctcaagcgagctcgactggtccatcctggggtagcggaggtcctcctccacttcccatgcctctatgttacccatctgtgtctcctgtgcagaaggagaggaaggggcattaagagatgaagggtgattatgtattacttatccatttctgaataaacatttgttattccta

SEQ ID NO: 370835 - DNA, 1561 bp, Homo sapiens
cgagagttggtccgcggacgccggaagtagttcgtcgctccctagcggccgaaggggcgggctcgcggggtctcgactgctttcggcttgctcggcggagcaagatggcggacatctccctggacgaactcatcaggaagcgcggggcggcggcgaaaggacggcttaatgccagaccgggagttggaggtgtccgatctcgagttgggatccagcaaggccttctcagccagtcaacacgcacagccaccttccagcagagatttgatgcccggcagaagattggcctctcagatgcccggctcaaactgggagtcaaggatgcccgggagaagcttttgcagaaagatgcccgatttcgaatcaaagggaaagtgcaggatgccagagagatgttgaactctcgcaagcagcagaccacggtgccccagaagccccgccaggttgctgatgcccgggagaagatcagcttgaagaggagttcccctgctgccttcataaacccacccattgggacagtgacccctgctctgaagctcaccaaaaccatccaggttccacagcagaaagccatggcaccacttcatccccatcctgccggaatgagaatcaatgttgtcaataaccaccaggccaaacagaatttatatgacctggatgaagatgatgatggtatagcttccgttcctactaaacagatgaagtttgcagcctcaggcggctttctccaccacatgggaccaggcctttccagtaattagactgctcaagtctgctatcaagggaactatcagcttgctcagtgagtctctatccctatttgataccctaattgaataaatgccatatttatactcatgcgtcttgtaccctgtgagatgggtactgttgattaccctcgttgatggatgagggacaggcatggagaggtgaaataagcctgttcaacatcacccagctgatgagaagcagtggatctaggaatggagcccgagcagtctcgctctcagggccctgtgtggagtcactgtgctgtcccagctctggagacgcagaattccacatgaggaatgtggaattcagcatggggatgacgctgcttcacccagacttggaggagcgtggtgaattgcccgtgcccatgctctgatgtgcctctctggccgctgcgttcctcctttctccctgccctgggtcagtgcctgtaaacactgccctaaatcagcagggcccccgtcacttctgctttatgcacctttttcctcagacacattaatacaggggagttttgtttccaagggaccacatccagatggaggggctgtttttggtgatctgcactgccaaatgcccgagtgtccctgacagtcggagctgatgaggccaaggctgtgtgtggttcctctggatggccagaagaggaaccaaaacactgaattctgggccttcttaagagtggtgatcagcacattgtgatagaagcatatctgggaatgaacttggcctcaagcttttggccttttaatttttttttttgtaagcaaaagcagctttattaaga

SEQ ID NO: 370836 - DNA, 1504 bp, Homo sapiens
cgagagttggtccgcggacgccggaagtagttcgtcgctccctagcggccgaaggggcgggctcgcggggtctcgactgctttcggcttgctcggcggagcaagatggcggacatctccctggacgaactcatcaggaagcgcggggcggcggcgaaaggacggcttaatgccagaccgggagttggaggtgtccgatctcgagttgggatccagcaaggccttctcagccagtcaacacgcacagccaccttccagcagagatttgatgcccggcagaagattggcctctcagatgcccggctcaaactgggagtcaaggatgcccgggagaagcttttgcagaaagatgcccgatttcgaatcaaagggaaagtgcaggatgccagagagatgttgaactctcgcaagcagcagaccacggtgccccagaagccccgccaggttgctgatgcccgggagaagatcagcttgaagaggagttcccctgctgccttcataaacccacccattgggacagtgacccctgctctgaagctcaccaaaaccatccaggttccacagcagaaagccatggcaccacttcatccccatcctgccggaatgagaatcaatgttgtcaataaccaccaggccaaacagaatttatatgacctggatgaagatgatgatggtatagcttccgttcctactaaacagatgaagtttgcagcctcaggcggctttctccaccacatggtatggcatttcatgttttcttacactgcgtgtctgatcaggcaggtgggagaggtcgtgttgaatagaacctgttgttttttttgttttgagacgacatctcgctcttctcccccaggctgctggagtgcaatggcgcaatcttggctcactgcaacctccgtctcctgggttcaagctattatcctgcctcagcctccctagtagctgggattacaggcgcctgccgccacgcccagctaatttttgtatttttagtagagatgaggtttcaccatgttggccaggctggtctcaaactcctgacctcaggtgatccgcacgcctcggcctcccaaggtgctgggattacaggcgtaagccactgcgcccggcgtgaatagagcctttcaatgcagaaatatttctttgtttgggccgtaagattttcagagctggaactagtccattcccttagttttataaacgctgagacactggggtgccttctgatttgttcaaggtcccacagcaagtgaagtacagggctgcagctcctaggtgctgtgtttgagacactatagggaaagtgtgagtgatcccacagtggggagtctgtgttctttccttggtggctggccattctgcatgcttcgtaaccctttgtggtcagcagctctggcgctgctcttggagtctggattccgttggttaacattagcaggaatacatctcacctgatctgtgggctctaccaggtgcagcctgcatgcagggaaagcttgcta

SEQ ID NO: 370837 - DNA, 510 bp, Homo sapiens
gaaatcgcaggactacaagtccctcaatgccacttgcgccggaggcacttccttttccggttgtgctaggcgcctgctcctgtcgacgtgttcttccggtggcggagcggcggattagccttcgcggggcaaaatggagctcgaggccatgagcagatataccagcccagtgaacccagctgtcttcccccatctgaccgtggtgcttttggccattggcatgttcttcaccgcctggttcttcgtttacgaggtcacctctaccaagtacactcgtgatatctataaagagctcctcatctccttagtggcctcactcttcatgggctttggagtcctcttcctgctgctctgggttggcatctacgtgtgagcacccaagggtaacaaccagatggcttcactgaaacctgcttttgtaaattacttttttttactgttgctggaagtgtcccacctgctgctcataataaatgcagatgtatagcaaaaaaaaaaaaaaaaaaaaaa

SEQ ID NO: 370838 - DNA, 2165 bp, Homo sapiens
ttttttttaatttttgtatttttggtagagacggggttttgccatgttgggccaggctcgaactcctggcctcaagtgatcctccctccgtggccttccagggtgctgagattataggctgagccactgtgcctggcctaaaagcatagttattttcaatcagcatggtataatgaaaagaagatggaattttggattcaagaaagaccaaggtttaaagctccttttctttttctttttttttgagacggagtcttgctgtgcgctctgcgctgtgcccaggctggagtgcggtgtcgtaatcttggctcactgcaagccctgcctcttgggttcatgccattctcctgcctcagcctcttgagtggctgggactgcaggctcccaacaccacgcccagctaatttttatgtatttttagtagagatggggtttcaccgtgttggccaggatggtctcgatctcctgactttgtgatctgcccgccttggccctcccaaagtgctgggattacaggcatgagccactgcgcccgtcctaaagctccttttcatcccttgggcaatgttctgattttctattattgcctaacaagtctatccaaaatgtagtggcttaatacaataacttattattatctctcatgtttctgtggattgacagggttcagctggacacttctcccgttaaggtctttcatgtggttgtggtcagatagtacctggagatggggccatctgaagactctgccctaggctggatccaagatggtgttttccttttacttgtctgatgtctcagtgctctttgagatggcctctttatccagcagagtagcctaaacttatgtggctgctcagggttccaagagttaggaagtagaagttgccaggcagttaagggctttggaactggcatagtattgtatctattaaagaagtcacagggcctcccagattcaaggggcttgagaaataaactgcatgtctttaaaggaagtgggaaggtcacattgcagaagaatatatgggctgagaggtcttattggggctgtctctggaaggccatctgggcacaattttttttcattttcttgtttgtaaaatagcaataacaatatttacctcacagagtggttaagtggaatagcacagtgtcaagcacatcatgtgtttagtaaatataagtagacttccccccttaattctctaatgtaacaaattacttctgatctacttttattttaaatggccgcaagtttgctcagtatatggtttggttaactgtttcttcacccgactatgtttctcagactgttgtaacttaaaacaaactttatcatggaaaatttcaaacacatcaaagtaaagagaataccacattaacagaataagggacaaaaactgcatcatcatctcaattcatgcagaaaaagcatttgatagatccagcatactttcatgataaaaacactcaactaggaatagaaggaaactcagcatatcaaagtgtatttatgaaaagcccacagtggctgggcctgttggctcatgcctgtaattccagcactctgggaggccaaggtgggaggatcacttgagtccaggagtttgagacaagcctgggtaacaaggcatttatttgggatgaggaaaggaaattgagcagaaggtacaggagtaatagcaattccctgtagctctcaaagcaaattttgagctcatttttctttttctgcaagctcagcagcagaatgcccagagtcttccctggtagatgcaggttccatagcgacgttctcctgcaatgcacgctggtattctgcaatagcaggccatgtttttccttgagcctggatgctttggagccattggcatgttcttcaccgcctggttcttcgtttacgaggtcacctctaccaagtacactcgtgatatctataaagagctcctcatctccttagtggcctcactcttcatgggctttggagtcctcttcctgctgctctgggttggcatctacgtgtgagcacccaagggtaacaaccagatggcttcactgaaacctgcttttgtaaattacttttttttactgttgctggaagtgtcccacctgctgctcataataaatgcagatgtatagcaaaaaaaaaaaaaaaaaaaaaa

SEQ ID NO: 370839 - DNA, 1146 bp, Homo sapiens
cggacgcgtgggaaagattataagataaactctaatccttaattgaatttatgtttatatcaggatccgtggcagggtcaagcgatagtcgtgtaccagcggatgcagatataaacataaattcaattaaagattataagataaactctaatccttatttttcattaatggttagagttaattccgatggtggcaaatacccagagttatctctggagaaactcctagaccgggaagaacagagatctcatagcttgatattgactgccttggacggaggggacccaccaagaagtgccaccgctcacatagaaatttctgtcaaggataccaatgataaccccccggttttcagcagagacgaatatagaattagtcttagtgaaaatctgccccctgggtcccctgtgttgcaagtgacagccactgaccaggatgagggggtcaatgctgagataaactactacttccgaagcactgcccagagcacaaaacatatgttctcattggatgagaaaacaggtatgattaagaataaccagtcatttgattttgaagatgtagaaaggtacaccatggaagtggaagcgaaggacggaggtggtctctctacccagtgtaaagtaatcatagaaatccttgatgaaaacgacaacagcccagaaataatcatcacttctctctctgatcagattttggagaattcacctccaggaatggttgttgccctcttcaaaacacgggatctggatttcggaggaaatggagaagtcaggtgtaatatagaaacagacattccattcaagatttattcttcttcttcccccatctgaccgtggtgcttttggccattggcatgttcttcaccgcctggttcttcgtttacgaggtcacctctaccaagtacactcgtgatatctataaagagctcctcatctccttagtggcctcactcttcatgggctttggagtcctcttcctgctgctctgggttggcatctacgtgtgagcacccaagggtaacaaccagatggcttcactgaaacctgcttttgtaaattacttttttttactgttgctggaagtgtcccacctgctgctcataataaatgcagatgtatagcaaaaaaaaaaaaaaaaaaaaaa

SEQ ID NO: 370840 - DNA, 491 bp, Homo sapiens
gaaatcgcaggactacaagtccctcaatgccacttgcgccggaggcacttccttttccggttgtgctaggcgcctgctcctgtcgacgtgttcttccggtggcggagcggcggattagccttcgcggggcaaaatggagctcgaggccatgagcagatataccagcccagtgaacccagctgtcttcccccatctgaccgtggtgcttttggccattggcatgttcttcaccgcctggttcttcgtgtatcctttcactgagcagccagaggaccagcattagtgatgtgggaagctcagggagaaaccacgctaggtacatggaccccgccggttttgtacattggattggggctgagagaaggtaacaaccagatggcttcactgaaacctgcttttgtaaattacttttttttactgttgctggaagtgtcccacctgctgctcataataaatgcagatgtatagcaaaaaaaaaaaaaaaaaaaaaa

SEQ ID NO: 370841 - DNA, 476 bp, Homo sapiens
tgagggccaggcgcggtggttcactcctgtaatcccagcactttgggaggctgaggcgagcggatcaggaggtcagaagttcaagaccagcctggccagcaggagctcgaggccatgagcagatataccagcccagtgaacccagctgtcttcccccatctgaccgtggtgcttttggccattggcatgttcttcaccgcctggttcttcgtttacgaggtcacctctaccaagtacactcgtgatatctataaagagctcctcatctccttagtggcctcactcttcatgggctttggagtcctcttcctgctgctctgggttggcatctacgtgtgagcacccaagggtaacaaccagatggcttcactgaaacctgcttttgtaaattacttttttttactgttgctggaagtgtcccacctgctgctcataataaatgcagatgtatagcaaaaaaaaaaaaaaaaaaaaaa

SEQ ID NO: 370842 - DNA, 818 bp, Homo sapiens
gaaatcgcaggactacaagtccctcaatgccacttgcgccggaggcacttccttttccggttgtgctaggcgcctgctcctgtcgacgtgttcttccggtggcggagcggcggattagccttcgcggggcaaaatggagctcgaggccatgagcagatataccagcccagtgaacccagctgtcttcccccatctgaccgtggtgcttttggccattggcatgttcttcaccgcctggttcttcgtttacgaggtcacctctaccaagtacactcgtgatatctataaagagctcctcatctccttagtggcctcactcttcatgggctttggagtcctcttcctgctgctctgggttggcatctacgtgtgagcacccaagggtaacaaccagatggcttcactgaaacctgcttttgtaaattacttttttttactgttgctggaagtgtcccacctgctgctcataataaatgcagatgtatagcaaaaaaaaaaaaaaaaaaaaaaaaaaaaaaaaaaaaaaaaaaaaaaaaaaaaaaaaaaaaaaaggggggggttttttggggggggggggaaaaagggtgtaataaagagaagcacatagacacacagctgactccaccaacaccacatttatataaaaaagggggagaagacgcgggggcccacaagaggagggccggtaattatagaaaaagcgcggtcccccgttttctctcctcctcatctacgtcgaaatagaaaggtgacaacgaccatcaagctaaagcccaacgaaaagcacagcacacacagaaaagcccagaaaaaaacat

SEQ ID NO: 370843 - DNA, 838 bp, Homo sapiens
gaaatcgcaggactacaagtccctcaatgccacttgcgccggaggcacttccttttccggttgtgctaggcgcctgctcctgtcgacgtgttcttccggtggcggagcggcggattagccttcgcggggcaaaatggagctcgaggccatgagcagatataccagcccagtgaacccagctgtcttcccccatctgaccgtggtgcttttggccattggcatgttcttcaccgcctggttcttcgtttacgaggtcacctctaccaagtacactcgtgatatctataaagagctcctcatctccttagtggcctcactcttcatgggctttggagtcctcttcctgctgctctgggttggcatctacgtgtgagcacccaagggtaacaaccagatggcttcactgaaacctgcttttgtaaattacttttttttactgttgctggaagtgtcccacctgctgctcataataaatgcagatgtatagcaaaaaaaaaaaaaaaaaaaaaagaaaaattttgttggggggatttgggccttggagagaaggttttgtgagagacccttgtggtgtggggggggggggccctgtgggtcagcgtggacacggggcacaagaggggttcccccagaggtgatattgcgcgggccaatggaaaaagggggtggtgggggaattttttaccgcattatataaaaaagcgcgggggggggaaaaaccggggaggtgttttgtgaaaaaattcccgagatgggaggagttcggagaggggcacatagcggggatttctatcacacggggaggattcacagagggaagtccgaattttaaaatttg

SEQ ID NO: 370844 - DNA, 777 bp, Homo sapiens
gaaatcgcaggactacaagtccctcaatgccacttgcgccggaggcacttccttttccggttgtgctaggcgcctgctcctgtcgacgtgttcttccggtggcggagcggcggattagccttcgcggggcaaaatggagctcgaggccatgagcagatataccagcccagtgaacccagctgtcttcccccatctgaccgtggtgcttttggccattggcatgttcttcaccgcctggttcttcgtttacgaggtcacctctaccaagtacactcgtgatatctataaagagctcctcatctccttagtggcctcactcttcatgggctttggagtcctcttcctgctgctctgggttggcatctacgtgtgagcacccaagggtaacaaccagatggcttcactgaaacctgcttttgtaaattacttttttttactgttgctggaagtgtcccacctgctgctcataataaatgcagatgtatagcaaaaaaaaaaaaaaaaaaaaaaaaaaaccaaaaataaacagaacgaaacacaaaataaaaatagctttcaaaacaaaatcaatatgctaaaaaaaaacagtggggcgcctctggccccagcgttttagaatctggaacattttttattatgggcccatattggggctttttggccaaattcccttttatggggcgcctttaaaattacggtgcccggtttttaaaagggggtctgggaaaacccggggttcccccaattaagcgttggaaccccttttccagatgggac

SEQ ID NO: 370845 - DNA, 874 bp, Homo sapiens
gaaatcgcaggactacaagtccctcaatgccacttgcgccggaggcacttccttttccggttgtgctaggcgcctgctcctgtcgacgtgttcttccggtggcggagcggcggattagccttcgcggggcaaaatggagctcgaggccatgagcagatataccagcccagtgaacccagctgtcttcccccatctgaccgtggtgcttttggccattggcatgttcttcaccgcctggttcttcgtttacgaggtcacctctaccaagtacactcgtgatatctataaagagctcctcatctccttagtggcctcactcttcatgggctttggagtcctcttcctgctgctctgggttggcatctacgtgtgagcacccaagggtaacaaccagatggcttcactgaaacctgcttttgtaaattacttttttttactgttgctggaagtgtcccacctgctgctcataataaatgcagatgtatagcaaaaaaaaaaaaaaaaaaaaaaaaaaaaaaaagtgtgtgtgggcgcgcccggcgggccccgcgagaaaaagtttttgtgacaaacctcgttggtgtggggggcgcggggcccacgagataggaccagataaacagtggggccgaatcaaggcggttccataggaaagaacacgacggggtgaagcaacaggaacggggcgtaggggaagtgtcctccgccgagaatgaaaaaaaaacgcacccggggcggcaaacgcaggacggctttctgggagaacacaggtccgagaagaagggcagctccggaagcgagcgacccagggggcatatctaccaacaggacggcccacaggagggcacgcccgagaaatgaaaatgtggcccca

SEQ ID NO: 370846 - DNA, 581 bp, Homo sapiens
gaaatcgcaggactacaagtccctcaatgccacttgcgccggaggcacttccttttccggttgtgctaggcgcctgctcctgtcgacgtgttcttccggtggcggagcggcggattagccttcgcggggcaaaatggagctcgaggccatgagcagatataccagcccagtgaacccagctgtcttcccccatctgaccgtggtgcttttggccattggcatgttcttcaccgcctggttcttcgtttacgaggtcacctctaccaagtacactcgtgatatctataaagagctcctcatctccttagtggcctcactcttcatgggctttggagtcctcttcctgctgctctgggttggcatctacgtgtgagcacccaagggtaagagctgcaatgggatggatgcgtgagcctccaaggcacagcccagggaagcctccccagagtcaggggtaacaaccagatggcttcactgaaacctgcttttgtaaattacttttttttactgttgctggaagtgtcccacctgctgctcataataaatgcagatgtatagcaaaaaaaaaaaaaaaaaaaaaa

SEQ ID NO: 370847 - DNA, 601 bp, Homo sapiens
gaaatcgcaggactacaagtccctcaatgccacttgcgccggaggcacttccttttccggttgtgctaggcgcctgctcctgtcgacgtgttcttccggtggcggagcggcggattagccttcgcggggcaaaattcttcccccatctgaccgtggtgcttttggccattggcatgttcttcaccgcctggttcttcgtgtatcctttcactgagcagccagaggaccagcattagtgatgtgggaagctcagggagaaaccacgctagattgccgtgggctgggctctctgcactccacagtccaccccttcgctttgccttaactgctgtgcccattacgaggtcacctctaccaagtacactcgtgatatctataaagagctcctcatctccttagtggcctcactcttcatgggctttggagtcctcttcctgctgctctgggttggcatctacgtgtgagcacccaagggtaacaaccagatggcttcactgaaacctgcttttgtaaattacttttttttactgttgctggaagtgtcccacctgctgctcataataaatgcagatgtatagcaaaaaaaaaaaaaaaaaaaaaa

SEQ ID NO: 370848 - DNA, 697 bp, Homo sapiens
gaaatcgcaggactacaagtccctcaatgccacttgcgccggaggcacttccttttccggttgtgctaggcgcctgctcctgtcgacgtgttcttccggtggcggagcggcggattagccttcgcggggcaaaatggagctcgaggccatgagcagatataccagcccagtgaacccagctgtcttcccccatctgaccgtggtgcttttggccattggcatgttcttcaccgcctggttcttcgtgtatcctttcactgagcagccagaggaccagcattagtgatgtgggaagctcagggagaaaccacgctaggtacatggaccccgccggttttgtacattggattggggctgagagaaagattgccgtgggctgggctctctgcactccacagtccaccccttcgctttgccttaactgctgtgcccattacgaggtcacctctaccaagtacactcgtgatatctataaagagctcctcatctccttagtggcctcactcttcatgggctttggagtcctcttcctgctgctctgggttggcatctacgtgtgagcacccaagggtaacaaccagatggcttcactgaaacctgcttttgtaaattacttttttttactgttgctggaagtgtcccacctgctgctcataataaatgcagatgtatagcaaaaaaaaaaaaaaaaaaaaaa

SEQ ID NO: 370849 - DNA, 510 bp, Homo sapiens
tgtctatagacactggtccacaaagctccggaaattgtaggcaaactttttcttgtatgtggtttttctcaggcagagagttcgtacctttagtcacgttttcatagtggtcagattattggcctcagaaaatgctaataagggccattgatctgcagctacatttccgggctaaaatcagcctctgtttcacggcagcaccaggctccttgataaccgcatgttctctccaggctgaaatcgtgggattctttgatagctctgatctctttccctcctctaggagctcgaggccatgagcagatataccagcccagtgaacccagctgtcttcccccatctgaccgtggtgcttttggccattggcatgttcttcaccgcctggttcttcgtgtatcctttcactgagcagccagaggaccagcattagtgatgtgggaagctcagggagaaaccacgctaggtacatggaccccgccggttttgtacattggattggggctgagagaa

SEQ ID NO: 370850 - DNA, 579 bp, Homo sapiens
gcatgaccccttggttgatggagacagactcagtggaatgggtagggacactagacatttgtgcctctttccctgcccctcatacggatttgagccaaatgtgactctcagttctgagctcacatggcccaaggcctcgatctgcctttgggatgtaccacctagaagtgtggacgcaggcatcccatggctgtacatttacattcttagaagtcagaccccagtgacttggagaggctgctgggaagtcagctggctgaaagggggtcaagatccagggcttaaaacttgctgcagacaatccaccaaacaggccactaggaatcagctctggtggctcatcctcagaggtgtgtgctcaatagcccttgccccaggagcacaggggtgcagggagagaaggaggaaagaagggccattggtcttattttgatacccctctcctcttttaggtaacaaccagatggcttcactgaaacctgcttttgtaaattacttttttttactgttgctggaagtgtcccacctgctgctcataataaatgcagatgtatagcaaaaaaaaaaaaaaaaaaaaaa

SEQ ID NO: 370851 - DNA, 826 bp, Homo sapiens
gaaatcgcaggactacaagtccctcaatgccacttgcgccggaggcacttccttttccggttgtgctaggcgcctgctcctgtcgacgtgttcttccggtggcggagcggcggattagccttcgcggggcaaaatggagctcgaggccatgagcagatataccagcccagtgaacccagctgtcttcccccatctgaccgtggtgcttttggccattggcatgttcttcaccgcctggttcttcgtttacgaggtcacctctaccaagtacactcgtgatatctataaagagctcctcatctccttagtggcctcactcttcatgggctttggagtcctcttcctgctgctctgggttggcatctacgtgtgagcacccaagggtaacaaccagatggcttcactgaaacctgcttttgtaaattacttttttttactgttgctggaagtgtcccacctgctgctcataataaatgcagatgtatagcaaaaaaaaaaaaaaaaaaaaaaaaaaaaaaaaaaaaaaaaaaaaaaaaaaaaaaaaacaacaacagatgtggggcgagccggggcgcccgccagacaagaagttgctggagacacaacccaccagaggggggggccgcggaaccccacaagaggagaatgtacaccggcgaagcaagcgtgtccacacgagacatcccgcgtcaagaacgctgagggggggggggtcccccccaaaagaaaaaggccgcgggggaaacgcggcctgtgtgtaacaacaccacaggaggcgtggcacggcacgaggcgtacacagaagcacagaggagacgagaagcca

SEQ ID NO: 370852 - DNA, 941 bp, Homo sapiens
gaaatcgcaggactacaagtccctcaatgccacttgcgccggaggcacttccttttccggttgtgctaggcgcctgctcctgtcgacgtgttcttccggtggcggagcggcggattagccttcgcggggcaaaatggagctcgaggccatgagcagatataccagcccagtgaacccagctgtcttcccccatctgaccgtggtgcttttggccattggcatgttcttcaccgcctggttcttcgtttacgaggtcacctctaccaagtacactcgtgatatctataaagagctcctcatctccttagtggcctcactcttcatgggctttggagtcctcttcctgctgctctgggttggcatctacgtgtgagcacccaaggctcctgtgcctgtctccgagcaacacctccacctctgcaccttcacctgggctgtcccacctgcctgaatggccctccccactccctgccagagctctcctctcctaagcctgaaggctgcagccccgggatctgcccctcggatgactggtgtctcagatgtcagcacttcactattcagctggggtggagacctattacatgcctccttggcgcccagactcaggacagcttcagatagaagcagtcgaggggcttgaggccctcgggcgtcttgacgtacttgggctcgcccagcatgccgatgtacactgtcacctggaagtggttcttcttctggcacacaaaggcgtcgtcgcccaccgaaaagttgaagcccttgtccgcatccacgcggtaggtttcacttttatcagtgttcaggaaaaagaacaaactcaacccaagaggtcaacacgtcctgcgtgaaccctgtgctcacccagcaagtggaaggctgtggccatatgggatccagctctttggccatccctggtccccacatctggagcaactccc

SEQ ID NO: 370853 - DNA, 1187 bp, Homo sapiens
caggagctggtggtgaaaaactgatctcgcatgttcagaaactgcacaagctctaccacatcctcgtcaacactgcccttccggctgaggtccgctttgctcaaacattgcgccttccatttcctgaactccgcgctgcgatccatgggtgacggactcagggtctgcgctcggctccttcatggtagcctcgtctctccctgggggcagccatattgaagcgagcggtggccgaaaaggtccaaacttcctcttcgttcttaatttgggaaattctagtgccttcgcctaggggtggagagaggcgcacagctggggtggagcgaggcgcacagcctgggtggagcctgcaaaagttggagaaggtgtggcagtcctcatttctgtggaatctgaagaagcccacgcagattttaattcccactctagattctggcttcatcgttatgaagcatatgatgatcccgtggatagtatctagatcaccatggcgactggacagaagttgatgagagctgttagagtttttgaatttggtggaccagaagtcctgaaattgcgatcagatattgcagtaccgattccaaaagaccatcaggttctaatcaaggtccatgcatgtggtgtcaaccccgtggagacatacattcgctctggtacttatagtagaaaaccactcttaccctatactcctggctcagatgtggctggggtgatagaagctgttggagataatgcatctgctttcaagaaaggtgacagagttttcactagcagcacgatctctgggggttatgcagagtatgctcttgcagcagaccacactgtttacaaactacctgaaaaactggactttaaacaaggagctgccatcggcattccatattttactgcttatcgagctctgatccacagagtccagctgtgcacaaacagccctttaatgtgcgacagctgaatactgttcacgctagttcccagtttctggtatctcaaggattcagggtttggacggtctacctttgcttggagctataaaagtgtaccccgcctcccgttgtcggggatagtggagaattatgaagaactgatgaattgcccgacaaggttgtgctggtctatcaaaaaatttgggcagaagttctccaataattgctatggtccttcgttgcttggactaatagtag

SEQ ID NO: 370854 - DNA, 632 bp, Homo sapiens
gacaatttctggcttgaatatggaatcctgcttcaggaataaacagaaaacaccgctaatttctatagttgaaggatatcattggcttctggttgtatgtgccatggctgaagtgttttttgctattagcattttcaagtttatccactgtttcttttacaggttaactaccctgtaaaattacttaaaaaaaaagtgttaaggcaatgtcatcaacataggctggcattttatgtgcatcctaaaatggaggattcctttccatgtaaacaaggtaaaagaataattattctgtaaaagtcagtttaatctgtttgtatatttgcctcatctatagaaggagctaaagcatacagatgacttaacacttcaaaatacattgatacagtttaattaattttgaagccaaaactagccaaactgtgtgcattaactaccatatttatgatgtagcactgggtatgttctctgcataaatctctgtggttttagtcttgtcccaactttcagccaactgcattcactacttggttggtgcctgtggccttagggctactacatagtcttcagtgcccattcttgatgaaaagtagagaataacctgtataataaacaaacattgtttaactcag

SEQ ID NO: 370855 - DNA, 2424 bp, Homo sapiens
caggagctggtggtgaaaaactgatctcgcatgttcagaaactgcacaagctctaccacatcctcgtcaacactgcccttccggctgaggtccgctttgctcaaacattgcgccttccatttcctgaactccgcgctgcgatccatgggtgacggactcagggtctgcgctcggctccttcatggtagcctcgtctctccctgggggcagccatattgaagcgagcggtggccgaaaaggtccaaacttcctcttcgttcttaatttgggaaattctagtgccttcgcctaggggtggagagaggcgcacagctggggtggagcgaggcgcacagcctgggtggagcctgcaaaagttggagaaggtgtggcagtcctcatttctgtggaatctgaagaagcccacgcagattttaattcccactctagattctgtatctagatcaccatggcgactggacagaagttgatgagagctgttagagtttttgaatttggtggaccagaagtcctgaaattgcgatcagatattgcagtaccgattccaaaagaccatcaggttctaatcaaggtccatgcatgtggtgtcaaccccgtggagacatacattcgctctggtacttatagtagaaaaccactcttaccctatactcctggctcagatgtggctggggtgatagaagctgttggagataatgcatctgctttcaagaaaggtgacagagttttcactagcagcacgatctctgggggttatgcagagtatgctcttgcagcagaccacactgtttacaaactacctgaaaaactggactttaaacaaggagctgccatcggcattccatattttactgcttatcgagctctgatccacagtgcctgtgtgaaagctggagagagtgttctggttcatggggcaagtggaggagttggattagcagcatgccaaattgctagagcttatggcttaaagattttgggcactgctggtactgaggaaggacaaaagattgttttgcaaaatggagcccatgaagtgttcaatcacagagaagtgaattacattgataaaattaagaagtatgttggtgagaaaggaattgatataattattgaaatgttagctaatgtaaatcttagtaaagacttgagtcttctgtcacatggaggacgagtgatagttgttggcagcagaggtactattgaaataaacccacgagacaccatggcaaaggagtcgagtataattggagttactctcttttcctcaaccaaggaggaatttcagcaatatgcagcagcccttcaagctggaatggaaattggctggttgaaacctgtgataggttctcaatatccattggagaaggtggccgaggctcatgaaaatatcattcatggtagtggggctactggtaaaatgattcttctcttatgatgattaattctttcatggatttcctatgtaattagaggtactgtctttcccccagttgtacttaccctatcttttctttaattaacattcgattccatgagcttcttatgtgaaaaaataagatttttctttagagagcagaagcagaagagtaaaatttattgtatagctagcaatatttttttatgccatctgtctcaaatcaaagagtcatcatagtaggaaatagcatgttagttgtcatttggcatgagtgtgcattccagtaattcttaattgatatttgattaattccatacctttgattaaaacatgctagttcaaaataagactgctcagtttccaagggttttcaagcctacttacctttataaaggttctctagtctctgattagccatgactgtattggactttgaacattttctgaactaaaaacctctattctaaactaatctcatttggatgtgtaagtcttttgtaaaggcaagaataaataatatccaggacaatttattagttttctcagtattttcccaaatattagaatatttacttcattattggttggctgccaatgaccccatatgttctgtgagaatagtagctttatctttgatataatacatagtctccaaataggtaatacttcgcaattgattagattttcagagtagatttagagttatctgtttttctggtgagggtcaaatatttttgttaattaagctcacaaatttgataaattaagaattatctgcatttgtctcgtaacataataatgtgtaataaagtctatagaaaattaaaacctgcttttctagtttttatattatttgcctctcatcacttctgcatagctcctggcagttacttcttaacagtgttctatgctggaagcctttatctaaactaaatacagggatgacctcttagcaatcttgccatcaatattatattcaagaaaataaaagttcggttatttgt

SEQ ID NO: 370856 - DNA, 1855 bp, Homo sapiens
aagccattcccctccaggggctgcaagttcccatccataaatcagtatctagatcaccatggcgactggacagaagttgatgagagctgttagagtttttgaatttggtggaccagaagtcctgaaattgcgatcagatattgcagtaccgattccaaaagaccatcaggttctaatcaaggtccatgcatgtggtgtcaaccccgtggagacatacattcgctctggtacttatagtagaaaaccactcttaccctatactcctggctcagatgtggctggggtgatagaagctgttggagataatgcatctgctttcaagaaaggtgacagagttttcactagcagcacgatctctgggggttatgcagagtatgctcttgcagcagaccacactgtttacaaactacctgaaaaactggactttaaacaaggagctgccatcggcattccatattttactgcttatcgagctctgatccacagtgcctgtgtgaaagctggagagagtgttctggttcatggggcaagtggaggagttggattagcagcatgccaaattgctagagcttatggcttaaagattttgggcactgctggtactgaggaaggacaaaagattgttttgcaaaatggagcccatgaagtgttcaatcacagagaagtgaattacattgataaaattaagaagtatgttggtgagaaaggaattgatataattattgaaatgttagctaatgtaaatcttagtaaagacttgagtcttctgtcacatggaggacgagtgatagttgttggcagcagaggtactattgaaataaacccacgagacaccatggcaaaggagtcgagtataattggagttactctcttttcctcaaccaaggaggaatttcagcaatatgcagcagcccttcaagctggaatggaaattggctggttgaaacctgtgataggttctcaatatccattggagaaggtggccgaggctcatgaaaatatcattcatggtagtggggctactggtaaaatgattcttctcttatgatgattaattctttcatggatttcctatgtaattagaggtactgtctttcccccagttgtacttaccctatcttttctttaattaacattcgattccatgagcttcttatgtgaaaaaataagatttttctttagagagcagaagcagaagagtaaaatttattgtatagctagcaatatttttttatgccatctgtctcaaatcaaagagtcatcatagtaggaaatagcatgttagttgtcatttggcatgagtgtgcattccagtaattcttaattgatatttgattaattccatacctttgattaaaacatgctagttcaaaataagactgctcagtttccaagggttttcaagcctacttacctttataaaggttctctagtctctgattagccatgactgtattggactttgaacattttctgaactaaaaacctctattctaaactaatctcatttggatgtgtaagtcttttgtaaaggcaagaataaataatatccaggacaatttattagttttctcagtattttcccaaatattagaatatttacttcattattggttggctgccaatgaccccatatgttctgtgagaatagtagctttatctttgatataatacatagtctccaaataggtaatacttcgcaattgattagattttcagagtagatttagagttatctgtttttctggtgagggtcaaatatttttgttaattaagctcacaaatttgataaattaagaattatctgcatttgtctcgtaacataataatgtgtaataaagtctatagaaaatta

SEQ ID NO: 370857 - DNA, 2143 bp, Homo sapiens
caggagctggtggtgaaaaactgatctcgcatgttcagaaactgcacaagctctaccacatcctcgtcaacactgcccttccggctgaggtccgctttgctcaaacattgcgccttccatttcctgaactccgcgctgcgatccatgggtgacggactcagggtctgcgctcggctccttcatggtagcctcgtctctccctgggggcagccatattgaagcgagcggtggccgaaaaggtccaaacttcctcttcgttcttaatttgggaaattctagtgccttcgcctaggggtggagagaggcgcacagctggggtggagcgaggcgcacagcctgggtggagcctgcaaaagttggagaaggtgtggcagtcctcatttctgtggaatctgaagaagcccacgcagattttaattcccactctagattctgtatctagatcaccatggcgactggacagaagttgatgagagctgttagagtttttgaatttggtggaccagaagtcctgaaattgcgatcagatattgcagtaccgattccaaaagaccatcaggttctaatcaaggtccatgcatgtggtgtcaaccccgtggagacatacattcgctctggtacttatagtagaaaaccactcttaccctatactcctggctcagatgtggctggggtgatagaagctgttggagataatgcatctgctttcaagaaaggtgacagagttttcactagcagcacgatctctgggggttatgcagagtatgctcttgcagcagaccacactgtttacaaactacctgaaaaactggactttaaacaaggagctgccatcggcattccatattttactgcttatcgagctctgatccacagtgcctgtgtgaaagctggagagagtgttctggttcatggggcaagtggaggagttggattagcagcatgccaaattgctagagcttatggcttaaagattttgggcactgctggtactgaggaaggacaaaagattgttttgcaaaatggagcccatgaagtgttcaatcacagagaagtgaattacattgataaaattaaggttgttggcagcagaggtactattgaaataaacccacgagacaccatggcaaaggagtcgagtataattggagttactctcttttcctcaaccaaggaggaatttcagcaatatgcagcagcccttcaagctggaatggaaattggctggttgaaacctgtgataggttctcaatatccattggagaaggtggccgaggctcatgaaaatatcattcatggtagtggggctactggtaaaatgattcttctcttatgatgattaattctttcatggatttcctatgtaattagaggtactgtctttcccccagttgtacttaccctatcttttctttaattaacattcgattccatgagcttcttatgtgaaaaaataagatttttctttagagagcagaagcagaagagtaaaatttattgtatagctagcaatatttttttatgccatctgtctcaaatcaaagagtcatcatagtaggaaatagcatgttagttgtcatttggcatgagtgtgcattccagtaattcttaattgatatttgattaattccatacctttgattaaaacatgctagttcaaaataagactgctcagtttccaagggttttcaagcctacttacctttataaaggttctctagtctctgattagccatgactgtattggactttgaacattttctgaactaaaaacctctattctaaactaatctcatttggatgtgtaagtcttttgtaaaggcaagaataaataatatccaggacaatttattagttttctcagtattttcccaaatattagaatatttacttcattattggttggctgccaatgaccccatatgttctgtgagaatagtagctttatctttgatataatacatagtctccaaataggtaatacttcgcaattgattagattttcagagtagatttagagttatctgtttttctggtgagggtcaaatatttttgttaattaagctcacaaatttgataaattaagaattatctgcatttgtctcgtaacataataatgtgtaataaagtctatagaaaatta

SEQ ID NO: 370858 - DNA, 2230 bp, Homo sapiens
caggagctggtggtgaaaaactgatctcgcatgttcagaaactgcacaagctctaccacatcctcgtcaacactgcccttccggctgaggtccgctttgctcaaacattgcgccttccatttcctgaactccgcgctgcgatccatgggtgacggactcagggtctgcgctcggctccttcatggtagcctcgtctctccctgggggcagccatattgaagcgagcggtggccgaaaaggtccaaacttcctcttcgttcttaatttgggaaattctagtgccttcgcctaggggtggagagaggcgcacagctggggtggagcgaggcgcacagcctgggtggagcctgcaaaagttggagaaggtgtggcagtcctcatttctgtggaatctgaagaagcccacgcagattttaattcccactctagattctggcttcatcgttatgaagcatatgatgatcccgtggatagtatctagatcaccatggcgactggacagaagttgatgagagctgttagagtttttgaatttggtggaccagaagtcctgaaattgcgatcagatattgcagtaccgattccaaaagaccatcaggttctaatcaaggtccatgcatgtggtgtcaaccccgtggagacatacattcgctctggtacttatagtagtgttggagataatgcatctgctttcaagaaaggtgacagagttttcactagcagcacgatctctgggggttatgcagagtatgctcttgcagcagaccacactgtttacaaactacctgaaaaactggactttaaacaaggagctgccatcggcattccatattttactgcttatcgagctctgatccacagtgcctgtgtgaaagctggagagagtgttctggttcatggggcaagtggaggagttggattagcagcatgccaaattgctagagcttatggcttaaagattttgggcactgctggtactgaggaaggacaaaagattgttttgcaaaatggagcccatgaagtgttcaatcacagagaagtgaattacattgataaaattaagaagtatgttggtgagaaaggaattgatataattattgaaatgttagctaatgtaaatcttagtaaagacttgagtcttctgtcacatggaggacgagtgatagttgttggcagcagaggtactattgaaataaacccacgagacaccatggcaaaggagtcgagtataattggagttactctcttttcctcaaccaaggaggaatttcagcaatatgcagcagcccttcaagctggaatggaaattggctggttgaaacctgtgataggttctcaatatccattggagaaggtggccgaggctcatgaaaatatcattcatggtagtggggctactggtaaaatgattcttctcttatgatgattaattctttcatggatttcctatgtaattagaggtactgtctttcccccagttgtacttaccctatcttttctttaattaacattcgattccatgagcttcttatgtgaaaaaataagatttttctttagagagcagaagcagaagagtaaaatttattgtatagctagcaatatttttttatgccatctgtctcaaatcaaagagtcatcatagtaggaaatagcatgttagttgtcatttggcatgagtgtgcattccagtaattcttaattgatatttgattaattccatacctttgattaaaacatgctagttcaaaataagactgctcagtttccaagggttttcaagcctacttacctttataaaggttctctagtctctgattagccatgactgtattggactttgaacattttctgaactaaaaacctctattctaaactaatctcatttggatgtgtaagtcttttgtaaaggcaagaataaataatatccaggacaatttattagttttctcagtattttcccaaatattagaatatttacttcattattggttggctgccaatgaccccatatgttctgtgagaatagtagctttatctttgatataatacatagtctccaaataggtaatacttcgcaattgattagattttcagagtagatttagagttatctgtttttctggtgagggtcaaatatttttgttaattaagctcacaaatttgataaattaagaattatctgcatttgtctcgtaacataataatgtgtaataaagtctatagaaaatta

SEQ ID NO: 370859 - DNA, 2068 bp, Homo sapiens
caggagctggtggtgaaaaactgatctcgcatgttcagaaactgcacaagctctaccacatcctcgtcaacactgcccttccggctgaggtccgctttgctcaaacattgcgccttccatttcctgaactccgcgctgcgatccatgggtgacggactcagggtctgcgctcggctccttcatggtagcctcgtctctccctgggggcagccatattgaagcgagcggtggccgaaaaggtccaaacttcctcttcgttcttaatttgggaaattctagtgccttcgcctaggggtggagagaggcgcacagctggggtggagcgaggcgcacagcctgggtggagcctgcaaaagttggagaaggtgtggcagtcctcatttctgtggaatctgaagaagcccacgcagattttaattcccactctagattctggcttcatcgttatgaagcatatgatgatcccgtggatagtatctagatcaccatggcgactggacagaagttgatgagagctgttagagtttttgaatttggtggaccagaagtcctgaaattgcgatcagatattgcagtaccgattccaaaagaccatcaggttctaatcaaggtccatgcatgtggtgtcaaccccgtggagacatacattcgctctggtacttatagtagaaaaccactcttaccctatactcctggctcagatgtggctggggtgatagaagctgttggagataatgcatctgctttcaaggttggattagcagcatgccaaattgctagagcttatggcttaaagattttgggcactgctggtactgaggaaggacaaaagattgttttgcaaaatggagcccatgaagtgttcaatcacagagaagtgaattacattgataaaattaagaagtatgttggtgagaaaggaattgatataattattgaaatgttagctaatgtaaatcttagtaaagacttgagtcttctgtcacatggaggacgagtgatagttgttggcagcagaggtactattgaaataaacccacgagacaccatggcaaaggagtcgagtataattggagttactctcttttcctcaaccaaggaggaatttcagcaatatgcagcagcccttcaagctggaatggaaattggctggttgaaacctgtgataggttctcaatatccattggagaaggtggccgaggctcatgaaaatatcattcatggtagtggggctactggtaaaatgattcttctcttatgatgattaattctttcatggatttcctatgtaattagaggtactgtctttcccccagttgtacttaccctatcttttctttaattaacattcgattccatgagcttcttatgtgaaaaaataagatttttctttagagagcagaagcagaagagtaaaatttattgtatagctagcaatatttttttatgccatctgtctcaaatcaaagagtcatcatagtaggaaatagcatgttagttgtcatttggcatgagtgtgcattccagtaattcttaattgatatttgattaattccatacctttgattaaaacatgctagttcaaaataagactgctcagtttccaagggttttcaagcctacttacctttataaaggttctctagtctctgattagccatgactgtattggactttgaacattttctgaactaaaaacctctattctaaactaatctcatttggatgtgtaagtcttttgtaaaggcaagaataaataatatccaggacaatttattagttttctcagtattttcccaaatattagaatatttacttcattattggttggctgccaatgaccccatatgttctgtgagaatagtagctttatctttgatataatacatagtctccaaataggtaatacttcgcaattgattagattttcagagtagatttagagttatctgtttttctggtgagggtcaaatatttttgttaattaagctcacaaatttgataaattaagaattatctgcatttgtctcgtaacataataatgtgtaataaagtctatagaaaatta

SEQ ID NO: 370860 - DNA, 1136 bp, Homo sapiens
taatgttttaccacaatttaacactattttacagtaatctttaactgtagaattgctgtttttcatgttaggttgttggcagcagaggtactattgaaataaacccacgagacaccatggcaaaggagtcgagtataattggagttactctcttttcctcaaccaaggaggaatttcagcaatatgcagcagcccttcaagctggaatggaaattggctggttgaaacctgtgataggttctcaatatccattggagaaggtggccgaggctcatgaaaatatcattcatggtagtggggctactggtaaaatgattcttctcttatgatgattaattctttcatggatttcctatgtaattagaggtactgtctttcccccagttgtacttaccctatcttttctttaattaacattcgattccatgagcttcttatgtgaaaaaataagatttttctttagagagcagaagcagaagagtaaaatttattgtatagctagcaatatttttttatgccatctgtctcaaatcaaagagtcatcatagtaggaaatagcatgttagttgtcatttggcatgagtgtgcattccagtaattcttaattgatatttgattaattccatacctttgattaaaacatgctagttcaaaataagactgctcagtttccaagggttttcaagcctacttacctttataaaggttctctagtctctgattagccatgactgtattggactttgaacattttctgaactaaaaacctctattctaaactaatctcatttggatgtgtaagtcttttgtaaaggcaagaataaataatatccaggacaatttattagttttctcagtattttcccaaatattagaatatttacttcattattggttggctgccaatgaccccatatgttctgtgagaatagtagctttatctttgatataatacatagtctccaaataggtaatacttcgcaattgattagattttcagagtagatttagagttatctgtttttctggtgagggtcaaatatttttgttaattaagctcacaaatttgataaattaagaattatctgcatttgtctcgtaacataataatgtgtaataaagtctatagaaaatta

SEQ ID NO: 370861 - DNA, 1238 bp, Homo sapiens
caggagctggtggtgaaaaactgatctcgcatgttcagaaactgcacaagctctaccacatcctcgtcaacactgcccttccggctgaggtccgctttgctcaaacattgcgccttccatttcctgaactccgcgctgcgatccatgggtgacggactcagggtctgcgctcggctccttcatggtagcctcgtctctccctgggggcagccatattgaagcgagcggtggccgaaaaggtccaaacttcctcttcgttcttaatttgggaaattctagtgccttcgcctaggggtggagagaggcgcacagctggggtggagcgaggcgcacagcctgggtggagcctgcaaaagttggagaaggtgtggcagtcctcatttctgtggaatctgaagaagcccacgcagattttaattcccactctagattctgtatctagatcaccatggcgactggacagaagttgatgagagctgttagagtttttgaatttggtggaccagaagtcctgaaattgcgatcagatattgcagtaccgattccaaaagaccatcaggttctaatcaaggtccatgcatgtggtgtcaaccccgtggagacatacattcgctctggtacttatagtagaaaaccactcttaccctatactcctggctcagatgtggctggggtgatagaagctgttggagataatgcatctgctttcaagaaaggtgacagagttttcactagcagcacgatctctgggggttatgcagagtatgctcttgcagcagaccacactgtttacaaactacctgaaaaactggactttaaacaaggagctgccatcggcattccatattttactgcttatcgagctctgatccacagtgcctgtgtgaaagctggagagagtgttctggttcatggggcaagtggaggagttggattagcagcatgccaaattgctagagcttatggcttaaagattttgggcactgctggtactgaggaaggacaaaagattgttttgcaaaatggagcccatgaagtgttcaatcacagagaagtgaattacattgataaaattaagaagtatgttggtgagaaaggaattgatataattattgaaatgttagctaatgtaaatcttagtaaagacttgagtcttctgtcacatggaggacgagtgatatgttggcagtgtttggactctgggcactgtttggactctgggcactgtttggactctg

SEQ ID NO: 370862 - DNA, 1457 bp, Homo sapiens
caggagctggtggtgaaaaactgatctcgcatgttcagaaactgcacaagctctaccacatcctcgtcaacactgcccttccggctgaggtccgctttgctcaaacattgcgccttccatttcctgaactccgcgctgcgatccatgggtgacggactcagggtctgcgctcggctccttcatggtagcctcgtctctccctgggggcagccatattgaagcgagcggtggccgaaaaggtccaaacttcctcttcgttcttaatttgggaaattctagtgccttcgcctaggggtggagagaggcgcacagctggggtggagcgaggcgcacagcctgggtggagcctgcaaaagttggagaaggtgtggcagtcctcatttctgtggaatctgaagaagcccacgcagattttaattcccactctagattctgtatctagatcaccatggcgactggacagaagttgatgagagctgttagagtttttgaatttggtggaccagaagtcctgaaattgcgatcagatattgcagtaccgattccaaaagaccatcaggttctaatcaaggtccatgcatgtggtgtcaaccccgtggagacatacattcgctctggtacttatagtagaaaaccactcttaccctatactcctggctcagatgtggctggggtgatagaagctgttggagataatgcatctgctttcaagaaaggtgacagagttttcactagcagcacgatctctgggggttatgcagagtatgctcttgcagcagaccacactgtttacaaactacctgaaaaactggactttaaacaaggagctgccatcggcattccatattttactgcttatcgagctctgatccacagtgcctgtgtgaaagctggagagagtgttctggttcatggggcaagtggaggagttggattagcagcatgccaaattgctagagcttatggcttaaagattttgggcactgctggtactgaggaaggacaaaagattgttttgcaaaatggagcccatgaagtgttcaatcacagagaagtgaattacattgataaaattaagaagtatgttggtgagaaaggaattgatataattattgaaatgttagctaatgtaaatcttagtaaagacttgagtcttctgtcacatggaggacgagtgatatgttggcagcagaggaattatgaactggggtaaacccattttgaatattagcattgccaatatcctgtattcttgttttacatttggattagaaatttaacatagtaattcttaagtcttttgtctgatttttaaagtactttcttataaatttggatcatgttatgatttgtaacattcacacaacacctcacttttgaatctataaaagaattgcacgtatgagaaacctatatttcaatactgctgaaacagacatgaaataaagaatttaaag

SEQ ID NO: 370863 - DNA, 1005 bp, Homo sapiens
caggagctggtggtgaaaaactgatctcgcatgttcagaaactgcacaagctctaccacatcctcgtcaacactgcccttccggctgaggtccgctttgctcaaacattgcgccttccatttcctgaactccgcgctgcgatccatgggtgacggactcagggtctgcgctcggctccttcatggtagcctcgtctctccctgggggcagccatattgaagcgagcggtggccgaaaaggtccaaacttcctcttcgttcttaatttgggaaattctagtgccttcgcctaggggtggagagaggcgcacagctggggtggagcgaggcgcacagcctgggtggagcctgcaaaagttggagaaggtgtggcagtcctcatttctgtggaatctgaagaagcccacgcagattttaattcccactctagattctgtatctagatcaccatggcgactggacagaagttgatgagagctgttagagtttttgaatttggtggaccagaagtcctgaaattgcgatcagatattgcagtaccgattccaaaagaccatcaggttctaatcaaggtccatgcatgtggtgtcaaccccgtggagacatacattcgctctggtacttatagtagaaaaccactcttaccctatactcctggctcagatgtggctggggtgatagaagctgttggagataatgcatctgctttcaagaaaggtgacagagttttcactagcagcacgatctctgggggttatgcagagtatgctcttgcagcagaccacactgtttacaaactacctgaaaaactggaatttatgatgtagcactgggtatgttctctgcataaatctctgtggttttagtcttgtcccaactttcagccaactgcattcactacttggttggtgcctgtggccttagggctactacatagtcttcagtgcccattcttgatgaaaagtagagaataacctgtataataaacaaacattgtttaactcag

SEQ ID NO: 370864 - DNA, 2245 bp, Homo sapiens
caggagctggtggtgaaaaactgatctcgcatgttcagaaactgcacaagctctaccacatcctcgtcaacactgcccttccggctgaggtccgctttgctcaaacattgcgccttccatttcctgaactccgcgctgcgatccatgggtgacggactcagggtctgcgctcggctccttcatggtagcctcgtctctccctgggggcagccatattgaagcgagcggtggccgaaaaggtccaaacttcctcttcgttcttaatttgggaaattctagtgccttcgcctaggggtggagagaggcgcacagctggggtggagcgaggcgcacagcctgggtggagcctgcaaaagttggagaaggtgtggcagtcctcatttctgtggaatctgaagaagcccacgcagattttaattcccactctagattctgtatctagatcaccatggcgactggacagaagttgatgagagctgttagagtttttgaatttggtggaccagaagtcctgaaattgcgatcagatattgcagtaccgattccaaaagaccatcaggttctaatcaaggtccatgcatgtggtgtcaaccccgtggagacatacattcgctctggtacttatagtagaaaaccactcttaccctatactcctggctcagatgtggctggggtgatagaagctgttggagataatgcatctgctttcaagaaaggtgacagagttttcactagcagcacgatctctgggggttatgcagagtatgctcttgcagcagaccacactgtttacaaactacctgaaaaactggactttaaacaaggagctgccatcggcattccatattttactgcttatcgagctctgatccacagtgcctgtgtgaaagctggagagagtgttctggttcatggggcaagtggaggagttggattagcagcatgccaaattgctagagcttatggcttaaagattttgggcactgctggtactgaggaaggacaaaagattgttttgcaaaatggagcccatgaagtgttcaatcacagagaagtgaattacattgataaaattaagaagtatgttggtgagaaaggaattgatataattattgaaatgttagctaatgtaaatcttagtaaagacttgagtcttctgtcacatggaggacgagtgatagttgttggcagcagaggtactattgaaataaacccacgagacaccatggcaaaggagtcgagtataattggagttactctcttttcctcaaccaaggaggaatttcagcaatatgcagcagcccttcaagctggaatggaaattggctggttgaaacctgtgataggttctcaatatccattggagaaggtggccgaggctcatgaaaatatcattcatggtagtggggctactggtaaaatgattcttctcttatgatgattaattctttcatggatttcctatgtaattagaggtactgtctttcccccagttgtacttaccctatcttttctttaattaacattcgattccatgagcttcttatgtgaaaaaataagatttttctttagagagcagaagcagaagagtaaaatttattgtatagctagcaatatttttttatgccatctgtctcaaatcaaagagtcatcatagtaggaaatagcatgttagttgtcatttggcatgagtgtgcattccagtaattcttaattgatatttgattaattccatacctttgattaaaacatgctagttcaaaataagactgctcagtttccaagggttttcaagcctacttacctttataaaggttctctagtctctgattagccatgactgtattggactttgaacattttctgaactaaaaacctctattctaaactaatctcatttggatgtgtaagtcttttgtaaaggcaagaataaataatatccaggacaatttattagttttctcagtattttcccaaatattagaatatttacttcattattggttggctgccaatgaccccatatgttctgtgagaatagtagctttatctttgatataatacatagtctccaaataggtaatacttcgcaattgattagattttcagagtagatttagagttatctgtttttctggtgagggtcaaatatttttgttaattaagctcacaaatttgataaattaagaattatctgcatttgtctcgtaacataataatgtgtaataaagtctatagaaaatta

SEQ ID NO: 370865 - DNA, 1113 bp, Homo sapiens
caggagctggtggtgaaaaactgatctcgcatgttcagaaactgcacaagctctaccacatcctcgtcaacactgcccttccggctgaggtccgctttgctcaaacattgcgccttccatttcctgaactccgcgctgcgatccatgggtgacggactcagggtctgcgctcggctccttcatggtagcctcgtctctccctgggggcagccatattgaagcgagcggtggccgaaaaggtccaaacttcctcttcgttcttaatttgggaaattctagtgccttcgcctaggggtggagagaggcgcacagctggggtggagcgaggcgcacagcctgggtggagcctgcaaaagttggagaaggtgtggcagtcctcatttctgtggaatctgaagaagcccacgcagattttaattcccactctagattctggcttcatcgttatgaagcatatgatgatcccgtggatagtatctagatcaccatggcgactggacagaagttgatgagagctgttagagtttttgaatttggtggaccagaagtcctgaaattgcgatcagatattgcagtaccgattccaaaagaccatcaggttctaatcaaggtccatgcatgtggtgtcaaccccgtggagacatacattcgctctggtacttatagtagaaaaccactcttaccctatactcctggctcagatgtggctggggtgatagaagctgttggagataatgcatctgctttcaagtgcctgtgtgaaagctggagagagtgttctggttcatggggcaagtggaggagttggattagcagcatgccaaattgctagagcttatggcttaaagattttgggcactgctggtactgaggaaggacaaaagattgttttgcaaaatggagcccatgaagtgttcaatcacagagaagtgaattacattgataaaattaagaagtatgttggtgagaaaggaattgatataattattgaaatgttagctaatgtaaatcttagtaaagacttgagtcttctgtcacatggaggacgagtgatatgttggcagtgtttggactctgggcactgtttggactctgggcactgtttggactctg

SEQ ID NO: 370866 - DNA, 2284 bp, Homo sapiens
caggagctggtggtgaaaaactgatctcgcatgttcagaaactgcacaagctctaccacatcctcgtcaacactgcccttccggctgaggtccgctttgctcaaacattgcgccttccatttcctgaactccgcgctgcgatccatgggtgacggactcagggtctgcgctcggctccttcatggtagcctcgtctctccctgggggcagccatattgaagcgagcggtggccgaaaaggtccaaacttcctcttcgttcttaatttgggaaattctagtgccttcgcctaggggtggagagaggcgcacagctggggtggagcgaggcgcacagcctgggtggagcctgcaaaagttggagaaggtgtggcagtcctcatttctgtggaatctgaagaagcccacgcagattttaattcccactctagattctggcttcatcgttatgaagcatatgatgatcccgtggatagtatctagatcaccatggcgactggacagaagttgatgagagctgttagagtttttgaatttggtggaccagaagtcctgaaattgcgatcagatattgcagtaccgattccaaaagaccatcaggttctaatcaaggtccatgcatgtggtgtcaaccccgtggagacatacattcgctctggtacttatagtagaaaaccactcttaccctatactcctggctcagatgtggctggggtgatagaagctgttggagataatgcatctgctttcaagaaaggtgacagagttttcactagcagcacgatctctgggggttatgcagagtatgctcttgcagcagaccacactgtttacaaactacctgaaaaactggactttaaacaaggagctgccatcggcattccatattttactgcttatcgagctctgatccacagtgcctgtgtgaaagctggagagagtgttctggttcatggggcaagtggaggagttggattagcagcatgccaaattgctagagcttatggcttaaagattttgggcactgctggtactgaggaaggacaaaagattgttttgcaaaatggagcccatgaagtgttcaatcacagagaagtgaattacattgataaaattaagaagtatgttggtgagaaaggaattgatataattattgaaatgttagctaatgtaaatcttagtaaagacttgagtcttctgtcacatggaggacgagtgatagttgttggcagcagaggtactattgaaataaacccacgagacaccatggcaaaggagtcgagtataattggagttactctcttttcctcaaccaaggaggaatttcagcaatatgcagcagcccttcaagctggaatggaaattggctggttgaaacctgtgataggttctcaatatccattggagaaggtggccgaggctcatgaaaatatcattcatggtagtggggctactggtaaaatgattcttctcttatgatgattaattctttcatggatttcctatgtaattagaggtactgtctttcccccagttgtacttaccctatcttttctttaattaacattcgattccatgagcttcttatgtgaaaaaataagatttttctttagagagcagaagcagaagagtaaaatttattgtatagctagcaatatttttttatgccatctgtctcaaatcaaagagtcatcatagtaggaaatagcatgttagttgtcatttggcatgagtgtgcattccagtaattcttaattgatatttgattaattccatacctttgattaaaacatgctagttcaaaataagactgctcagtttccaagggttttcaagcctacttacctttataaaggttctctagtctctgattagccatgactgtattggactttgaacattttctgaactaaaaacctctattctaaactaatctcatttggatgtgtaagtcttttgtaaaggcaagaataaataatatccaggacaatttattagttttctcagtattttcccaaatattagaatatttacttcattattggttggctgccaatgaccccatatgttctgtgagaatagtagctttatctttgatataatacatagtctccaaataggtaatacttcgcaattgattagattttcagagtagatttagagttatctgtttttctggtgagggtcaaatatttttgttaattaagctcacaaatttgataaattaagaattatctgcatttgtctcgtaacataataatgtgtaataaagtctatagaaaatta

SEQ ID NO: 370867 - DNA, 1875 bp, Homo sapiens
cgggctgcaggaattcggccacgagaagaagcttacgcagattttaattcccactctagattctgtatctagatcaccatggcgactggacagaagttgatgagagctgttagagtttttgaatttggtggaccagaagtcctgaaattgcgatcagatattgcagtaccgattccaaaagaccatcaggttctaatcaaggtccatgcatgtggtgtcaaccccgtggagacatacattcgctctggtacttatagtagaaaaccactcttaccctatactcctggctcagatgtggctggggtgatagaagctgttggagataatgcatctgctttcaagaaaggtgacagagttttcactagcagcacgatctctgggggttatgcagagtatgctcttgcagcagaccacactgtttacaaactacctgaaaaactggactttaaacaaggagctgccatcggcattccatattttactgcttatcgagctctgatccacagtgcctgtgtgaaagctggagagagtgttctggttcatggggcaagtggaggagttggattagcagcatgccaaattgctagagcttatggcttaaagattttgggcactgctggtactgaggaaggacaaaagattgttttgcaaaatggagcccatgaagtgttcaatcacagagaagtgaattacattgataaaattaagaagtatgttggtgagaaaggaattgatataattattgaaatgttagctaatgtaaatcttagtaaagacttgagtcttctgtcacatggaggacgagtgatagttgttggcagcagaggtactattgaaataaacccacgagacaccatggcaaaggagtcgagtataattggagttactctcttttcctcaaccaaggaggaatttcagcaatatgcagcagcccttcaagctggaatggaaattggctggttgaaacctgtgataggttctcaatatccattggagaaggtggccgaggctcatgaaaatatcattcatggtagtggggctactggtaaaatgattcttctcttatgatgattaattctttcatggatttcctatgtaattagaggtactgtctttcccccagttgtacttaccctatcttttctttaattaacattcgattccatgagcttcttatgtgaaaaaataagatttttctttagagagcagaagcagaagagtaaaatttattgtatagctagcaatatttttttatgccatctgtctcaaatcaaagagtcatcatagtaggaaatagcatgttagttgtcatttggcatgagtgtgcattccagtaattcttaattgatatttgattaattccatacctttgattaaaacatgctagttcaaaataagactgctcagtttccaagggttttcaagcctacttacctttataaaggttctctagtctctgattagccatgactgtattggactttgaacattttctgaactaaaaacctctattctaaactaatctcatttggatgtgtaagtcttttgtaaaggcaagaataaataatatccaggacaatttattagttttctcagtattttcccaaatattagaatatttacttcattattggttggctgccaatgaccccatatgttctgtgagaatagtagctttatctttgatataatacatagtctccaaataggtaatacttcgcaattgattagattttcagagtagatttagagttatctgtttttctggtgagggtcaaatatttttgttaattaagctcacaaatttgataaattaagaattatctgcatttgtctcgtaacataataatgtgtaataaagtctatagaaaatta

SEQ ID NO: 370868 - DNA, 2191 bp, Homo sapiens
caggagctggtggtgaaaaactgatctcgcatgttcagaaactgcacaagctctaccacatcctcgtcaacactgcccttccggctgaggtccgctttgctcaaacattgcgccttccatttcctgaactccgcgctgcgatccatgggtgacggactcagggtctgcgctcggctccttcatggtagcctcgtctctccctgggggcagccatattgaagcgagcggtggccgaaaaggtccaaacttcctcttcgttcttaatttgggaaattctagtgccttcgcctaggggtggagagaggcgcacagctggggtggagcgaggcgcacagcctgggtggagcctgcaaaagttggagaaggtgtggcagtcctcatttctgtggaatctgaagaagcccacgcagattttaattcccactctagattctgtatctagatcaccatggcgactggacagaagttgatgagagctgttagagtttttgaatttggtggaccagaagtcctgaaattgcgatcagatattgcagtaccgattccaaaagaccatcaggttctaatcaaggtccatgcatgtggtgtcaaccccgtggagacatacattcgctctggtacttatagtagtgttggagataatgcatctgctttcaagaaaggtgacagagttttcactagcagcacgatctctgggggttatgcagagtatgctcttgcagcagaccacactgtttacaaactacctgaaaaactggactttaaacaaggagctgccatcggcattccatattttactgcttatcgagctctgatccacagtgcctgtgtgaaagctggagagagtgttctggttcatggggcaagtggaggagttggattagcagcatgccaaattgctagagcttatggcttaaagattttgggcactgctggtactgaggaaggacaaaagattgttttgcaaaatggagcccatgaagtgttcaatcacagagaagtgaattacattgataaaattaagaagtatgttggtgagaaaggaattgatataattattgaaatgttagctaatgtaaatcttagtaaagacttgagtcttctgtcacatggaggacgagtgatagttgttggcagcagaggtactattgaaataaacccacgagacaccatggcaaaggagtcgagtataattggagttactctcttttcctcaaccaaggaggaatttcagcaatatgcagcagcccttcaagctggaatggaaattggctggttgaaacctgtgataggttctcaatatccattggagaaggtggccgaggctcatgaaaatatcattcatggtagtggggctactggtaaaatgattcttctcttatgatgattaattctttcatggatttcctatgtaattagaggtactgtctttcccccagttgtacttaccctatcttttctttaattaacattcgattccatgagcttcttatgtgaaaaaataagatttttctttagagagcagaagcagaagagtaaaatttattgtatagctagcaatatttttttatgccatctgtctcaaatcaaagagtcatcatagtaggaaatagcatgttagttgtcatttggcatgagtgtgcattccagtaattcttaattgatatttgattaattccatacctttgattaaaacatgctagttcaaaataagactgctcagtttccaagggttttcaagcctacttacctttataaaggttctctagtctctgattagccatgactgtattggactttgaacattttctgaactaaaaacctctattctaaactaatctcatttggatgtgtaagtcttttgtaaaggcaagaataaataatatccaggacaatttattagttttctcagtattttcccaaatattagaatatttacttcattattggttggctgccaatgaccccatatgttctgtgagaatagtagctttatctttgatataatacatagtctccaaataggtaatacttcgcaattgattagattttcagagtagatttagagttatctgtttttctggtgagggtcaaatatttttgttaattaagctcacaaatttgataaattaagaattatctgcatttgtctcgtaacataataatgtgtaataaagtctatagaaaatta

SEQ ID NO: 370869 - DNA, 1538 bp, Homo sapiens
caggagctggtggtgaaaaactgatctcgcatgttcagaaactgcacaagctctaccacatcctcgtcaacactgcccttccggctgaggtccgctttgctcaaacattgcgccttccatttcctgaactccgcgctgcgatccatgggtgacggactcagggtctgcgctcggctccttcatggtagcctcgtctctccctgggggcagccatattgaagcgagcggtggccgaaaaggtccaaacttcctcttcgttcttaatttgggaaattctagtgccttcgcctaggggtggagagaggcgcacagctggggtggagcgaggcgcacagcctgggtggagcctgcaaaagttggagaaggtgtggcagtcctcatttctgtggaatctgaagaagcccacgcagattttaattcccactctagattctgtatctagatcaccatggcgactggacagaagttgatgagagctgttagagtttttgaatttggtggaccagaagtcctgaaattgcgatcagatattgcatataattggagttactctcttttcctcaaccaaggaggaatttcagcaatatgcagcagcccttcaagctggaatggaaattggctggttgaaacctgtgataggttctcaatatccattggagaaggtggccgaggctcatgaaaatatcattcatggtagtggggctactggtaaaatgattcttctcttatgatgattaattctttcatggatttcctatgtaattagaggtactgtctttcccccagttgtacttaccctatcttttctttaattaacattcgattccatgagcttcttatgtgaaaaaataagatttttctttagagagcagaagcagaagagtaaaatttattgtatagctagcaatatttttttatgccatctgtctcaaatcaaagagtcatcatagtaggaaatagcatgttagttgtcatttggcatgagtgtgcattccagtaattcttaattgatatttgattaattccatacctttgattaaaacatgctagttcaaaataagactgctcagtttccaagggttttcaagcctacttacctttataaaggttctctagtctctgattagccatgactgtattggactttgaacattttctgaactaaaaacctctattctaaactaatctcatttggatgtgtaagtcttttgtaaaggcaagaataaataatatccaggacaatttattagttttctcagtattttcccaaatattagaatatttacttcattattggttggctgccaatgaccccatatgttctgtgagaatagtagctttatctttgatataatacatagtctccaaataggtaatacttcgcaattgattagattttcagagtagatttagagttatctgtttttctggtgagggtcaaatatttttgttaattaagctcacaaatttgataaattaagaattatctgcatttgtctcgtaacataataatgtgtaataaagtctatagaaaatta

SEQ ID NO: 370870 - DNA, 1112 bp, Homo sapiens
gggcgcgcgacactgcaccgcccctcccttcgcggcgcctgctctgtagagccggcggaaccgggtagcttggccaggttgtgaggaaccgcagcgcgccgcaggaccgggccgctgagcctgcagccgccccgcgccgtgacctgcgaccctagaccccgactccctttggctcagcccgcgcgccccaggcccggcccgggcggcgcgacgggaggatgagcggcgggcggcggaaggaggagccgcctcagccgcagctggccaacggggccctcaaagtctccgtctggagtaaggtgctgcggagcgacgcggcctgggaggataaggatgaatttttagatgtgatctactggttccgacagatcattgctgtggtcctgggtgtcatttggggagttttgccattacgagggttcttgggaatagcaggattctgcctgatcaatgcaggagtcctgtacctctacttcagcaattacctacagattgatgaggaagaatatggtggcacgtgggagctcacgaaggaagggtttatgacctcttttgccttgttcatggtcatttggatcatcttttacactgccatccattatgactgatggtgtacagctcccaagtgctccctatccagtccaaaggaccctcttgattacagcacaggaacttgatcgttggggaaccccagccccttggaacttggaagacccgtgtttcctggaccgcgaatcagtgtgttgggcatcagtgttttctgcaagggttgtgacctgaaactttttaaaaaccacccacctttggggaagcatttctgaatttatccatcaccaaccatttcttcttggataccatcaagtaacagctattatttgccaagtggagctgtcatttaatttgatgcacctctggattcagatgaaacattaaattgtcttcctcgattctccatcgggtgtagagtttttaaactatcaatggcatttcaagtcttctgaaacagcatggctgtatgtgcgtggtccatagcacagtacatgcagcatctaataagagtttccattgtagaatgttttcacatacttgaataaatcaaatctttaattgag

SEQ ID NO: 370871 - DNA, 952 bp, Homo sapiens
gggcgcgcgacactgcaccgcccctcccttcgcggcgcctgctctgtagagccggcggaaccgggtagcttggccaggttgtgaggaaccgcagcgcgccgcaggaccgggccgctgagcctgcagccgccccgcgccgtgacctgcgaccctagaccccgactccctttggctcagcccgcgcgccccaggcccggcccgggcggcgcgacgggaggatgagcggcgggcggcggaaggaggagccgcctcagccgcagctggccaacggggccctcaaagtctccgtctggagtaaggtgctgcggagcgacgcggcctgggaggataaggatgaatttttagatgtgatctactggttccgacagatcattgctgtggtcctgggtgtcatttggggagttttgccattacgagggttcttgggaatagcaggattctgcctgatcaatgcaggagtcctgtacctctacttcagcaattacctacagattgatgaggaagaatatggtggcacgtgggagctcacgaaggaagggtttatgacctcttttgccttgttcatggtcatttggatcatcttttacactgccatccattatgactgatggtgtacagctcccaagtgctccctatccagtccaaaggaccctcttgattacagcacaggaacttgatcgttggggaaccccagccccttggaacttggaagacccgtgtttcctggaccgcgaatcagtgtgttgggcatcagtgttttctgcaagggttgtgacctgaaactttttaaaaaccacccacctttggggaagcatttctgaatttatccatcaccaaccatttcttcttggataccatcaagtaacagctattatttgccaagtggagctgtcatttaatttgatgcacctctggattcagatgaaacattaaattgtcttcctcgattctc

SEQ ID NO: 370872 - DNA, 980 bp, Homo sapiens
gggcgcgcgacactgcaccgcccctcccttcgcggcgcctgctctgtagagccggcggaaccgggtagcttggccaggttgtgaggaaccgcagcgcgccgcaggaccgggccgctgagcctgcagccgccccgcgccgtgacctgcgaccctagaccccgactccctttggctcagcccgcgcgccccaggcccggcccgggcggcgcgacgggaggatgagcggcgggcggcggaaggaggagccgcctcagccgcagctggccaacggggccctcaaagtctccgtctggagtaaggtgctgcggagcgacgcggcctgggaggataaggatgaatttttagatgtgatctactggttccgacagatcattgctgtggtcctgggtgtcatttggggagttttgccattacgagggttcttgggaatagcaggattctgcctgatcaatgcaggagtcctgtacctctacttcagcaattacctacagattgatgaggaagaatatggtggcacgtgggagctcacgaaggaagggtttatgacctcttttgccttgttcatggtatgtgtagctgatagttttacaacaggtcatttggatcatcttttacactgccatccattatgactgatggtgtacagctcccaagtgctccctatccagtccaaaggaccctcttgattacagcacaggaacttgatcgttggggaaccccagccccttggaacttggaagacccgtgtttcctggaccgcgaatcagtgtgttgggcatcagtgttttctgcaagggttgtgacctgaaactttttaaaaaccacccacctttggggaagcatttctgaatttatccatcaccaaccatttcttcttggataccatcaagtaacagctattatttgccaagtggagctgtcatttaatttgatgcacctctggattcagatgaaacattaaattgtcttcctcgattctc

SEQ ID NO: 370873 - DNA, 1607 bp, Homo sapiens
gggcgcgcgacactgcaccgcccctcccttcgcggcgcctgctctgtagagccggcggaaccgggtagcttggccaggttgtgaggaaccgcagcgcgccgcaggaccgggccgctgagcctgcagccgccccgcgccgtgacctgcgaccctagaccccgactccctttggctcagcccgcgcgccccaggcccggcccgggcggcgcgacgggaggatgagcggcgggcggcggaaggaggagccgcctcagccgcagctggccaacggggccctcaaagtctccgtctggagtaaggtgctgcggagcgacgcggcctgggaggataaggatgaatttttagatgtgatctactggttccgacagatcattgctgtggtcctgggtgtcatttggggagttttgccattacgagggttcttgggaatagcaggattctgcctgatcaatgcaggagtcctgtacctctacttcagcaattacctacagattgatgaggaagaatatggtggcacgtgggagctcacgaaggaagggtttatgacctcttttgccttgttcatggtcatttggatcatcttttacactgccatccattatgactgatggtgtacagctcccaagtgctccctatccagtccaaaggaccctcttgattacagcacaggaacttgatcgttggggaaccccagccccttggaacttggaagacccgtgtttcctggaccgcgaatcagtgtgttgggcatcagtgttttctgcaagggttgtgacctgaaactttttaaaaaccacccacctttggggaagcatttctgaatttatccatcaccaaccatttcttcttggataccatcaagtaacagctattatttgccaagtggagctgtcatttaatttgatgcacctctggattcagatgaaacattaaattgtcttcctcgattctccatcgggtgtagagtttttaaactatcaatggcatttcaagtcttctgaaacagcatggctgtatgtgcgtggtccatagcacagtacatgcagcatctaataagagtttccattgtagaatgttttcacatacttgaataaatcaaatctttaattgagaaaaaaaaaaaaaaaaaaaacaaaaaaaaaaaaaaaaaaaaaaaaaaaaaaaaaaaaacaaaagaaaaaaaaaaaaaaggaggggggggcgcgccacaaaaaatatacccccgcggggggagcccacacatgtcggaccgccccgcttttggcgaaaaaaggggggcccccaaatgaggggggcgcaatattataaacgtagacacagggcgcaccatgtttataaaccaacccgttgtggtcggcgggaaaaaacagctctcctgtcggagcgaacacgtgtgagagaaggaccccctactctcgggggggggaacaatatatgggaaccacctcccccaccgaaattttaaccgccccggggataaatcttaaaccctttgggcggtttcattggttgctttcaaccacacacgtaatatgtgtcgagcagaagaaattatggcccacctgagtagtgatttcgagacaatcatacgtcagggggtatcatga

SEQ ID NO: 370874 - DNA, 1645 bp, Homo sapiens
gggcgcgcgacactgcaccgcccctcccttcgcggcgcctgctctgtagagccggcggaaccgggtagcttggccaggttgtgaggaaccgcagcgcgccgcaggaccgggccgctgagcctgcagccgccccgcgccgtgacctgcgaccctagaccccgactccctttggctcagcccgcgcgccccaggcccggcccgggcggcgcgacgggaggatgagcggcgggcggcggaaggaggagccgcctcagccgcagctggccaacggggccctcaaagtctccgtctggagtaaggtgctgcggagcgacgcggcctgggaggataaggatgaatttttagatgtgatctactggttccgacagatcattgctgtggtcctgggtgtcatttggggagttttgccattacgagggttcttgggaatagcaggattctgcctgatcaatgcaggagtcctgtacctctacttcagcaattacctacagattgatgaggaagaatatggtggcacgtgggagctcacgaaggaagggtttatgacctcttttgccttgttcatggtcatttggatcatcttttacactgccatccattatgactgatggtgtacagctcccaagtgctccctatccagtccaaaggaccctcttgattacagcacaggaacttgatcgttggggaaccccagccccttggaacttggaagacccgtgtttcctggaccgcgaatcagtgtgttgggcatcagtgttttctgcaagggttgtgacctgaaactttttaaaaaccacccacctttggggaagcatttctgaatttatccatcaccaaccatttcttcttggataccatcaagtaacagctattatttgccaagtggagctgtcatttaatttgatgcacctctggattcagatgaaacattaaattgtcttcctcgattctccatcgggtgtagagtttttaaactatcaatggcatttcaagtcttctgaaacagcatggctgtatgtgcgtggtccatagcacagtacatgcagcatctaataagagtttccattgtagaatgttttcacatacttgaataaatcaaatctttaattgagaaaaaaaaaaaaaaaaaaaacaaaaaaaaaaaaaaaaaaaaaaaaagagggcggcgcgccgcgcccagaagaagattccccccggaggggcgccccaggtccgagcgcgctcccccggtttttgtgtggccccgaagggggcccccataaggggcgcctccgttttatcttcgcccttccgcgcccggtgcgcccgtcttttcacaccacccgttgtgcaccgtgggaaaaccgcggtccctgttgggctcctctttggacgagggcgcccctttctctccggggggggccacatttctgcggacaacactatacccttcacgggaatttataaagcccccactaaagggggatcacacctctactgaacaccttcctcacacgggggtatacaccggggggtgtaaccacacatatacgctgaacaataatcgcccgaggcgcgtgatgaacaacaccttgtgcgccctcacccggagcgtatctaatctctcacgcacatgctttttatcccaggggactccttaacgtaa

SEQ ID NO: 370875 - DNA, 1072 bp, Homo sapiens
gggcgcgcgacactgcaccgcccctcccttcgcggcgcctgctctgtagagccggcggaaccgggtagcttggccaggttgtgaggaaccgcagcgcgccgcaggaccgggccgctgagcctgcagccgccccgcgccgtgacctgcgaccctagaccccgactccctttggctcagcccgcgcgccccaggcccggcccgggcggcgcgacgggaggatgagcggcgggcggcggaaggaggagccgcctcagccgcagctggccaacggggccctcaaagtctccgtctggagtaaggtgctgcggagcgacgcggcctgggaggataaggatgaatttttagatgtgatctactggttccgacagatcattgctgtggtcctgggtgtcatttggggagttttgccattacgagggttcttgggaatagcaggattctgcctgatcaatgcaggagtcctgtacctctacttcagcaattacctacagattgatgaggaagaatatggtggcacgtgggagctcacgaaggaagggtttatgacctcttttgccttgttcatggtcatttggatcatcttttacactgccatccattatgactgatggtgtacagctcccaagtgctccctatccagtccaaaggaccctcttgattacagcacaggaacttgatcgttggggaaccccagccccttggaacttggaagacccgtgtttcctggaccgcgaatcagtgtgttgggcatcagtgttttctgcaagggttgtgacctgaaactttttaaaaaccacccacctttggggaagcatttctgaatttatccatcaccaaccatttcttcttggataccatcaagtaacagctattatttgccaagtggagctgtcatttaatttgatgcacctctggattcagatgaaacattaaattgtcttcctcgattctccatcgggtgtagagtttttaaactatcaatggcatttcaagtcttctgaaacagcatctaataagagtttccattgtagaatgttttcacatacttgaataaatcaaatctttaattgag

SEQ ID NO: 370876 - DNA, 1447 bp, Homo sapiens
gggcgcgcgacactgcaccgcccctcccttcgcggcgcctgctctgtagagccggcggaaccgggtagcttggccaggttgtgaggaaccgcagcgcgccgcaggaccgggccgctgagcctgcagccgccccgcgccgtgacctgcgaccctagaccccgactccctttggctcagcccgcgcgccccaggcccggcccgggcggcgcgacgggaggatgagcggcgggcggcggaaggaggagccgcctcagccgcagctggccaacggggccctcaaagtctccgtctggagtaaggtgctgcggagcgacgcggcctgggaggataaggatgaatttttagatgtgatctactggttccgacagatcattgctgtggtcctgggtgtcatttggggagttttgccattacgagggttcttgggaatagcaggattctgcctgatcaatgcaggagtcctgtacctctacttcagcaattacctacagattgatgaggaagaatatggtggcacgtgggagctcacgaaggaagggtttatgacctcttttgccttgttcatggtcatttggatcatcttttacactgccatccattatgactgatggtgtacagctcccaagtgctccctatccagtccaaaggaccctcttgattacagcacaggaacttgatcgttggggaaccccagccccttggaacttggaagacccgtgtttcctggaccgcgaatcagtgtgttgggcatcagtgttttctgcaagggttgtgacctgaaactttttaaaaaccacccacctttggggaagcatttctgaatttatccatcaccaaccatttcttcttggataccatcaagtaacagctattatttgccaagtggagctgtcatttaatttgatgcacctctggattcagatgaaacattaaattgtcttcctcgattctcaaaaaaaaaaaaaaaaaaaacaaaaaaaaaaaaaaaaaaaaaaaaaaaaaaaaaaaaacaaaagaaaaaaaaaaaaaaggaggggggggcgcgccacaaaaaatatacccccgcggggggagcccacacatgtcggaccgccccgcttttggcgaaaaaaggggggcccccaaatgaggggggcgcaatattataaacgtagacacagggcgcaccatgtttataaaccaacccgttgtggtcggcgggaaaaaacagctctcctgtcggagcgaacacgtgtgagagaaggaccccctactctcgggggggggaacaatatatgggaaccacctcccccaccgaaattttaaccgccccggggataaatcttaaaccctttgggcggtttcattggttgctttcaaccacacacgtaatatgtgtcgagcagaagaaattatggcccacctgagtagtgatttcgagacaatcatacgtcagggggtatcatga

SEQ ID NO: 370877 - DNA, 1140 bp, Homo sapiens
gggcgcgcgacactgcaccgcccctcccttcgcggcgcctgctctgtagagccggcggaaccgggtagcttggccaggttgtgaggaaccgcagcgcgccgcaggaccgggccgctgagcctgcagccgccccgcgccgtgacctgcgaccctagaccccgactccctttggctcagcccgcgcgccccaggcccggcccgggcggcgcgacgggaggatgagcggcgggcggcggaaggaggagccgcctcagccgcagctggccaacggggccctcaaagtctccgtctggagtaaggtgctgcggagcgacgcggcctgggaggataaggatgaatttttagatgtgatctactggttccgacagatcattgctgtggtcctgggtgtcatttggggagttttgccattacgagggttcttgggaatagcaggattctgcctgatcaatgcaggagtcctgtacctctacttcagcaattacctacagattgatgaggaagaatatggtggcacgtgggagctcacgaaggaagggtttatgacctcttttgccttgttcatggtatgtgtagctgatagttttacaacaggtcatttggatcatcttttacactgccatccattatgactgatggtgtacagctcccaagtgctccctatccagtccaaaggaccctcttgattacagcacaggaacttgatcgttggggaaccccagccccttggaacttggaagacccgtgtttcctggaccgcgaatcagtgtgttgggcatcagtgttttctgcaagggttgtgacctgaaactttttaaaaaccacccacctttggggaagcatttctgaatttatccatcaccaaccatttcttcttggataccatcaagtaacagctattatttgccaagtggagctgtcatttaatttgatgcacctctggattcagatgaaacattaaattgtcttcctcgattctccatcgggtgtagagtttttaaactatcaatggcatttcaagtcttctgaaacagcatggctgtatgtgcgtggtccatagcacagtacatgcagcatctaataagagtttccattgtagaatgttttcacatacttgaataaatcaaatctttaattgag

SEQ ID NO: 370878 - DNA, 983 bp, Homo sapiens
gggcgcgcgacactgcaccgcccctcccttcgcggcgcctgctctgtagagccggcggaaccgggtagcttggccaggttgtgaggaaccgcagcgcgccgcaggaccgggccgctgagcctgcagccgccccgcgccgtgacctgcgaccctagaccccgactccctttggctcagcccgcgcgccccaggcccggcccgggcggcgcgacgggaggatgagcggcgggcggcggaaggaggagccgcctcagccgcagctggccaacggggccctcaaagtctccgtctggagtaaggtgctgcggagcgacgcggcctgggaggataaggatgaatttttagatgtgatctactggttccgacagatcattgctgtggtcctgggtgtcatttggggagttttgccattacgagggttcttgggaatagcaggggtcatttggatcatcttttacactgccatccattatgactgatggtgtacagctcccaagtgctccctatccagtccaaaggaccctcttgattacagcacaggaacttgatcgttggggaaccccagccccttggaacttggaagacccgtgtttcctggaccgcgaatcagtgtgttgggcatcagtgttttctgcaagggttgtgacctgaaactttttaaaaaccacccacctttggggaagcatttctgaatttatccatcaccaaccatttcttcttggataccatcaagtaacagctattatttgccaagtggagctgtcatttaatttgatgcacctctggattcagatgaaacattaaattgtcttcctcgattctccatcgggtgtagagtttttaaactatcaatggcatttcaagtcttctgaaacagcatggctgtatgtgcgtggtccatagcacagtacatgcagcatctaataagagtttccattgtagaatgttttcacatacttgaataaatcaaatctttaattgag

SEQ ID NO: 370879 - DNA, 798 bp, Homo sapiens
gttcgttatgaggttcgcattaataaattaaagctccacgaggttcagctgtctcttacttttaaccagtgaaattgacctgcccgtgaagaggcgggcatgacacagcaagacgagaagaggaaaaagactgtgcaacggatagcccctggagagtgccccgtgtttacattctcatctggcatttttgttttgtggaatcggcctgtgttaagccaggtgacctatgaacagtgcttgtctcctcactaggtcatttggatcatcttttacactgccatccattatgactgatggtgtacagctcccaagtgctccctatccagtccaaaggaccctcttgattacagcacaggaacttgatcgttggggaaccccagccccttggaacttggaagacccgtgtttcctggaccgcgaatcagtgtgttgggcatcagtgttttctgcaagggttgtgacctgaaactttttaaaaaccacccacctttggggaagcatttctgaatttatccatcaccaaccatttcttcttggataccatcaagtaacagctattatttgccaagtggagctgtcatttaatttgatgcacctctggattcagatgaaacattaaattgtcttcctcgattctccatcgggtgtagagtttttaaactatcaatggcatttcaagtcttctgaaacagcatggctgtatgtgcgtggtccatagcacagtacatgcagcatctaataagagtttccattgtagaatgttttcacatacttgaataaatcaaatctttaattgag

SEQ ID NO: 370880 - DNA, 1076 bp, Homo sapiens
ctttacatgtcgtctccgatacatgttcccttgatccgagatccacaaggcacccctctgtgatctaacacggcgatcgagaggaacctgtaggacttccggtatgcccggaacctcgcagcccccttgaccgcttgccagaccccgatgtgccctggaccgcgaatcagtgtgttgggcatcagtgttttctgcaagggttgtgacctgaaactttttaaaaaccacccacctttggggaagcatttctgaatttatccatcaccaaccatttcttcttggataccatcaagtaacagctattatttgccaagtggagctgtcatttaatttgatgcacctctggattcagatgaaacattaaattgtcttcctcgattctccatcgggtgtagagtttttaaactatcaatggcatttcaagtcttctgaaacagcatggctgtatgtgcgtggtccatagcacagtacatgcagcatctaataagagtttccattgtagaatgttttcacatacttgaataaatcaaatctttaattgagaaaaaaaaaaaaaaaaaaaacaaaaaaaaaaaaaaaaaaaaaaaaagagggcggcgcgccgcgcccagaagaagattccccccggaggggcgccccaggtccgagcgcgctcccccggtttttgtgtggccccgaagggggcccccataaggggcgcctccgttttatcttcgcccttccgcgcccggtgcgcccgtcttttcacaccacccgttgtgcaccgtgggaaaaccgcggtccctgttgggctcctctttggacgagggcgcccctttctctccggggggggccacatttctgcggacaacactatacccttcacgggaatttataaagcccccactaaagggggatcacacctctactgaacaccttcctcacacgggggtatacaccggggggtgtaaccacacatatacgctgaacaataatcgcccgaggcgcgtgatgaacaacaccttgtgcgccctcacccggagcgtatctaatctctcacgcacatgctttttatcccaggggactccttaacgtaa

SEQ ID NO: 370881 - DNA, 165 bp, Homo sapiens
tgctgggattacaggtgtgagccaccacacccggccccgagttctgagtcttctaagctttcaatttatgtttggtacttgttctctgttgctccaattctgcctgatcaatgcaggagtcctgtacctctacttcagcaattacctacagattgatgaggaaga

SEQ ID NO: 370882 - DNA, 1093 bp, Homo sapiens
gggcgcgcgacactgcaccgcccctcccttcgcggcgcctgctctgtagagccggcggaaccgggtagcttggccaggttgtgaggaaccgcagcgcgccgcaggaccgggccgctgagcctgcagccgccccgcgccgtgacctgcgaccctagaccccgactccctttggctcagcccgcgcgccccaggcccggcccgggcggcgcgacgggaggatgagcggcgggcggcggaaggaggagccgcctcagccgcagctggccaacggggccctcaaagtctccgtctggagtaaggtgctgcggagcgacgcggcctgggaggataaggatgaatttttagatgtgatctactggttccgacagatcattgctgtggtcctgggtgtcatttggggagttttgccattacgagggttcttgggaatagcagggaaaggccattgctgctctggagctgtgtgtgtgtgtgatgactaaagcaaagaagcagccctacagtggcactcctgggtctggtgcaccactcctcaggagcatctcaggtcatttggatcatcttttacactgccatccattatgactgatggtgtacagctcccaagtgctccctatccagtccaaaggaccctcttgattacagcacaggaacttgatcgttggggaaccccagccccttggaacttggaagacccgtgtttcctggaccgcgaatcagtgtgttgggcatcagtgttttctgcaagggttgtgacctgaaactttttaaaaaccacccacctttggggaagcatttctgaatttatccatcaccaaccatttcttcttggataccatcaagtaacagctattatttgccaagtggagctgtcatttaatttgatgcacctctggattcagatgaaacattaaattgtcttcctcgattctccatcgggtgtagagtttttaaactatcaatggcatttcaagtcttctgaaacagcatggctgtatgtgcgtggtccatagcacagtacatgcagcatctaataagagtttccattgtagaatgttttcacatacttgaataaatcaaatctttaattgag

SEQ ID NO: 370883 - DNA, 1222 bp, Homo sapiens
gggcgcgcgacactgcaccgcccctcccttcgcggcgcctgctctgtagagccggcggaaccgggtagcttggccaggttgtgaggaaccgcagcgcgccgcaggaccgggccgctgagcctgcagccgccccgcgccgtgacctgcgaccctagaccccgactccctttggctcagcccgcgcgccccaggcccggcccgggcggcgcgacgggaggatgagcggcgggcggcggaaggaggagccgcctcagccgcagctggccaacggggccctcaaagtctccgtctggagtaaggtgctgcggagcgacgcggcctgggaggataaggatgaatttttagatgtgatctactggttccgacagatcattgctgtggtcctgggtgtcatttggggagttttgccattacgagggttcttgggaatagcagggaaaggccattgctgctctggagctgtgtgtgtgtgtgatgactaaagcaaagaagcagccctacagtggcactcctgggtctggtgcaccactcctcaggagcatctcaattctgcctgatcaatgcaggagtcctgtacctctacttcagcaattacctacagattgatgaggaagaatatggtggcacgtgggagctcacgaaggaagggtttatgacctcttttgccttgttcatggtcatttggatcatcttttacactgccatccattatgactgatggtgtacagctcccaagtgctccctatccagtccaaaggaccctcttgattacagcacaggaacttgatcgttggggaaccccagccccttggaacttggaagacccgtgtttcctggaccgcgaatcagtgtgttgggcatcagtgttttctgcaagggttgtgacctgaaactttttaaaaaccacccacctttggggaagcatttctgaatttatccatcaccaaccatttcttcttggataccatcaagtaacagctattatttgccaagtggagctgtcatttaatttgatgcacctctggattcagatgaaacattaaattgtcttcctcgattctccatcgggtgtagagtttttaaactatcaatggcatttcaagtcttctgaaacagcatggctgtatgtgcgtggtccatagcacagtacatgcagcatctaataagagtttccattgtagaatgttttcacatacttgaataaatcaaatctttaattgag

SEQ ID NO: 370884 - DNA, 709 bp, Homo sapiens
  misc_feature (649)..(650): n is a, c, g, or t
gggcgcgcgacactgcaccgcccctcccttcgcggcgcctgctctgtagagccggcggaaccgggtagcttggccaggttgtgaggaaccgcagcgcgccgcaggaccgggccgctgagcctgcagccgccccgcgccgtgacctgcgaccctagaccccgactccctttggctcagcccgcgcgccccaggcccggcccgggcggcgcgacgggaggatgagcggcgggcggcggaaggaggagccgcctcagccgcagctggccaacggggccctcaaagtctccgtctggagtaaggtgctgcggagcgacgcggcctgggaggataaggatgaatttttagatgtgatctactggttccgacagatcattgctgtggtcctgggtgtcatttggggagttttgccattacgagggttcttgggaatagcaggattctgcctgatcaatgcaggagtcctgtacctctacttcagcaattacctacagattgatgaggaagaatatggtggcacgtgggagctcacgaaggaagggtttatgacctcttttgccttgttcatggtcatttggatcatcttttacactgccatccattatgactgatggtgtacagctcccaagtggcttttccccccccccctttnnaaaattgtgcccccccaaaaaggggggtttttaggaccctcttgattacagcacaggaa

SEQ ID NO: 370885 - DNA, 1310 bp, Homo sapiens
  misc_feature (956)..(956): n is a, c, g, or t
gggcgcgcgacactgcaccgcccctcccttcgcggcgcctgctctgtagagccggcggaaccgggtagcttggccaggttgtgaggaaccgcagcgcgccgcaggaccgggccgctgagcctgcagccgccccgcgccgtgacctgcgaccctagaccccgactccctttggctcagcccgcgcgccccaggcccggcccgggcggcgcgacgggaggatgagcggcgggcggcggaaggaggagccgcctcagccgcagctggccaacggggccctcaaagtctccgtctggagtaaggtgctgcggagcgacgcggcctgggaggataaggatgaatttttagatgtgatctactggttccgacagatcattgctgtggtcctgggtgtcatttggggagttttgccattacgagggttcttgggaatagcaggattctgcctgatcaatgcaggagtcctgtacctctacttcagcaattacctacagattgatgaggaagaatatggtggcacgtgggagctcacgaaggaagggtttatgacctcttttgccttgttcatggtcatttggatcatcttttacactgccatccattatgactgatggtgtacagctcccaagtgctccctatccagtccaaaggaccctcttgattacagcacaggaacttgatcgttggggaaccccagccccttggaacttggaagacccgtgtttcctggaccgcgaatcagtgtgttgggcatcagtgttttctgcaagggttgtgacctgaaactttttaaaaaccacccacctttggggaagcatttctgaatttatccatcaccaaccatttcttcttggataccatcaagtaacagctattatttgccaagtggagctgtcatttaatttgatgcacctctggattcagatgaaacattaaattgtcttcctcgattctcaaanaaaaaaaacaaataacaccatcacataaaacaacacttgtttgggggccgccgctcggggcccacggagaaaacgttttcgctaaaaaactagttgttggggcgacgcgcggtgccccccctcattgtgaactgtcagtacagtggctgcccataagctgtgtctcccacttaggaaaaactcctcgggactgtcgacataggtgagtggacttctccgcccaattaaaaaaccgccccgggcggtaccacacgagcggttcttagacaacatctcccaaaggaggtcatagagggacaaagacggggaattcatctaccaggagggtcacagcaggagctgaatataaattcg

SEQ ID NO: 370886 - DNA, 1019 bp, Homo sapiens
gggcgcgcgacactgcaccgcccctcccttcgcggcgcctgctctgtagagccggcggaaccgggtagcttggccaggttgtgaggaaccgcagcgcgccgcaggaccgggccgctgagcctgcagccgccccgcgccgtgacctgcgaccctagaccccgactccctttggctcagcccgcgcgccccaggcccggcccgggcggcgcgacgggaggatgagcggcgggcggcggaaggaggagccgcctcagccgcagctggccaacggggccctcaaagtctccgtctggagtaaggtgctgcggagcgacgcggcctgggaggataaggatgaatttttagatgtgatctactggttccgacagatcattgctgtggtcctgggtgtcatttggggagttttgccattacgagggttcttgggaatagcaggattctgcctgatcaatgcaggagtcctgtacctctacttcagcaattacctacagattgatgaggaagaatatggtggcacgtgggagctcacgaaggaagggtttatgacctcttttgccttgttcatggtcatttggatcatcttttacactgccatccattatgactgatggtgtacagctcccaagtgctccctatccagtccaaaggaccctcttgattacagcacaggaacttgatcgttggggaaccccagccccttggaacttggaagacccgtgtttcctggaccgcgaatcagtgtgttgggcatcagtgttttctgcaagggttgtgacctgaaactttttaaaaaccacccacctttggggaagcatttctgaatttatccatcaccaaccatttcttcttggataccatcaagtaacagctattatttgccaagtggagctgtcatttaatttgatgcacccagcatggctgtatgtgcgtggtccatagcacagtacatgcagcatctaataagagtttccattgtagaatgttttcacatacttgaataaatcaaatctttaattgag

SEQ ID NO: 370887 - DNA, 958 bp, Homo sapiens
gggcgcgcgacactgcaccgcccctcccttcgcggcgcctgctctgtagagccggcggaaccgggtagcttggccaggttgtgaggaaccgcagcgcgccgcaggaccgggccgctgagcctgcagccgccccgcgccgtgacctgcgaccctagaccccgactccctttggctcagcccgcgcgccccaggcccggcccgggcggcgcgacgggaggatgagcggcgggcggcggaaggaggagccgcctcagccgcagctggccaacggggccctcaaagtctccgtctggagtaaggtgctgcggagcgacgcggcctgggaggataaggatgaatttttagatgtgatctactggttccgacagatcattgctgtggtcctgggtgtcatttggggagttttgccattacgagggttcttgggaatagcaggattctgcctgatcaatgcaggagtcctgtacctctacttcagcaattacctacagattgatgaggaagaatatggtggcacgtgggagctcacgaaggaagggtttatgacctcttttgccttgttcatggtcatttggatcatcttttacactgccatccattatgactgatggtgtacagctcccaagtgctccctatccagtccaaaggaccctcttgattacagcacaggaacttgatcgttggggaaccccagccccttggaacttggaagacccgtgtttcctggaccgcgaatcagtgtgttgggcatcagtgttttctgcaagggttgtgacctgaaactttttaaaaaccacccacctttgggtatgagtatgttgattcagcaatattgcttgaacccgtaaggcggtggatcctgtgagttgagatcatgccattgcactccagcctgggcgacagggcgagtctctgtctcaaaaaataaaaaataaaaattcattagatcaaaaaaaaa

SEQ ID NO: 370888 - DNA, 237 bp, Homo sapiens
ggatcatctagatagaaaatcaacaaagaattatcagatttaaattacattctagaccaaatagccccagcagatatttataaaacattcccctcaataactactgaatgtacattttgctcaacagcacatggaacttttctccacgatagaatatatgttagtccacaaaacatatctcaagcaatcaaaaaaatcaaaatcttatcaagtatcttctcttaccacaatgcaata

SEQ ID NO: 370889 - DNA, 968 bp, Homo sapiens
aaccaggccagtttccatcgcacatgtgtcccgcagctccaccgaaaaggatcaagaaagtcaggattctaaataccaacagcatcactctgtcaaaaccacccttgcaacctttctcagaaaaggaaatgtaatgacaagatgaaagttagccagaacggccatgtccagaaaagctctcagtagtacagccatctgtccgaaatactctaacctacaaggtggccacggtctcttcagagggtcatggagctctgcaaagcttgtcttaaaactgattaaggttgttaaactgaaccatcttgactggccccagccaagtttcttacagtggaaatggcacattaactatgcagctgtcatgagagaagtcagtactcttagattctaacccaaaagaattcaaatatattggatttcctctcctgttcaattggaattcaaggacttaatccacttttaattacactgttcctgttgttgcatcaaaagggaaagaaaagaaaaaagaaactgtttgcagagaacgagcagagatcttgggaataccatcctccattgagagccagcccctcaaaagctcattcgtagggctgggtaaacacacaccttttgcactctatttttgaaattatgttcaggagtctacagactgttatctgtagaagaagccacttttgaaattttagtttatgtaaagtgttccaaaatgcatgaacagagtaattattttaaaagtctataaatgcatgcatttgctctaaaattttgtaattatcagtagattacaagttctctataggaagagagagctgtctcatattagttttgcacttataccttttttaatagttctgaacttcactcttgtgtattcttttattttaaaagctataatgactaatcctgatcttctgctggaatatggttaaataggattccattaaaaacaagagctagaattcatg

SEQ ID NO: 370890 - DNA, 554 bp, Homo sapiens
ttttggaattggtctgatgcaaaagtcaatgcttttctgtccagttgaaccagccttgtttaatttttttttttaaagggaaagaaaagaaaaaagaaactgtttgcagagaacgagcagagatcttgggaataccatcctccattgagagccagcccctcaaaagctcattcgtagggctgggtaaacacacaccttttgcactctatttttgaaattatgttcaggagtctacagactgttatctgtagaagaagccacttttgaaattttagtttatgtaaagtgttccaaaatgcatgaacagagtaattattttaaaagtctataaatgcatgcatttgctctaaaattttgtaattatcagtagattacaagttctctataggaagagagagctgtctcatattagttttgcacttataccttttttaatagttctgaacttcactcttgtgtattcttttattttaaaagctataatgactaatcctgatcttctgctggaatatggttaaataggattccattaaaaacaagagctagaattcatg

SEQ ID NO: 370891 - DNA, 455 bp, Homo sapiens
tacctctgttgtaaagttcttggtgaaggttccgaagatgaaggtggagaaaacaaaaagagacagctgagagaggggtcagaaccaggcaaggggacgaatgagagtgaacctgagacactcaagctttaaggagaggaactgtctccatgaaggccccacatttgagaacactgggtaacagcctaagtggtctcctacggattccttcttttgagcagcttgttcctagcctggcattcaatgaacttgccaccaacagagaagcaggggatgagggccaaagaaaggaggagaagagctctcagaatttccaattagcacatttaagcagtgaaaatgtatcagacctgaccagaatacaatacattgtatgattaggaccacaattccaattagtggcagatacaaaagctcagctctcaatgtgaaaaccaaccagaaaggtgagattt

SEQ ID NO: 370892 - DNA, 349 bp, Homo sapiens
cacagcagaggctggaaaagctgacactgccggcttcctctgccgctggccaggcaggccccaggcctctttacacagctctgtttgtcaatagagatggagctttgtctccccctccagattctaccccaacccacatcccagcacccaacaaagacccttttagatcagagcctgtgtggggtagaatggagaccagaggcagagttattgccccacggctgtgagcaggccccacgcagagtagctcgctaccaggccagagaccacccagccaaggctcctcaggcttagacgttcccagctcccatttctccccaggtctcccagcagctggccttgggaatcc

SEQ ID NO: 370893 - DNA, 821 bp, Homo sapiens
ccttgtccacttcgatgtagccgtcggtattcactccagcgacttccctgccttgtctgtaactcggcaggcactaggcgcattggctgagcccacgcatcccggtccctcgttgagcccaggggccgaatgaggtccgcacctgctggtctcttgcctttgatacgcctgtctatgccctcttaaccagcttcacgcggatgttattgtgaggtctggtaggtagcctgtggtgtccgcgttgaggttctcggaagggctcggattcggggctggcccccagcccttgtccattcccttcccacccatccagccttgtggtccggttaaatgtcttctcccaaaccacccggggctctcccggggcccaggcttctttatgaggcttcttgtgtccatttcccagctgccaggtcttgccagcccttgaaactggaggaggccatatctttcttgggacccaccaccagaagcccagggaccagagagaagctttctgtgccccagatcttgcccccagagcggctgcggccttttacctcgttgcactgctgagagcaagatgggtcaccagcagctgtactggagccacccgcgaaaattcggccagggttctcgctcttgtcgtgtctgttcaaaccggcacggtctgatccggaaatatggcctcaatatgtgccgccagtgtttccgtcagtacgcgaaggatatcggtttcattaagttggactaaatgctcttccttcagaggattatccggggcatctactcaatgaaaaaccatgataattctttgtatataaaataaacatttgaaaaaa

SEQ ID NO: 370894 - DNA, 332 bp, Homo sapiens
  misc_feature (60)..(60): n is a, c, g, or t
  misc_feature (63)..(63): n is a, c, g, or t
  misc_feature (70)..(70): n is a, c, g, or t
ccccacaccccccggcacccacctaggtaggtgcgaggcccggttaatcggaagaggcantgntgagagnaagatgggtcaccagcagctgtactggagccacccgcgaaaattcggccagggttctcgctcttgtcgtgtctgttcaaaccggcacggtctgatccggaaatatggcctcaatatgtgccgccagtgtttccgtcagtacgcgaaggatatcggtttcattaagttggactaaatgctcttccttcagaggattatccggggcatctactcaatgaaaaaccatgataattctttgtatataaaataaacatttgaaaaaa

SEQ ID NO: 370895 - DNA, 626 bp, Homo sapiens
aggatccttaattaaattttttccccccccccccccgcttttacctcgttgcactgctgagagcaagatgggtcaccagcagctgtactggagccacccgcgaaaattcggccagggttctcgctcttgtcgtgtctgttcaaaccggcacggtctgatccggaaatatggcctcaatatgtgccgccagtgtttccgtcagtacgcgaaggatatcggtttcattaagttggactaaatgctcttccttcagaggattatccggggcatctactcaatgaaaaaccatgataattctttgtatataaaataaacatttgaaaaaaaccaaaaaaaaaaaaaaaaaaaaaaaaaaaaaaaaaaaaaaaaaaaaaaaaaaaaaaaaaaaaaaaaaaaaaaaaaaaaaaaaccgtccggactttgggccaactggcccattgcccctaaaagggttttgttttccacccaattggcggcctttttacaccattgccctttaggaaaccccggtaaaaaccaaactgaccggctttgaacacaatccccttttgcttggggtatacccaattatgccgcctggaccgacttcccctttggggcgggtggcttggcgggccccctcccct

SEQ ID NO: 370896 - DNA, 639 bp, Homo sapiens
  misc_feature (2)..(2): n is a, c, g, or t
  misc_feature (4)..(5): n is a, c, g, or t
  misc_feature (8)..(8): n is a, c, g, or t
  misc_feature (361)..(361): n is a, c, g, or t
  misc_feature (433)..(433): n is a, c, g, or t
  misc_feature (447)..(447): n is a, c, g, or t
  misc_feature (518)..(518): n is a, c, g, or t
  misc_feature (538)..(538): n is a, c, g, or t
  misc_feature (541)..(542): n is a, c, g, or t
  misc_feature (549)..(549): n is a, c, g, or t
  misc_feature (552)..(552): n is a, c, g, or t
  misc_feature (565)..(565): n is a, c, g, or t
  misc_feature (570)..(570): n is a, c, g, or t
gngnnggnacccggagaaacggccattatggccggggcttttacctcgttgcactgctgagagcaagatgggtcaccagcagctgtactggagccacccgcgaaaattcggccagggttctcgctcttgtcgtgtctgttcaaaccggcacggtctgatccggaaatatggcctcaatatgtgccgccagtgtttccgtcagtacgcgaaggatatcggtttcattaagttggactaaatgctcttccttcagaggattatccggggcatctactcaatgaaaaaccatgataattctttgtatataaaataaacatttgaaaaaaaccaaaaaaaaaaaaaaaaaaaaaaaaaaaaacantttgcgggggcccgtgggccctggaaaaagtttttaaaaaccaatcgcgtgggggggcggcgggccccgtgngtgaaggtggaacngggggccaaaagcgggtcccagaagaaacccggggccagggacacaaggggcggggtttctccccccaatnaaaaaaccccgggggggcanccnnagcggtnctngaaccaatcccangaggngaggtccggagggcactaaggggcctctacaaccgggaggccaaggggaggcccgtataaaataacgga

SEQ ID NO: 370897 - DNA, 250 bp, Homo sapiens
  misc_feature (43)..(43): n is a, c, g, or t
gtggtgttctggtggtgtgttggcaaacactaaccaaaaaaanatagagtccgtcgtgtctgttcaaaccggcacggtctgatccggaaatatggcctcaatatgtgccgccagtgtttccgtcagtacgcgaaggatatcggtttcattaagttggactaaatgctcttccttcagaggattatccggggcatctactcaatgaaaaaccatgataattctttgtatataaaataaacatttgaaaaaa

SEQ ID NO: 370898 - DNA, 281 bp, Homo sapiens
gctgctccagtcaatgaaagggacactttattgaggctccagggccacggggcctgggcaggaggctgcccttcaaggaaagaaccaccttatttgaccttcttcttggaacgcaggttgttggtgtgaccacacttcttcttgcggcagttgtcagtacgcgaaggatatcggtttcattaagttggactaaatgctcttccttcagaggattatccggggcatctactcaatgaaaaaccatgataattctttgtatataaaataaacatttgaaaaaa

SEQ ID NO: 370899 - DNA, 480 bp, Homo sapiens
cagtgagtggagatggctccattgcactccagtccgggagacagcgagactctctctcaaaaaaaaaatgatgaactgtgtaattatagttgcctactgaacaactatcctgtgcatttggtaaagatcatttactagtgttttgggaaacattactttgatggaagaagtgcgatagcgttactaaaaatcgttctaaaacatggttgattctggagtaggcattcagtaaatatttaaactacatagaatctggtgtggtttggataggtcaaaggtccagttctgtaattctataacattctataatgagccttttttttgtgagaatcaagtagagatttaaagcattttgaaataaatcatctgctttttttttttcattggactaaatgctcttccttcagaggattatccggggcatctactcaatgaaaaaccatgataattctttgtatataaaataaacatttgaaaaaa

SEQ ID NO: 370900 - DNA, 356 bp, Homo sapiens
gcttttacctcgttgcactgctgagagcagatggtcacagcagtgtactgagccaccgcgaaaattcggccagggttctcgctcttgtcgtgtctggttcaatacccggggcaaccgggctcctgggattcccggggaaaaattaattggcgcttccaaattaattgtttgcccggcccaaggttggttttttcccccgggttccaaggcttaacccggccggaaaaggggattatttccgggtttttccatttaaagcttggactaaatgctcttccttcagaggattatccggggcatctactcaatgaaaaaccatgataattctttgtatataaaataaacatttgaaaaaa

SEQ ID NO: 370901 - DNA, 328 bp, Homo sapiens
  misc_feature (41)..(41): n is a, c, g, or t
  misc_feature (43)..(46): n is a, c, g, or t
  misc_feature (48)..(48): n is a, c, g, or t
  misc_feature (50)..(50): n is a, c, g, or t
  misc_feature (52)..(52): n is a, c, g, or t
tctctctctctctctctctctctctctctctctctctctcncnnnntntntntctctctctctctctagatgggtcaccagcagctgtactggagccacccgcgaaaattcggccagggttctcgctcttgtcgtgtctgttcaaaccggcacggtctgatccggaaatatggcctcaatatgtgccgccagtgtttccgtcagtacgcgaaggatatcggtttcattaagttggactaaatgctcttccttcagaggattatccggggcatctactcaatgaaaaaccatgataattctttgtatataaaataaacatttgaaaaaa

SEQ ID NO: 370902 - DNA, 1095 bp, Homo sapiens
aggatccttaattaaattttttccccccccccccccgcttttacctcgttgcactgctgagagcaagatgggtcaccagcagctgtactggagccacccgcgaaaattcggccagggttctcgctcttgtcgtgtctgttcaaaccggcacggtctgatccggaaatatggcctcaatatgtgccgccagtgtttccgtcagtacgcgaaggatatcggtttcattaagttggactaaatgctcttccttcagaggattatccggggcatctactcaatgaaaaaccatgataattctttgtatataaaataaacatttgaaaaaaaccaaaaaaaaaaaaaaaaaaaaaaaaaaaaaaaaaaaaaaaaaaaaaaaaaaaaaaaaaaaaaaaaaaaaaaaaaaaaaaaaaaaagggggggggccgaaaaaacacccccggggggggccaacgccgcacacccagctatttcatcttaaaaaaaggcggggccactaataagggggcggatttacaaaaaaaaccagcacgcgagcaggcgcagaacaaaacaccacaatagcaggagagcaacaaacaaggtcaatcgaggaccatcgataagaagaacccacaacatgggggggggagaccattagcgcgagacacacaacaacgaaaaaaataacgccgccggagagaaaaaaacactacgagcgttaaggagggaaacaacccacgataaagacgctgggggggagaggaaacgtcggccgacccgacgaggggaaaacaaaacaaaccgacccgggctcgttgttccacaataggggagcagtcgagcgaacagaccgacgagacagcagcagaccaaataggagagcagagcagaaggaacacaacgaacgagacgaggaaacagcgaggacaggaagagagcacaagagacccagaagaaaagagaacacagagggaacgccaaggacagcagaacagaaggcaagcgaacgcgaggcacaaaaggcaagaaccaaatagcaaccaaagcaagagcagcagagaagaggaagcaaaacaagagtgtagagagcaccaagaagaacgacagtagatacaa

SEQ ID NO: 370903 - DNA, 639 bp, Homo sapiens
  misc_feature (361)..(361): n is a, c, g, or t
  misc_feature (433)..(433): n is a, c, g, or t
  misc_feature (447)..(447): n is a, c, g, or t
  misc_feature (518)..(518): n is a, c, g, or t
  misc_feature (538)..(538): n is a, c, g, or t
  misc_feature (541)..(542): n is a, c, g, or t
  misc_feature (549)..(549): n is a, c, g, or t
  misc_feature (552)..(552): n is a, c, g, or t
  misc_feature (565)..(565): n is a, c, g, or t
  misc_feature (570)..(570): n is a, c, g, or t
aggatccttaattaaattttttccccccccccccccgcttttacctcgttgcactgctgagagcaagatgggtcaccagcagctgtactggagccacccgcgaaaattcggccagggttctcgctcttgtcgtgtctgttcaaaccggcacggtctgatccggaaatatggcctcaatatgtgccgccagtgtttccgtcagtacgcgaaggatatcggtttcattaagttggactaaatgctcttccttcagaggattatccggggcatctactcaatgaaaaaccatgataattctttgtatataaaataaacatttgaaaaaaaccaaaaaaaaaaaaaaaaaaaaaaaaaaaaacantttgcgggggcccgtgggccctggaaaaagtttttaaaaaccaatcgcgtgggggggcggcgggccccgtgngtgaaggtggaacngggggccaaaagcgggtcccagaagaaacccggggccagggacacaaggggcggggtttctccccccaatnaaaaaaccccgggggggcanccnnagcggtnctngaaccaatcccangaggngaggtccggagggcactaaggggcctctacaaccgggaggccaaggggaggcccgtataaaataacgga

SEQ ID NO: 370904 - DNA, 783 bp, Homo sapiens
aggatccttaattaaattttttccccccccccccccgcttttacctcgttgcactgctgagagcaagatgggtcaccagcagctgtactggagccacccgcgaaaattcggccagggttctcgctcttgtcgtgtctgttcaaaccggcacggtctgatccggaaatatggcctcaatatgtgccgccagtgtttccgtcagtacgcgaaggatatcggtttcattaagttggactaaatgctcttccttcagaggattatccggggcatctactcaatgaaaaaccatgataattctttgtatataaaataaacatttgaaaaaaaccaaaaaaaaaaaaaaaaaaaaaaaaaaaaaaaaaaagagagggggcggcgcgccgcgcccaaaaaattcccccggcggggggccccagttccgcggtcccccgttttttgttgccaaggggggcccccttaggggggcgcagcaattataaagcgctcgagagcggccgcgggccgccgtcgtttaaacaaacacagtggggcgatggggggaacacactctcgtctgattgcgggacgatcttctgcgcggaagacgacaccctcctcttccgcgggggggcgagcccttctgtgcgggccacccatccacctacgagatttttttagcgcccccagagggacaattgtcaacctttcacagtgtttcatcgttgtccaccccaaccggatattagccccgctagaaaattgggccgcgacttacactctggacactttttaccgacggtataa

SEQ ID NO: 370905 - DNA, 701 bp, Homo sapiens
aggatccttaattaaattttttccccccccccccccgcttttacctcgttgcactgctgagagcaagatgggtcaccagcagctgtactggagccacccgcgaaaattcggccagggttctcgctcttgtcgtgtctgttcaaaccggcacggtctgatccggaaatatggcctcaatatgtgccgccagtgtttccgtcagtacgcgaaggatatcggtttcattaagttggactaaatgctcttccttcagaggattatccggggcatctactcaatgaaaaaccatgataattctttgtatataaaataaacatttgaaaaaaaccaaaaaaaaaaaaaaaaaaaaaaaaaaaaaaaaaaaaaaaaaaaaaaaaaaaaaaaaaaaaaaaaaaaaaaaaaaaaaaaaaaaaaaaaaaaaaaaggggggggcccaaacgctatcgagaggagaccacatcacaacaaaaccccatcatttattagattaaaaacgaggggcccccttaacatagaagtggctttattaataaaacaaagaaggaacaagcgcacggttcttaaaaaaaacatgtggtgagaggaggaaaacaaaactctttgacgtgcgatttctggggagaaagaacacaactatctgttggggcgagagacaaaaatgggggaaaaaactaatcagaaattattcctctcggagggat

SEQ ID NO: 370906 - DNA, 1094 bp, Homo sapiens
  misc_feature (678)..(678): n is a, c, g, or t
  misc_feature (682)..(682): n is a, c, g, or t
  misc_feature (693)..(693): n is a, c, g, or t
  misc_feature (697)..(697): n is a, c, g, or t
  misc_feature (714)..(714): n is a, c, g, or t
  misc_feature (719)..(719): n is a, c, g, or t
  misc_feature (723)..(723): n is a, c, g, or t
  misc_feature (725)..(725): n is a, c, g, or t
  misc_feature (729)..(729): n is a, c, g, or t
  misc_feature (732)..(733): n is a, c, g, or t
  misc_feature (736)..(736): n is a, c, g, or t
  misc_feature (740)..(740): n is a, c, g, or t
  misc_feature (746)..(746): n is a, c, g, or t
  misc_feature (757)..(757): n is a, c, g, or t
  misc_feature (760)..(760): n is a, c, g, or t
  misc_feature (763)..(763): n is a, c, g, or t
  misc_feature (767)..(767): n is a, c, g, or t
  misc_feature (775)..(775): n is a, c, g, or t
  misc_feature (786)..(786): n is a, c, g, or t
  misc_feature (797)..(798): n is a, c, g, or t
  misc_feature (802)..(802): n is a, c, g, or t
  misc_feature (827)..(828): n is a, c, g, or t
  misc_feature (839)..(839): n is a, c, g, or t
  misc_feature (844)..(844): n is a, c, g, or t
  misc_feature (849)..(849): n is a, c, g, or t
  misc_feature (855)..(855): n is a, c, g, or t
  misc_feature (859)..(859): n is a, c, g, or t
  misc_feature (872)..(872): n is a, c, g, or t
  misc_feature (884)..(885): n is a, c, g, or t
  misc_feature (887)..(887): n is a, c, g, or t
  misc_feature (889)..(889): n is a, c, g, or t
  misc_feature (892)..(893): n is a, c, g, or t
  misc_feature (899)..(899): n is a, c, g, or t
  misc_feature (912)..(912): n is a, c, g, or t
  misc_feature (914)..(914): n is a, c, g, or t
  misc_feature (918)..(918): n is a, c, g, or t
  misc_feature (922)..(922): n is a, c, g, or t
  misc_feature (924)..(924): n is a, c, g, or t
  misc_feature (926)..(926): n is a, c, g, or t
  misc_feature (932)..(933): n is a, c, g, or t
  misc_feature (939)..(939): n is a, c, g, or t
  misc_feature (947)..(947): n is a, c, g, or t
  misc_feature (958)..(958): n is a, c, g, or t
  misc_feature (988)..(988): n is a, c, g, or t
gaggattccgagggtttcagctgttgacgctttacgcgttgcgggcgcacgtcgggccgctgtttcccgagggaaggcaggtgtgcctctgcgttacagggaaaggcacttagaactgtctgagtggccccgtaagccagcgagggcgcatttcccggcgcggacgggctgctggtggttttggtggctgctctccggaggcacacctggcacgtcgaaggggggctttatatggctgtatttgacttggcaattcctgctgaacaaataatttttcatggcggcgaaacaacctgaccacactgcgcacgcgtttcctttgagcactgcattctgggtaaactgtctcaaaaatttgaagagcgcatgcgtgggccagcttcttccttttacctcgttgcactgctgagagcaagatgggtcaccagcagctgtactggagccacccgcgaaaattcggccagggttctcgctcttgtcgtgtctgttcaaaccggcacggtctgatccggaaatatggcctcaatatgtgccgccagtgtttccgtcagtacgcgaaggatatcggtttcattaagttggactaaatgctcttccttcagaggattatccggggcatctactcaatgaaaaaccatgataattctttgtatataaaataaacatttgaaaaaacangganaaaaaaaaaantttncttgcggccgaatttcnggctnattngnccanttnnccntatngggagncgttaacattnaanggnccgnggtttaanaccgtggggangggaaaacccnngggntacccaattaattggttggaagaanntccccttttgncaggnggggnattacnaaanaggcccacccgtnggcctttccaannantngcnnaccctnatgggaatggaantngaangctnantntttggnnaaaatncgggtaanttttggtaaanaacttatttttaaccaataggccgaatggnaaattcctttttattaaaaggaataacccggaatagggtggagggtggtccagtttggaaccagaagccatttaaagaacggggcttccgaggggccgcattgggg

SEQ ID NO: 370907 - DNA, 1124 bp, Homo sapiens
gaggattccgagggtttcagctgttgacgctttacgcgttgcgggcgcacgtcgggccgctgtttcccgagggaaggcaggtgtgcctctgcgttacagggaaaggcacttagaactgtctgagtggccccgtaagccagcgagggcgcatttcccggcgcggacgggctgctggtggttttggtggctgctctccggaggcacacctggcacgtcgaaggggggctttatatggctgtatttgacttggcaattcctgctgaacaaataatttttcatggcggcgaaacaacctgaccacactgcgcacgcgtttcctttgagcactgcattctgggtaaactgtctcaaaaatttgaagagcgcatgcgtgggccagcttcttccttttacctcgttgcactgctgagagcaagatgggtcaccagcagctgtactggagccacccgcgaaaattcggccagggttctcgctcttgtcgtgtctgttcaaaccggcacggtctgatccggaaatatggcctcaatatgtgccgccagtgtttccgtcagtacgcgaaggatatcggtttcattaagaaagacctgagctgtcttccttggcactgcctatggaggtgacacccatctcctccatcatggccatcctgagaccgctcgcgaagcccaagatcatcaaaaagagcaccaagttcactgggaaccagtcagactgatatgtcaaaattaagggtaactggtggaaacacagaggtattgacaacagggttcatagaaggtttgagggccagatctatgcccaacattggttatgggagaaacaaaaagacaaagcacatactgcccagtggcttctggaagttcctggtccacaacgttaaggagctggaagtactgctggtgagcaacaaatcttactgtgttgagatcactcatgatgtttcttccaagaactgcaaagccatcttggaaagagcagcccaggtggtcatcagagtcaccaatgccaatgccagcctgcacagtgcagaaagtgaatagacagtgaatgtgtttgttttattggggtttaaataaaaccaataaaactgtaaaaacaacaaaaaacaaaaaccagagacactg

SEQ ID NO: 370908 - DNA, 895 bp, Homo sapiens
  misc_feature (839)..(839): n is a, c, g, or t
gaggattccgagggtttcagctgttgacgctttacgcgttgcgggcgcacgtcgggccgctgtttcccgagggaaggcaggtgtgcctctgcgttacagggaaaggcacttagaactgtctgagtggccccgtaagccagcgagggcgcatttcccggcgcggacgggctgctggtggttttggtggctgctctccggaggcacacctggcacgtcgaaggggggctttatatggctgtatttgacttggcaattcctgctgaacaaataatttttcatggcggcgaaacaacctgaccacactgcgcacgcgtttcctttgagcactgcattctgggtaaactgtctcaaaaatttgaagagcgcatgcgtgggccagcttcttccttttacctcgttgcactgctgagagcaagatgggtcaccagcagctgtactggagccacccgcgaaaattcggccagggttctcgctcttgtcgtgtctgttcaaaccggcacggtctgatccggaaatatggcctcaatatgtgccgccagtgtttccgtcagtacgcgaaggatatcggtttcattaagttggactaaatgctcttccttcagaggattatccggggcatctactcaatgaaaaaccatgataattctttgtatataaaataaacatttgaaaaaaccaaaaaaaaagaaaaaaaaactcgcggcacgaggattgcctagggcagaaaggaagtgggaatggcgaagatgtgacattcctcggtgttagatcctgttttttcttaacaagttgaggcgtgggtagagcaggaattggttttccagcattgtgtccgtaancctgagttagaataagatgtaacggaagccacgataaagactcggtcaaatcctgc

SEQ ID NO: 370909 - DNA, 1040 bp, Homo sapiens
gaggattccgagggtttcagctgttgacgctttacgcgttgcgggcgcacgtcgggccgctgtttcccgagggaaggcaggtgtgcctctgcgttacagggaaaggcacttagaactgtctgagtggccccgtaagccagcgagggcgcatttcccggcgcggacgggctgctggtggttttggtggctgctctccggaggcacacctggcacgtcgaaggggggctttatatggctgtatttgacttggcaattcctgctgaacaaataatttttcatggcggcgaaacaacctgaccacactgcgcacgcgtttcctttgagcactgcattctgggtaaactgtctcaaaaatttgaagagcgcatgcgtgggccagcttcttccttttacctcgttgcactgctgagagcaagatgggtcaccagcagctgtactggagccacccgcgaaaattcggccagggttctcgctcttgtcgtgtctgttcaaaccggcacggtctgatccggaaatatggcctcaatatgtgccgccagtgtttccgtcagtacgcgaaggatatcggtttcattaagttggactaaatgctcttccttcagaggattatccggggcatctactcaatgaaaaaccatgataattctttgtatataaaataaacatttgaaaaaacaaaaaaaaaaaaaaaaaaaaaaaaaaaaaaaacctgtgtgtgcggggcgcgcccgccggcccccggaaaaagccttttaagaacccacccgcggggggcgcgcgcgcggggccccaggggaaggggaaaccgggggcgcacagaagggtggtcccccaagaggagaaaactcgcggggccccaggaacaagagggcgcggggacttctctctcaaccaattataaaaaacacgccccggggagccacaccgacggcgtttcgtgaaacaaactctccgacaagggccgtcgcgggaggcccaccaagggggggccctttccaacacgcgggccccaagcggaacccgaaatcaaaataagccca

SEQ ID NO: 370910 - DNA, 1441 bp, Homo sapiens
gaggattccgagggtttcagctgttgacgctttacgcgttgcgggcgcacgtcgggccgctgtttcccgagggaaggcaggtgtgcctctgcgttacagggaaaggcacttagaactgtctgagtggccccgtaagccagcgagggcgcatttcccggcgcggacgggctgctggtggttttggtggctgctctccggaggcacacctggcacgtcgaaggggggctttatatggctgtatttgacttggcaattcctgctgaacaaataatttttcatggcggcgaaacaacctgaccacactgcgcacgcgtttcctttgagcactgcattctgggtaaactgtctcaaaaatttgaagagcgcatgcgtgggccagcttcttccttttacctcgttgcactgctgagagcaagatgggtcaccagcagctgtactggagccacccgcgaaaattcggccagggttctcgctcttgtcgtgtctgttcaaaccggcacggtctgatccggaaatatggcctcaatatgtgccgccagtgtttccgtcagtacgcgaaggatatcggtttcattaagttggactaaatgctcttccttcagaggattatccggggcatctactcaatgaaaaaccatgataattctttgtatataaaataaacatttgaaaaaaaaaaaaaaaaaaaaagggacgcgtgggtcgacccacgcgtccgggacccaggcgtccgggtggactatgtctctacaaaccacaaagactttgggaacactatacctattattcggcgcatgagctgggagtcctaggcacagctctaagcctccttattcgagccgagcggggccagccaggcaaccttctaggtaacgaccacatctacaacgttatcgtcacagcccagtgcattgggaaataatcttcttcatagtaatacccatcataatcgggaggcttgggcaactggactagttcccctaataatcggggcccccgatatggcgttcccggataaacaccataagcttctgactcttacgtcctctctcctagtctggtcgcatctgcataagggagggccgggaccaggaacgtttggaacagttaacctcctttagaggggagtaatgccaccttggagctccgtaaacttaccatttttcttaaactagcgggtgccaccaactagggcgcacaatttcacacatttcattaaacctggataccaataaaggcccattgaagaccgggcaaacaagaggcaatttaaattctccagcaaagggggcactatataacaaggacgagctagcattttgacccggggggacctttagacacagatagttggcaggagtcttcaacagagacactattaactaaacagtaatgtgcatcacctggccgatgtagcgagtccacgctactcagcctcttc

SEQ ID NO: 370911 - DNA, 1387 bp, Homo sapiens
gaggattccgagggtttcagctgttgacgctttacgcgttgcgggcgcacgtcgggccgctgtttcccgagggaaggcaggtgtgcctctgcgttacagggaaaggcacttagaactgtctgagtggccccgtaagccagcgagggcgcatttcccggcgcggacgggctgctggtggttttggtggctgctctccggaggcacacctggcacgtcgaaggggggctttatatggctgtatttgacttggcaattcctgctgaacaaataatttttcatggcggcgaaacaacctgaccacactgcgcacgcgtttcctttgagcactgcattctgggtaaactgtctcaaaaatttgaagagcgcatgcgtgggccagcttcttccttttacctcgttgcactgctgagagcaagatgggtcaccagcagctgtactggagccacccgcgaaaattcggccagggttctcgctcttgtcgtgtctgttcaaaccggcacggtctgatccggaaatatggcctcaatatgtgccgccagtgtttccgtcagtacgcgaaggatatcggtttcattaagttggactaaatgctcttccttcagaggattatccggggcatctactcaatgaaaaaccatgataattctttgtatataaaataaacatttgaaaaaaaaaaaaaaaaaaaaaaaaaaaaaaaaaaaaaaaaaaaactcacaattccaaatccgcccaagaattcccggtctgcgctgatatctcctattgttctggggcagacccctcgttctatcacgcgtccgagaaccccttgaaaggcacttgttgaaccccaccttctgtgcattgcacggggctggtaataaacatgggggtgtgacaacacacccaccgttggtgttcccccaaaaaagaggtcttccgaaaagcccgcgtgtccttcacaagaatagaccgtgaaaaaccctctgtgggtttggagcccccctggacccaaacactgagcacaaacagtgggccacttagtaatgtggaagtatccccccgtggaaaaacccaagggaaattacatcgggctataggcggagggacagggagacaaatatgcgctggaacaaaatttctttactatttcgcccttgaactatggggacccccaccaagagttctcgttatctgcctgtttgtaaccgccagtttctgtgccattttggggggcgacatgtataggggtttcccgtgtgtctccaaatctcgttgggtagtcccccgagtgtctccgcgttcgtgggagtcacactcttctcgtgagtgccccccctttactatttttcccacgggtttgctcccttttatccccacgtattttggtgaccccctttcccgg

SEQ ID NO: 370912 - DNA, 1115 bp, Homo sapiens
gaggattccgagggtttcagctgttgacgctttacgcgttgcgggcgcacgtcgggccgctgtttcccgagggaaggcaggtgtgcctctgcgttacagggaaaggcacttagaactgtctgagtggccccgtaagccagcgagggcgcatttcccggcgcggacgggctgctggtggttttggtggctgctctccggaggcacacctggcacgtcgaaggggggctttatatggctgtatttgacttggcaattcctgctgaacaaataatttttcatggcggcgaaacaacctgaccacactgcgcacgcgtttcctttgagcactgcattctgggtaaactgtctcaaaaatttgaagagcgcatgcgtgggccagcttcttccttttacctcgttgcactgctgagagcaagatgggtcaccagcagctgtactggagccacccgcgaaaattcggccagggttctcgctcttgtcgtgtctgttcaaaccggcacggtctgatccggaaatatggcctcaatatgtgccgccagtgtttccgtcagtacgcgaaggatatcggtttcattaagttggactaaatgctcttccttcagaggattatccggggcatctactcaatgaaaaaccatgataattctttgtatataaaataaacatttgaaaaaaaaaaaaaaaaaaaaaaaaaaaaaaaaaaaaaaaaaaaaaaaaaaaaaaaaaaaaaaaaaaaaagggggggggcggccaaaaaacccccccggggggccccatcccacccccccattttttttgtcaaaagaggggggcgcccctaaaggagggcgggctataatataaagacaagagacagacgggcgccccgtataaaaacacaacgcggggcgggggaaacaccatggcgctgcggaggagaacctgtggaggaagagcaccccaacatcgggggcggcgcacacatagggggcacaacatcccccaaacgagaaattaacgcgccccgggacaacacaccggcagcgaataggtcggcaaacaccacgcgaatatcgcggccggagaaaaatttgcccagcagaaaactctagacattaacggggggcgaaaaaaag

SEQ ID NO: 370913 - DNA, 1133 bp, Homo sapiens
  misc_feature (701)..(701): n is a, c, g, or t
  misc_feature (707)..(707): n is a, c, g, or t
  misc_feature (717)..(717): n is a, c, g, or t
  misc_feature (721)..(721): n is a, c, g, or t
  misc_feature (732)..(732): n is a, c, g, or t
  misc_feature (736)..(736): n is a, c, g, or t
  misc_feature (753)..(753): n is a, c, g, or t
  misc_feature (758)..(758): n is a, c, g, or t
  misc_feature (762)..(762): n is a, c, g, or t
  misc_feature (764)..(764): n is a, c, g, or t
  misc_feature (768)..(768): n is a, c, g, or t
  misc_feature (771)..(772): n is a, c, g, or t
  misc_feature (775)..(775): n is a, c, g, or t
  misc_feature (779)..(779): n is a, c, g, or t
  misc_feature (785)..(785): n is a, c, g, or t
  misc_feature (796)..(796): n is a, c, g, or t
  misc_feature (799)..(799): n is a, c, g, or t
  misc_feature (802)..(802): n is a, c, g, or t
  misc_feature (806)..(806): n is a, c, g, or t
  misc_feature (814)..(814): n is a, c, g, or t
  misc_feature (825)..(825): n is a, c, g, or t
  misc_feature (836)..(837): n is a, c, g, or t
  misc_feature (841)..(841): n is a, c, g, or t
  misc_feature (866)..(867): n is a, c, g, or t
  misc_feature (878)..(878): n is a, c, g, or t
  misc_feature (883)..(883): n is a, c, g, or t
  misc_feature (888)..(888): n is a, c, g, or t
  misc_feature (894)..(894): n is a, c, g, or t
  misc_feature (898)..(898): n is a, c, g, or t
  misc_feature (911)..(911): n is a, c, g, or t
  misc_feature (923)..(924): n is a, c, g, or t
  misc_feature (926)..(926): n is a, c, g, or t
  misc_feature (928)..(928): n is a, c, g, or t
  misc_feature (931)..(932): n is a, c, g, or t
  misc_feature (938)..(938): n is a, c, g, or t
  misc_feature (951)..(951): n is a, c, g, or t
  misc_feature (953)..(953): n is a, c, g, or t
  misc_feature (957)..(957): n is a, c, g, or t
  misc_feature (961)..(961): n is a, c, g, or t
  misc_feature (963)..(963): n is a, c, g, or t
  misc_feature (965)..(965): n is a, c, g, or t
  misc_feature (971)..(972): n is a, c, g, or t
  misc_feature (978)..(978): n is a, c, g, or t
  misc_feature (986)..(986): n is a, c, g, or t
  misc_feature (997)..(997): n is a, c, g, or t
  misc_feature (1027)..(1027): n is a, c, g, or t
gaggattccgagggtttcagctgttgacgctttacgcgttgcgggcgcacgtcgggccgctgtttcccgagggaaggcaggtgtgcctctgcgttacagggaaaggcacttagaactgtctgagtggccccgtaagccagcgagggcgcatttcccggcgcggacgggctgctggtggttttggtggctgctctccggaggcacacctggcacgtcgaaggggggctttatatggctgtatttgacttggcaattcctgctgaacaaataatttttcatggcggcgaaacaacctgaccacactgcgcacgcgtttcctttgagcactgcattctgggtaaactgtctcaaaaatttgaagagcgcatgcgtgggccagcttcttccttttacctcgttgcactgctgagagcaagatgggtcaccagcagctgtactggagccacccgcgaaaattcggccagggttctcgctcttgtcgtgtctgttcaaaccggcacggtctgatccggaaatatggcctcaatatgtgccgccagtgtttccgtcagtacgcgaaggatatcggtttcattaagttggactaaatgctcttccttcagaggattatccggggcatctactcaatgaaaaaccatgataattctttgtatataaaataaacatttgaaaaaacaaaaaaaaaaaaaaaaaaaaaaatngggggnggagggccangganaaaaaaaaaantttncttgcggccgaatttcnggctnattngnccanttnnccntatngggagncgttaacattnaanggnccgnggtttaanaccgtggggangggaaaacccnngggntacccaattaattggttggaagaanntccccttttgncaggnggggnattacnaaanaggcccacccgtnggcctttccaannantngcnnaccctnatgggaatggaantngaangctnantntttggnnaaaatncgggtaanttttggtaaanaacttatttttaaccaataggccgaatggnaaattcctttttattaaaaggaataacccggaatagggtggagggtggtccagtttggaaccagaagccatttaaagaacggggcttccgaggggccgcattgggg

SEQ ID NO: 370914 - DNA, 561 bp, Homo sapiens
aggatccttaattaaattttttccccccccccccccgcttttacctcgttgcactgctgagagcaagatgggtcaccagcagctgtactggagccacccgcgaaaattcggccagggttctcgctcttggtgagaaatagtttgtgattttggggaagcgttgccgtggagcgctaggctgcttaaaatctcaagtagaggaggccacgggcggcacgagggagcacgccgactgggagtcgctggtgccgccattacaggcctgtactgtggcttgggagtcccgggatgcgggtagtagccgtctgagtgcggagtcttgtaatttctatgacctgcaaaaccgctgtctcttttcttacagtcgtgtctgttcaaaccggcacggtctgatccggaaatatggcctcaatatgtgccgccagtgtttccgtcagtacgcgaaggatatcggtttcattaagttggactaaatgctcttccttcagaggattatccggggcatctactcaatgaaaaaccatgataattctttgtatataaaataaacatttgaaaaaa

SEQ ID NO: 370915 - DNA, 1147 bp, Homo sapiens
gaggattccgagggtttcagctgttgacgctttacgcgttgcgggcgcacgtcgggccgctgtttcccgagggaaggcaggtgtgcctctgcgttacagggaaaggcacttagaactgtctgagtggccccgtaagccagcgagggcgcatttcccggcgcggacgggctgctggtggttttggtggctgctctccggaggcacacctggcacgtcgaaggggggctttatatggctgtatttgacttggcaattcctgctgaacaaataatttttcatggcggcgaaacaacctgaccacactgcgcacgcgtttcctttgagcactgcattctgggtaaactgtctcaaaaatttgaagagcgcatgcgtgggccagcttcttccttttacctcgttgcactgctgagagcaagatgggtcaccagcagctgtactggagccacccgcgaaaattcggccagggttctcgctcttgtcgtgtctgttcaaaccggcacggtctgatccggaaatatggcctcaatatgtgccgccagtgtttccgtcagtacgcgaaggatatcggtttcattaaggtaggcgtctgcaggcgtactccatgttgtttgggcagagaaggttgtgggggttattttttccgcgaaagacaaacggacagatcttccctggagtggtaattctgagcattcgaccaagagcttttcctctttttttagttggtagctggtgacagtgttgatggtttgggcaatcaaattaatagaatggagaaggtgaaggacttagtctttcctactcccttttttacctagatagcttagccagttttaggtgccgtgtattgtgtttggtgaaattcactttagagaagccactaaaattgttttacattgtttcatttatcaatcttgtaagtacctattctctttttttttttcttagagatagggtctccctctgtcgcccaggttgaagtgcagtggcgttgttacggctcactgcagcctcgaactcctcctggtctcaggcgatcctcttgccttggcgtcccgagtagctgggactaaaggctcttgccaccacgcgcggctgtacctagatattttctaaccaaatatatgtattaaccgctgaccccaagttt

SEQ ID NO: 370916 - DNA, 781 bp, Homo sapiens
gaggattccgagggtttcagctgttgacgctttacgcgttgcgggcgcacgtcgggccgctgtttcccgagggaaggcaggtgtgcctctgcgttacagggaaaggcacttagaactgtctgagtggccccgtaagccagcgagggcgcatttcccggcgcggacgggctgctggtggttttggtggctgctctccggaggcacacctggcacgtcgaaggggggctttatatggctgtatttgacttggcaattcctgctgaacaaataatttttcatggcggcgaaacaacctgaccacactgcgcacgcgtttcctttgagcactgcattctgggtaaactgtctcaaaaatttgaagagcgcatgcgtgggccagcttcttccttttacctcgttgcactgctgagagcaagatgggtcaccagcagctgtactggagccacccgcgaaaattcggccagggttctcgctcttgtcgtgtctgttcaaaccggcacggtctgatccggaaatatggcctcaatatgtgccgccagtgtttccgtcagtacgcgaaggatatcggtttcattaaggagatagggtctccctctgtcgcccaggttgaagtgcagtggcgttgttacggctcactgcagcctcgaactcctcctggtctcaggcgatcctcttgccttggcgtcccgagtagctgggactaaaggctcttgccaccacgcgcggctgtacctagatattttctaaccaaatatatgtattaaccgctgaccccaagttt

SEQ ID NO: 370917 - DNA, 855 bp, Homo sapiens
cagtgagtggagatggctccattgcactccagtccgggagacagcgagactctctctcaaaaaaaaaatgatgaactgtgtaattatagttgcctactgaacaactatcctgtgcatttggtaaagatcatttactagtgttttgggaaacattactttgatggaagaagtgcgatagcgttactaaaaatcgttctaaaacatggttgattctggagtaggcattcagtaaatatttaaactacatagaatctggtgtggtttggataggtcaaaggtccagttctgtaattctataacattctataatgagccttttttttgtgagaatcaagtagagatttaaagcattttgaaataaatcatctgctttttttttttcattggactaaatgctcttccttcagaggattatccggggcatctactcaatgaaaaaccatgataattctttgtatataaaataaacatttgaaaaaaaccaaaaaaaaaaaaaaaaaaaaaaaaaaaaaaaaaaaaaaaaaaaaaaaaaaaaaaaaaaaaaaaaaaaaaaaaaaaaaaaaaaaaaaaaaaaaaaaggggggggcccaaacgctatcgagaggagaccacatcacaacaaaaccccatcatttattagattaaaaacgaggggcccccttaacatagaagtggctttattaataaaacaaagaaggaacaagcgcacggttcttaaaaaaaacatgtggtgagaggaggaaaacaaaactctttgacgtgcgatttctggggagaaagaacacaactatctgttggggcgagagacaaaaatgggggaaaaaactaatcagaaattattcctctcggagggat

SEQ ID NO: 370918 - DNA, 435 bp, Homo sapiens
gtctgagtggccccgtaagccagcgagggcgcatttcccggcgcggacgggctgctggtggttttggtggctgctctccggaggcacacctggcacgtcgaaggggggctttatatggctgtatttgacttggcaattcctgctgaacaaataatttttcatggcgggtaggtggatggagtgtgactggcttaactgcacctgagacgtggaaagaccgtccagaccgcacaaggccttcgtactcttgattttcttgattgattgaactaggacggggcccggctggggagtgggaagcgcctggggagcaaatgttaagcaggcgctcacggtcggggtcgtggtcttgcctccttaaaatttgtgctctaggcgcctctctcaccttaacctaatcctagccgtatattaaacattttattgtgtctgagt

SEQ ID NO: 370919 - DNA, 326 bp, Homo sapiens
aggatccttaattaaattttttccccccccccccccgcttttacctcgttgcactgctgagagcaagatgggtcaccagcagctgtactggagccacccgcgaaaattcggccagggttctcgctcttgtcgtgtctgttcaaaccggcacggtctgatccggaaatatggcctcaatatgtgccgccagtgtttccgtcagtacgcgaaggatatcggtttcattaagttggactaaatgctcttccttcagaggattatccggggcatctactcaatgaaaaaccatgataattctttgtatataaaataaacatttgaaaaaa

SEQ ID NO: 370920 - DNA, 326 bp, Homo sapiens
  misc_feature (2)..(2): n is a, c, g, or t
  misc_feature (4)..(5): n is a, c, g, or t
  misc_feature (8)..(8): n is a, c, g, or t
gngnnggnacccggagaaacggccattatggccggggcttttacctcgttgcactgctgagagcaagatgggtcaccagcagctgtactggagccacccgcgaaaattcggccagggttctcgctcttgtcgtgtctgttcaaaccggcacggtctgatccggaaatatggcctcaatatgtgccgccagtgtttccgtcagtacgcgaaggatatcggtttcattaagttggactaaatgctcttccttcagaggattatccggggcatctactcaatgaaaaaccatgataattctttgtatataaaataaacatttgaaaaaa

SEQ ID NO: 370921 - DNA, 289 bp, Homo sapiens
  misc_feature (21)..(21): n is a, c, g, or t
  misc_feature (26)..(26): n is a, c, g, or t
  misc_feature (28)..(28): n is a, c, g, or t
gcccttccttggtgcactacngagangnagatgggtcaccagcagctgtactggagccacccgcgaaaattcggccagggttctcgctcttgtcgtgtctgttcaaaccggcacggtctgatccggaaatatggcctcaatatgtgccgccagtgtttccgtcagtacgcgaaggatatcggtttcattaagttggactaaatgctcttccttcagaggattatccggggcatctactcaatgaaaaaccatgataattctttgtatataaaataaacatttgaaaaaa

SEQ ID NO: 370922 - DNA, 1079 bp, Homo sapiens
cacgcggtcgcggacgcgtggcttttacctcgttgcactgctgagagcaagatgggtcaccagcagctgtactggagccacccgcgaaaattcggccagggttctcgctcttgtcgtgtctgttcaaaccggcacggtctgatccggaaatatggcctcaatatgtgccgccagtgtttccgtcagtacgcgaaggatatcggtttcattaagttggactaaatgctcttccttcagaggattatccggggcatctactcaatgaaaaaccatgataattctttgtatataaaataaacatttgaaaaaaaccaaaaaaaaaaaaaaaaaaaaaaaaaaaaaaaaaaaaaaaaaaaaaaaaaaaaaaaaaaaaaaaaaaaaaaaaaaaaaaaaaaaagggggggggccgaaaaaacacccccggggggggccaacgccgcacacccagctatttcatcttaaaaaaaggcggggccactaataagggggcggatttacaaaaaaaaccagcacgcgagcaggcgcagaacaaaacaccacaatagcaggagagcaacaaacaaggtcaatcgaggaccatcgataagaagaacccacaacatgggggggggagaccattagcgcgagacacacaacaacgaaaaaaataacgccgccggagagaaaaaaacactacgagcgttaaggagggaaacaacccacgataaagacgctgggggggagaggaaacgtcggccgacccgacgaggggaaaacaaaacaaaccgacccgggctcgttgttccacaataggggagcagtcgagcgaacagaccgacgagacagcagcagaccaaataggagagcagagcagaaggaacacaacgaacgagacgaggaaacagcgaggacaggaagagagcacaagagacccagaagaaaagagaacacagagggaacgccaaggacagcagaacagaaggcaagcgaacgcgaggcacaaaaggcaagaaccaaatagcaaccaaagcaagagcagcagagaagaggaagcaaaacaagagtgtagagagcaccaagaagaacgacagtagatacaa

SEQ ID NO: 370923 - DNA, 675 bp, Homo sapiens
gaggattccgagggtttcagctgttgacgctttacgcgttgcgggcgcacgtcgggccgctgtttcccgagggaaggcaggtgtgcctctgcgttacagggaaaggcacttagaactgtctgagtggccccgtaagccagcgagggcgcatttcccggcgcggacgggctgctggtggttttggtggctgctctccggaggcacacctggcacgtcgaaggggggctttatatggctgtatttgacttggcaattcctgctgaacaaataatttttcatggcggcgaaacaacctgaccacactgcgcacgcgtttcctttgagcactgcattctgggtaaactgtctcaaaaatttgaagagcgcatgcgtgggccagcttcttccttttacctcgttgcactgctgagagcaagatgggtcaccagcagctgtactggagccacccgcgaaaattcggccagggttctcgctcttgtcgtgtctgttcaaaccggcacggtctgatccggaaatatggcctcaatatgtgccgccagtgtttccgtcagtacgcgaaggatatcggtttcattaagttggactaaatgctcttccttcagaggattatccggggcatctactcaatgaaaaaccatgataattctttgtatataaaataaacatttgaaaaaa

SEQ ID NO: 370924 - DNA, 626 bp, Homo sapiens
  misc_feature (2)..(2): n is a, c, g, or t
  misc_feature (4)..(5): n is a, c, g, or t
  misc_feature (8)..(8): n is a, c, g, or t
gngnnggnacccggagaaacggccattatggccggggcttttacctcgttgcactgctgagagcaagatgggtcaccagcagctgtactggagccacccgcgaaaattcggccagggttctcgctcttgtcgtgtctgttcaaaccggcacggtctgatccggaaatatggcctcaatatgtgccgccagtgtttccgtcagtacgcgaaggatatcggtttcattaagttggactaaatgctcttccttcagaggattatccggggcatctactcaatgaaaaaccatgataattctttgtatataaaataaacatttgaaaaaaaccaaaaaaaaaaaaaaaaaaaaaaaaaaaaaaaaaaaaaaaaaaaaaaaaaaaaaaaaaaaaaaaaaaaaaaaaaaaaaaaaccgtccggactttgggccaactggcccattgcccctaaaagggttttgttttccacccaattggcggcctttttacaccattgccctttaggaaaccccggtaaaaaccaaactgaccggctttgaacacaatccccttttgcttggggtatacccaattatgccgcctggaccgacttcccctttggggcgggtggcttggcgggccccctcccct

SEQ ID NO: 370925 - DNA, 880 bp, Homo sapiens
  misc_feature (448)..(448): n is a, c, g, or t
  misc_feature (454)..(454): n is a, c, g, or t
  misc_feature (464)..(464): n is a, c, g, or t
  misc_feature (468)..(468): n is a, c, g, or t
  misc_feature (479)..(479): n is a, c, g, or t
  misc_feature (483)..(483): n is a, c, g, or t
  misc_feature (500)..(500): n is a, c, g, or t
  misc_feature (505)..(505): n is a, c, g, or t
  misc_feature (509)..(509): n is a, c, g, or t
  misc_feature (511)..(511): n is a, c, g, or t
  misc_feature (515)..(515): n is a, c, g, or t
  misc_feature (518)..(519): n is a, c, g, or t
  misc_feature (522)..(522): n is a, c, g, or t
  misc_feature (526)..(526): n is a, c, g, or t
  misc_feature (532)..(532): n is a, c, g, or t
  misc_feature (543)..(543): n is a, c, g, or t
  misc_feature (546)..(546): n is a, c, g, or t
  misc_feature (549)..(549): n is a, c, g, or t
  misc_feature (553)..(553): n is a, c, g, or t
  misc_feature (561)..(561): n is a, c, g, or t
  misc_feature (572)..(572): n is a, c, g, or t
  misc_feature (583)..(584): n is a, c, g, or t
  misc_feature (588)..(588): n is a, c, g, or t
  misc_feature (613)..(614): n is a, c, g, or t
  misc_feature (625)..(625): n is a, c, g, or t
  misc_feature (630)..(630): n is a, c, g, or t
  misc_feature (635)..(635): n is a, c, g, or t
  misc_feature (641)..(641): n is a, c, g, or t
  misc_feature (645)..(645): n is a, c, g, or t
  misc_feature (658)..(658): n is a, c, g, or t
  misc_feature (670)..(671): n is a, c, g, or t
  misc_feature (673)..(673): n is a, c, g, or t
  misc_feature (675)..(675): n is a, c, g, or t
  misc_feature (678)..(679): n is a, c, g, or t
  misc_feature (685)..(685): n is a, c, g, or t
  misc_feature (698)..(698): n is a, c, g, or t
  misc_feature (700)..(700): n is a, c, g, or t
  misc_feature (704)..(704): n is a, c, g, or t
  misc_feature (708)..(708): n is a, c, g, or t
  misc_feature (710)..(710): n is a, c, g, or t
  misc_feature (712)..(712): n is a, c, g, or t
  misc_feature (718)..(719): n is a, c, g, or t
  misc_feature (725)..(725): n is a, c, g, or t
  misc_feature (733)..(733): n is a, c, g, or t
  misc_feature (744)..(744): n is a, c, g, or t
  misc_feature (774)..(774): n is a, c, g, or t
aggatccttaattaaattttttccccccccccccccgcttttacctcgttgcactgctgagagcaagatgggtcaccagcagctgtactggagccacccgcgaaaattcggccagggttctcgctcttgtcgtgtctgttcaaaccggcacggtctgatccggaaatatggcctcaatatgtgccgccagtgtttccgtcagtacgcgaaggatatcggtttcattaagttggactaaatgctcttccttcagaggattatccggggcatctactcaatgaaaaaccatgataattctttgtatataaaataaacatttgaaaaaaaccaaaaaaaaaaaaaaaaaaaaaaaaaaaaaaaaaaaaaaaaaaaaaaaaaaaaaaaaaaaaaaaaaaaaaaaaaaaaaaaaaaaaaaaaaaaaacaaaaaaaaaaaaaaaaaaaaaaatngggggnggagggccangganaaaaaaaaaantttncttgcggccgaatttcnggctnattngnccanttnnccntatngggagncgttaacattnaanggnccgnggtttaanaccgtggggangggaaaacccnngggntacccaattaattggttggaagaanntccccttttgncaggnggggnattacnaaanaggcccacccgtnggcctttccaannantngcnnaccctnatgggaatggaantngaangctnantntttggnnaaaatncgggtaanttttggtaaanaacttatttttaaccaataggccgaatggnaaattcctttttattaaaaggaataacccggaatagggtggagggtggtccagtttggaaccagaagccatttaaagaacggggcttccgaggggccgcattgggg

SEQ ID NO: 370926 - DNA, 795 bp, Homo sapiens
aggatccttaattaaattttttccccccccccccccgcttttacctcgttgcactgctgagagcaagatgggtcaccagcagctgtactggagccacccgcgaaaattcggccagggttctcgctcttgtcgtgtctgttcaaaccggcacggtctgatccggaaatatggcctcaatatgtgccgccagtgtttccgtcagtacgcgaaggatatcggtttcattaagttggactaaatgctcttccttcagaggattatccggggcatctactcaatgaaaaaccatgataattctttgtatataaaataaacatttgaaaaaaaccaaaaaaaaaaaaaaaaaaaaaaaaaaaaaaaaaaaaaaaaaaaaaaaaaaaaaaaaaaaaaaaaaaaaaaaaaaaaaaaaaaaaaaaaaaaaaaaaaaaaaaaaaaaaaaaaaaaaaaaaaaaaaaaaaaaaaaaaaaaaaaaaaaaaaaaaaaaaaaaacccttggggcccgcttggcccaagtcatttttaaattggggaaggtttttgatggggcccgaatttggggttcattggcccatttccccttatggggggcggtttaaaatttaatggcccggggttttacaagggggggatgggaaaaccctggggttacccaaatttattggctgtgaagaaattccctttttcgcaggtgggggaaatacaaaggggccccaccggatcccctttcccaaaatttgccaaccctgaatgggaaataggaaatggaagcgtttattttttggataaaatcggcgt

SEQ ID NO: 370927 - DNA, 944 bp, Homo sapiens
  misc_feature (776)..(776): n is a, c, g, or t
  misc_feature (800)..(800): n is a, c, g, or t
gaggattccgagggtttcagctgttgacgctttacgcgttgcgggcgcacgtcgggccgctgtttcccgagggaaggcaggtgtgcctctgcgttacagggaaaggcacttagaactgtctgagtggccccgtaagccagcgagggcgcatttcccggcgcggacgggctgctggtggttttggtggctgctctccggaggcacacctggcacgtcgaaggggggctttatatggctgtatttgacttggcaattcctgctgaacaaataatttttcatggcggcgaaacaacctgaccacactgcgcacgcgtttcctttgagcactgcattctgggtaaactgtctcaaaaatttgaagagcgcatgcgtgggccagcttcttccttttacctcgttgcactgctgagagcaagatgggtcaccagcagctgtactggagccacccgcgaaaattcggccagggttctcgctcttgtcgtgtctgttcaaaccggcacggtctgatccggaaatatggcctcaatatgtgccgccagtgtttccgtcagtacgcgaaggatatcggtttcattaagttggactaaatgctcttccttcagaggattatccggggcatctactcaatgaaaaaccatgataattctttgtatataaaataaacatttgaaaaaaaaaaaaaaaaaaaaaaaaaaaaaactccgggggcttcttttgcggggggcgggaaaaaggggtatttgaatgggcccatggggtccataggctggttcccnggaccccagttttctttgtccaangggggctaaatctggcgcgggtccccctataggggagcggaataaattccgagataagcgccgggttaccccggggtattatgacccgcgcaaaagcgcccacagaaaaaaacccaccaaaaacgaacgagaaataaggacaca

SEQ ID NO: 370928 - DNA, 1072 bp, Homo sapiens
gaggattccgagggtttcagctgttgacgctttacgcgttgcgggcgcacgtcgggccgctgtttcccgagggaaggcaggtgtgcctctgcgttacagggaaaggcacttagaactgtctgagtggccccgtaagccagcgagggcgcatttcccggcgcggacgggctgctggtggttttggtggctgctctccggaggcacacctggcacgtcgaaggggggctttatatggctgtatttgacttggcaattcctgctgaacaaataatttttcatggcggcgaaacaacctgaccacactgcgcacgcgtttcctttgagcactgcattctgggtaaactgtctcaaaaatttgaagagcgcatgcgtgggccagcttcttccttttacctcgttgcactgctgagagcaagatgggtcaccagcagctgtactggagccacccgcgaaaattcggccagggttctcgctcttgtcgtgtctgttcaaaccggcacggtctgatccggaaatatggcctcaatatgtgccgccagtgtttccgtcagtacgcgaaggatatcggtttcattaagttggactaaatgctcttccttcagaggattatccggggcatctactcaatgaaaaaccatgataattctttgtatataaaataaacatttgaaaaaaaaaaaaaaaaaaaaaaaaaaaaaaaaaaaaaaaaaaaaaaaaaaaaaaaaaaaaaaaaaaaaaaaaaaaaaaaaaaaaaaaaaaaaaaaaacccttggggcccgcttggcccaagtcatttttaaattggggaaggtttttgatggggcccgaatttggggttcattggcccatttccccttatggggggcggtttaaaatttaatggcccggggttttacaagggggggatgggaaaaccctggggttacccaaatttattggctgtgaagaaattccctttttcgcaggtgggggaaatacaaaggggccccaccggatcccctttcccaaaatttgccaaccctgaatgggaaataggaaatggaagcgtttattttttggataaaatcggcgt

SEQ ID NO: 370929 - DNA, 1029 bp, Homo sapiens
gaggattccgagggtttcagctgttgacgctttacgcgttgcgggcgcacgtcgggccgctgtttcccgagggaaggcaggtgtgcctctgcgttacagggaaaggcacttagaactgtctgagtggccccgtaagccagcgagggcgcatttcccggcgcggacgggctgctggtggttttggtggctgctctccggaggcacacctggcacgtcgaaggggggctttatatggctgtatttgacttggcaattcctgctgaacaaataatttttcatggcggcgaaacaacctgaccacactgcgcacgcgtttcctttgagcactgcattctgggtaaactgtctcaaaaatttgaagagcgcatgcgtgggccagcttcttccttttacctcgttgcactgctgagagcaagatgggtcaccagcagctgtactggagccacccgcgaaaattcggccagggttctcgctcttgtcgtgtctgttcaaaccggcacggtctgatccggaaatatggcctcaatatgtgccgccagtgtttccgtcagtacgcgaaggatatcggtttcattaagttggactaaatgctcttccttcagaggattatccggggcatctactcaatgaaaaaccatgataattctttgtatataaaataaacatttgaaaaaaaaaaaaaaaaaaaaaactttgtgtgggccgccttgggcccttggggaagagttttctgtggcaccttcgggtgggggcgcgggggccctggttgggttaggtgtgcaccgtgggccaagaggggttccctaggggagaacccgggcgccttgagacaaaagggcgctggggttttttacccatttaaaaaacgcgccgggggggaacaccggaggcgtgttcgggaaccaaatccccaggagggagggtcacgagaggagcgcacattacaggggggcctattctcacccgggggaggccccaagggagagcccgagatttaaaattacccgagccatctctgggggggggagc

SEQ ID NO: 370930 - DNA, 1194 bp, Homo sapiens
  misc_feature (991)..(991): n is a, c, g, or t
gaggattccgagggtttcagctgttgacgctttacgcgttgcgggcgcacgtcgggccgctgtttcccgagggaaggcaggtgtgcctctgcgttacagggaaaggcacttagaactgtctgagtggccccgtaagccagcgagggcgcatttcccggcgcggacgggctgctggtggttttggtggctgctctccggaggcacacctggcacgtcgaaggggggctttatatggctgtatttgacttggcaattcctgctgaacaaataatttttcatggcggcgaaacaacctgaccacactgcgcacgcgtttcctttgagcactgcattctgggtaaactgtctcaaaaatttgaagagcgcatgcgtgggccagcttcttccttttacctcgttgcactgctgagagcaagatgggtcaccagcagctgtactggagccacccgcgaaaattcggccagggttctcgctcttgtcgtgtctgttcaaaccggcacggtctgatccggaaatatggcctcaatatgtgccgccagtgtttccgtcagtacgcgaaggatatcggtttcattaagttggactaaatgctcttccttcagaggattatccggggcatctactcaatgaaaaaccatgataattctttgtatataaaataaacatttgaaaaaaaaaaaaaaaaaaaaaaaaaaaaaaatttgttggggcggttgggcttgagagaaggtttttaagagacaatttggttggggggggggggccattggtgtagttggacccttgggcataaggtggttcctaagggagactctgggcaatggacatagtggggtgggtttctcccaattaaaaaacgggcgggggaacccggggtttggaaaaaacttgaagagggagcttggagggcccaatgaggggccttttatcaacggggggggtttccaaggggagctccaaaaatcaaatatccgcccgcggtgggggttgnaccacataacactatataaccaatactaatctactacaaacaataaacaccacctatgataacacaccacatatacacactacaccttcacatacatcatataccactacatcaaacatctattcaacacacatacactatcacacatacactacctacaccatatacacaaaatataacgattatacacattacacatagta

SEQ ID NO: 370931 - DNA, 1042 bp, Homo sapiens
gaggattccgagggtttcagctgttgacgctttacgcgttgcgggcgcacgtcgggccgctgtttcccgagggaaggcaggtgtgcctctgcgttacagggaaaggcacttagaactgtctgagtggccccgtaagccagcgagggcgcatttcccggcgcggacgggctgctggtggttttggtggctgctctccggaggcacacctggcacgtcgaaggggggctttatatggctgtatttgacttggcaattcctgctgaacaaataatttttcatggcggcgaaacaacctgaccacactgcgcacgcgtttcctttgagcactgcattctgggtaaactgtctcaaaaatttgaagagcgcatgcgtgggccagcttcttccttttacctcgttgcactgctgagagcaagatgggtcaccagcagctgtactggagccacccgcgaaaattcggccagggttctcgctcttgtcgtgtctgttcaaaccggcacggtctgatccggaaatatggcctcaatatgtgccgccagtgtttccgtcagtacgcgaaggatatcggtttcattaagttggactaaatgctcttccttcagaggattatccggggcatctactcaatgaaaaaccatgataattctttgtatataaaataaacatttgaaaaaaaaaaaaaaaaaaaaaaaaaaaactttttcggcgcgcgcgcccgggcccctggaaaaggtttttaaaccccttccggttgggcgcgcccgcgggcgccccatttagtgttactggtagacactttggcgccataacagcgtggttccctaaggagaaactccggggccatagcgacttagtggggctgtgggtttctctccccacttttaaaagaagcgcgccgggcgggaacaccgcgaggtttgttcttgagaacaccttttcctcaggtgtggggaggtccccagagagggcgccctccggggggttctctttccaccggggggtgtcccagggaggagctctccattttccaatttagcgcccg

SEQ ID NO: 370932 - DNA, 747 bp, Homo sapiens
  misc_feature (21)..(21): n is a, c, g, or t
  misc_feature (26)..(26): n is a, c, g, or t
  misc_feature (28)..(28): n is a, c, g, or t
  misc_feature (315)..(315): n is a, c, g, or t
  misc_feature (321)..(321): n is a, c, g, or t
  misc_feature (331)..(331): n is a, c, g, or t
  misc_feature (335)..(335): n is a, c, g, or t
  misc_feature (346)..(346): n is a, c, g, or t
  misc_feature (350)..(350): n is a, c, g, or t
  misc_feature (367)..(367): n is a, c, g, or t
  misc_feature (372)..(372): n is a, c, g, or t
  misc_feature (376)..(376): n is a, c, g, or t
  misc_feature (378)..(378): n is a, c, g, or t
  misc_feature (382)..(382): n is a, c, g, or t
  misc_feature (385)..(386): n is a, c, g, or t
  misc_feature (389)..(389): n is a, c, g, or t
  misc_feature (393)..(393): n is a, c, g, or t
  misc_feature (399)..(399): n is a, c, g, or t
  misc_feature (410)..(410): n is a, c, g, or t
  misc_feature (413)..(413): n is a, c, g, or t
  misc_feature (416)..(416): n is a, c, g, or t
  misc_feature (420)..(420): n is a, c, g, or t
  misc_feature (428)..(428): n is a, c, g, or t
  misc_feature (439)..(439): n is a, c, g, or t
  misc_feature (450)..(451): n is a, c, g, or t
  misc_feature (455)..(455): n is a, c, g, or t
  misc_feature (480)..(481): n is a, c, g, or t
  misc_feature (492)..(492): n is a, c, g, or t
  misc_feature (497)..(497): n is a, c, g, or t
  misc_feature (502)..(502): n is a, c, g, or t
  misc_feature (508)..(508): n is a, c, g, or t
  misc_feature (512)..(512): n is a, c, g, or t
  misc_feature (525)..(525): n is a, c, g, or t
  misc_feature (537)..(538): n is a, c, g, or t
  misc_feature (540)..(540): n is a, c, g, or t
  misc_feature (542)..(542): n is a, c, g, or t
  misc_feature (545)..(546): n is a, c, g, or t
  misc_feature (552)..(552): n is a, c, g, or t
  misc_feature (565)..(565): n is a, c, g, or t
  misc_feature (567)..(567): n is a, c, g, or t
  misc_feature (571)..(571): n is a, c, g, or t
  misc_feature (575)..(575): n is a, c, g, or t
  misc_feature (577)..(577): n is a, c, g, or t
  misc_feature (579)..(579): n is a, c, g, or t
  misc_feature (585)..(586): n is a, c, g, or t
  misc_feature (592)..(592): n is a, c, g, or t
  misc_feature (600)..(600): n is a, c, g, or t
  misc_feature (611)..(611): n is a, c, g, or t
  misc_feature (641)..(641): n is a, c, g, or t
gcccttccttggtgcactacngagangnagatgggtcaccagcagctgtactggagccacccgcgaaaattcggccagggttctcgctcttgtcgtgtctgttcaaaccggcacggtctgatccggaaatatggcctcaatatgtgccgccagtgtttccgtcagtacgcgaaggatatcggtttcattaagttggactaaatgctcttccttcagaggattatccggggcatctactcaatgaaaaaccatgataattctttgtatataaaataaacatttgaaaaaacaaaaaaaaaaaaaaaaaaaaaaatngggggnggagggccangganaaaaaaaaaantttncttgcggccgaatttcnggctnattngnccanttnnccntatngggagncgttaacattnaanggnccgnggtttaanaccgtggggangggaaaacccnngggntacccaattaattggttggaagaanntccccttttgncaggnggggnattacnaaanaggcccacccgtnggcctttccaannantngcnnaccctnatgggaatggaantngaangctnantntttggnnaaaatncgggtaanttttggtaaanaacttatttttaaccaataggccgaatggnaaattcctttttattaaaaggaataacccggaatagggtggagggtggtccagtttggaaccagaagccatttaaagaacggggcttccgaggggccgcattgggg

SEQ ID NO: 370933 - DNA, 1382 bp, Homo sapiens
gaggattccgagggtttcagctgttgacgctttacgcgttgcgggcgcacgtcgggccgctgtttcccgagggaaggcaggtgtgcctctgcgttacagggaaaggcacttagaactgtctgagtggccccgtaagccagcgagggcgcatttcccggcgcggacgggctgctggtggttttggtggctgctctccggaggcacacctggcacgtcgaaggggggctttatatggctgtatttgacttggcaattcctgctgaacaaataatttttcatggcggcgaaacaacctgaccacactgcgcacgcgtttcctttgagcactgcattctgggtaaactgtctcaaaaatttgaagagcgcatgcgtgggccagcttcttccttttacctcgttgcactgctgagagcaagatgggtcaccagcagctgtactggagccacccgcgaaaattcggccagggttctcgctcttggtgagaaatagtttgtgattttggggaagcgttgccgtggagcgctaggctgcttaaaatctcaagtagaggaggccacgggcggcacgagggagcacgccgactgggagtcgctggtgccgccattacaggcctgtactgtggcttgggagtcccgggatgcgggtagtagccgtctgagtgcggagtcttgtaatttctatgacctgcaaaaccgctgtctcttttcttacagtcgtgtctgttcaaaccggcacggtctgatccggaaatatggcctcaatatgtgccgccagtgtttccgtcagtacgcgaaggatatcggtttcattaaggtaggcgtctgcaggcgtactccatgttgtttgggcagagaaggttgtgggggttattttttccgcgaaagacaaacggacagatcttccctggagtggtaattctgagcattcgaccaagagcttttcctctttttttagttggtagctggtgacagtgttgatggtttgggcaatcaaattaatagaatggagaaggtgaaggacttagtctttcctactcccttttttacctagatagcttagccagttttaggtgccgtgtattgtgtttggtgaaattcactttagagaagccactaaaattgttttacattgtttcatttatcaatcttgtaagtacctattctctttttttttttcttagagatagggtctccctctgtcgcccaggttgaagtgcagtggcgttgttacggctcactgcagcctcgaactcctcctggtctcaggcgatcctcttgccttggcgtcccgagtagctgggactaaaggctcttgccaccacgcgcggctgtacctagatattttctaaccaaatatatgtattaaccgctgaccccaagttt

SEQ ID NO: 370934 - DNA, 413 bp, Homo sapiens
cagatgccagtactttgttttgtgtacagccggcaggaccatgagccaattaaacctctttataaattacccagcctcaggtatttctttttagcaacacaaaaatggcctgatacaattccctttgttccaatgtgaatagaaaattgagatgtttctggccaggcgcagtggctcatgcctgtaatcccagcactttgggaggctgaggcaggaggatcacgaggtcaagagattaagaccatcctggccaacatggtgaaaccctgtctctactaaaaatacaaaaattagctgggtgtggtggcgcatgcctgtagtcccagctactcaggaggctgaggcaggagaatcacttgaactgggcaggcggaggttgcagtgagctgagatcatgccactgcattccagcc

SEQ ID NO: 370935 - DNA, 266 bp, Homo sapiens
gttgtaaattttgtccatggatttattcgttcgcctctctagctgtgctttctatttttatgtgaggattcagggaaatccaaaaactatgctgctaccagcaccaccatcttctaggcatccagtgacttaatcttgaaagctagatcctgaaagcatgtctttaactggtttgaatggacattgttggtttgagggaaaagatggggattaaacctcaagctaaaatcagattgtactgctttgcattgtgccctgaccaaaaa

SEQ ID NO: 370936 - DNA, 435 bp, Homo sapiens
atgaaataatctgcacaccaaacccctgtgacatgcagtttacgtatatgacaaacatgcacatgtacccctgaacctaaaattaaaaaacaaattaccaggactgaatctatatgaaggcaggaattcagagagagaagcagagtattaaagactgcttttcttctgaggacatttgccacattctgaggagcttttactttgcttttgaaggcctcacaaggcacaggatatagaaatggaagcccaggatggcccaaggtggggagtctaataagaaattccttccctataaaactgagactccaaagagccatgcctgtagagtatgagcgaaccaaaattaaaaccctgctatgctcttgcccacaggaggctgcaagaaaagttgccttggacctaaaaaaaaaaaaaaatacttcttcgctcctaagt

SEQ ID NO: 370937 - DNA, 532 bp, Homo sapiens
gattgccaaattaataaaagcctagtcgtatatgaatttatattgtcaggatgttgtctttggaccctaattatgctaatgcagttgtaatactaaatttgaaatcaaaagaaattctaaaatataaaagggaagctaagctaaaacagtcctgcaacagactacaatcaccggtaaaaaacagttttcggctaacatcgagatagagagaatgacttttacacacgttgttctgcaatccagagaaattctaatctttaaaggattttaaatccaagagatataactaggcagtcatgggacccattccactagccaaaattcacctctctaaagcagtcacagcttatacagtgtaatagaattgacagatgtcagaccctggtgagggaatataatcattgccaaaccttcctgaaaggaacttttgctgcaagtgttggggacaagtaattcaagatgtaaaatctgcagatagccccaaagtgtcattgtctcctcaggctccacagcactttctgggaattaaaaa

SEQ ID NO: 370938 - DNA, 293 bp, Homo sapiens
cctaaaaagcagtttgggcagctctaatgcacttgtatttctgatggcagatgactttaatccctagttttccccaaccatcagtcactcttatatgtcctttctcaggacttccagaaatcattttctaaaaagccacgtgaactactatgattatgccaccagacactatttagataaatcctcagagtttattcaggtagtttcagttgctgtcttgccattctgttttctgcccctgtatcatgtcaattattagatttttaataacatagcagaaaatgagttgcctt

SEQ ID NO: 370939 - DNA, 672 bp, Homo sapiens
aggtaatgtgcaaatactgtgccattttatatcaagtacttgagcacctgcaaattttggtatctgggagggtcctggaaccaataccccgaggataccatgggacaactgtagtacatgtgtagtccatgtatgcatgtgtgaatccaagcaaacattgtataaaaataataatggaaagaacaggcttggtgcggtggctcacacctgcaatcccagcactttggaattgcaggccaacacgggaggatcacttgaggcctggagtttgaaatcggcctgggagatgtaccaagaccccatctgtacaaaaaaaaaatttagccagatgcgatggtatatgcctgtgaggcccagctacccacgaaattgaggtgggagattgcttgagcttaggagttcaaggctgagacgggccatgatcacaccactacattccagcctggttgacaaaatgagaccccatctctaaaaaaagaaaagaaaaaaagaacagtctactaacaaaacgaaaatactggacaataatcctctctaagttgggagaaggataattagagttacagtgttctgggtctttttattttggggagaggggttaaaatattgcttaacattaggtcttcttatgttgaaattgcattaaaagtgattagccatttaaaagtgaaa

SEQ ID NO: 370940 - DNA, 596 bp, Homo sapiens
ccaatgtgataaaatgttgggaggagacgcacttgtgactgatttattggtagatttttgtggttccagaagtggagttgagatccctagaaccccacaactttatgtggctcatgaaatagggaccattaaaactgtaacccccccagaggacagggacagtgaaagtggggttgcagggggacaagggactcttcaggaacctggctttggagaggcttctgaagcaattagtgtgtccagaaataggcaacccattcctctcctgatgaacaaagaaaactctacaaaaacaagtaaagttgaattgactctagcatcgccatatatgaaacaagagaaagaggaagaaaaagaaggtttctctgagtctgatttttcagatggaaacaccagttctaatgcagagagctggagaaatccttccagtgagcatttaaaattttttaactcacagtgagtctgctttatggaatgctgatgtaaaggatgattttttttaattgggattaatttgatattcttaaatgatgttaaattcttcttaccacttctgtgttcctgagactttcttaattaaaaaaattatttatatt

SEQ ID NO: 370941 - DNA, 309 bp, Homo sapiens
  misc_feature (192)..(192): n is a, c, g, or t
  misc_feature (233)..(233): n is a, c, g, or t
  misc_feature (281)..(281): n is a, c, g, or t
gcaatacaatcaatcacctttattccgggttagaacaaggccgtgcacactgcagacagaagagcacaagataggggcaatctcacagcagagtctagtagtttctctgtaaggcaaaataatctaaaaagactaacctgcccacccactccttatattgctgtggcaggttagtctttttagattattttncttacagagaaactactagactctgctgaacgagacgacangggttctcttctccgtcgcccgaacttccttgcaagccccggggggantccacctaagttctaagagccgggcccc

SEQ ID NO: 370942 - DNA, 266 bp, Homo sapiens
ttttacaaaaaatttcccactatatcctaaaaagtcggaattctgaaatagactggactcagacaccaactaaaggcagcatcactcatcactccccagcttttagtcacaagcagctaaatattctcctctaaataccaagggatgacaacccgaagctgtgagaggggaagagacctgatttgacaacaggatgaacagaactcaggcaaactaagttccagtttttaacaacgtaaaaaatatgatcgacacaaagacaaaat

SEQ ID NO: 370943 - DNA, 2481 bp, Homo sapiens
agcgggacatcaccggccagccgggtggagtgagcggcgctgggctcgggctccggctccgcgggcggaagaggcggcggcggcggcagaagcggcggcggcggcggcggcgggagccgaggaggaggttccggacgctgcttaggaaccggggactcaggagtgcccgcgccctgagcgctcagctccagaggcgtcatggctgagtacgggaccctcctgcaagacctgaccaacaacatcacccttgaagatctagaacagctcaagtcggcctgcaaggaagacatccccagcgaaaagagtgaggagatcactactggcagtgcctggtttagcttcctggagagccacaacaagctggacaaagacaacctctcctacattgagcacatctttgagatctcccgccgtcctgacctactcactatggtggttgactacagaacccgtgtgctgaagatctctgaggaggatgagctggacaccaagctaacccgtatccccagtgccaagaagtacaaagacattatccggcagccctctgaggaagagatcatcaaattggctcccccaccgaagaaggcctgagcaagggggaggaagaggaggaaggttggaccttcatcagaccactcccttcccccatcctccaggagagggggcaagggcaacccaccatctacccacttactaacctggtcctaacccccttactgtgcgcgtgtgtgtgcgtgtgcgcacgctctggctgtttgtctatatgtctagctcatctagttcctcttcttaaggggatgggggtcaggggctaggggagggggctgagtttccccactttaggaggaggtgggggctatttctatgcaaatagaaatcagcacattcctcctacttccctttcctccactccccccatatctttaaagtgtggaagcagaaaggacctgcattttcctacattgaggagctgacataggggtaaggtatgggagaggtaggtggatccagggaaaagcagtggggacggaaggcaaagagaccactcaacccccacctggaaggggcaaagaaaagccagagttccatgtttgtactcctgtgctggactgtttcctgagtaccagcaggtccctttttgtctctcatgggcctagcataggtatgagccagggatcctttcctggtccctaagatcaaaccccatggagcagccagcgttagatgcccccacccacctgtactctggagagactgtgctgggaacatgtaccactgagcctgagatggggatgagggcagagagaggggagccccctcttccactcagttgttcctactcagactgttgcactctaaacctagggaggttgaagaatgagacccttaggttttaacacgaatcctgacaccaccatctatagggtcccaacttggttattgtaggcaaccttccctctctccttggtgaagaacatcccaagccagaaagaagttaactacagtgttttcctttgcaccgatccccaccccaattcaatcccggaagggacttacttaggaaacccttctttactagatatcctggccccctgggcttgtgaacacctcctagccacatcactacagtacagtgagtgaccccagcctcctgcctaccccaagatgcccctccccaccctgaccgtgctaactgtgtgtacatatatattctacatatatgtatattaaaactgcactgccatgtctgcccttttttgtggtgtctagcattaacttattgtctaggccagagcgggggtgggaggggaatgccacagtgaagggagtggcagaatcaaattgctacatagtccaaacaaaaaagaaggctttttcaaaaaacattaaattcacatgcagtctcagagactatttagacaaagttcaagttaggagcttttaggatgtgggagtaaaactttaatgggaggggagggctggctgctggaagaaggaagaagccagactggttagacagtactcttaactcctagcccagcctagcgtgccctgcccctctggccactgctgcagacacctgccttaacacacacacctctaggactccacagttttgccttaaaggaccttcccaagtctccctttccctgtctggcttctcccttaagaagagagagatacttgtagaattgggtggggggaatgagcatgaactgtccttccatttgggatatgttacattagagtgagagagagaataaggagcctttcttatggaagaaatgggagaagagagacagggttcttttcagcagagtctagtagtttctctgtaaggcaaaataatctaaaaagactaacctgcccacccactccttatattgctgtgagattgcccctatcttgtgctcttctgtctgcagtgtgcacggccttgttctaacccggaataaaggtgattgattgtattgcaactaa

SEQ ID NO: 370944 - DNA, 2316 bp, Homo sapiens
aacagaagaaaaagatggtggggggaaggagtcatggctgagtacgggaccctcctgcaagacctgaccaacaacatcacccttgaagatctagaacagctcaagtcggcctgcaaggaagacatccccagcgaaaagagtgaggagatcactactggcagtgcctggtttagcttcctggagagccacaacaagctggacaaagacaacctctcctacattgagcacatctttgagatctcccgccgtcctgacctactcactatggtggttgactacagaacccgtgtgctgaagatctctgaggaggatgagctggacaccaagctaacccgtatccccagtgccaagaagtacaaagacattatccggcagccctctgaggaagagatcatcaaattggctcccccaccgaagaaggcctgagcaagggggaggaagaggaggaaggttggaccttcatcagaccactcccttcccccatcctccaggagagggggcaagggcaacccaccatctacccacttactaacctggtcctaacccccttactgtgcgcgtgtgtgtgcgtgtgcgcacgctctggctgtttgtctatatgtctagctcatctagttcctcttcttaaggggatgggggtcaggggctaggggagggggctgagtttccccactttaggaggaggtgggggctatttctatgcaaatagaaatcagcacattcctcctacttccctttcctccactccccccatatctttaaagtgtggaagcagaaaggacctgcattttcctacattgaggagctgacataggggtaaggtatgggagaggtaggtggatccagggaaaagcagtggggacggaaggcaaagagaccactcaacccccacctggaaggggcaaagaaaagccagagttccatgtttgtactcctgtgctggactgtttcctgagtaccagcaggtccctttttgtctctcatgggcctagcataggtatgagccagggatcctttcctggtccctaagatcaaaccccatggagcagccagcgttagatgcccccacccacctgtactctggagagactgtgctgggaacatgtaccactgagcctgagatggggatgagggcagagagaggggagccccctcttccactcagttgttcctactcagactgttgcactctaaacctagggaggttgaagaatgagacccttaggttttaacacgaatcctgacaccaccatctatagggtcccaacttggttattgtaggcaaccttccctctctccttggtgaagaacatcccaagccagaaagaagttaactacagtgttttcctttgcaccgatccccaccccaattcaatcccggaagggacttacttaggaaacccttctttactagatatcctggccccctgggcttgtgaacacctcctagccacatcactacagtacagtgagtgaccccagcctcctgcctaccccaagatgcccctccccaccctgaccgtgctaactgtgtgtacatatatattctacatatatgtatattaaaactgcactgccatgtctgcccttttttgtggtgtctagcattaacttattgtctaggccagagcgggggtgggaggggaatgccacagtgaagggagtggcagaatcaaattgctacatagtccaaacaaaaaagaaggctttttcaaaaaacattaaattcacatgcagtctcagagactatttagacaaagttcaagttaggagcttttaggatgtgggagtaaaactttaatgggaggggagggctggctgctggaagaaggaagaagccagactggttagacagtactcttaactcctagcccagcctagcgtgccctgcccctctggccactgctgcagacacctgccttaacacacacacctctaggactccacagttttgccttaaaggaccttcccaagtctccctttccctgtctggcttctcccttaagaagagagagatacttgtagaattgggtggggggaatgagcatgaactgtccttccatttgggatatgttacattagagtgagagagagaataaggagcctttcttatggaagaaatgggagaagagagacagggttcttttcagcagagtctagtagtttctctgtaaggcaaaataatctaaaaagactaacctgcccacccactccttatattgctgtgagattgcccctatcttgtgctcttctgtctgcagtgtgcacggccttgttctaacccggaataaaggtgattgattgtattgcaactaa

SEQ ID NO: 370945 - DNA, 2351 bp, Homo sapiens
agagccggtacctctctccagactggctctctccacactggagctgagcgctcagctccagaggcgtcatggctgagtacgggaccctcctgcaagacctgaccaacaacatcacccttgaagatctagaacagctcaagtcggcctgcaaggaagacatccccagcgaaaagagtgaggagatcactactggcagtgcctggtttagcttcctggagagccacaacaagctggacaaagacaacctctcctacattgagcacatctttgagatctcccgccgtcctgacctactcactatggtggttgactacagaacccgtgtgctgaagatctctgaggaggatgagctggacaccaagctaacccgtatccccagtgccaagaagtacaaagacattatccggcagccctctgaggaagagatcatcaaattggctcccccaccgaagaaggcctgagcaagggggaggaagaggaggaaggttggaccttcatcagaccactcccttcccccatcctccaggagagggggcaagggcaacccaccatctacccacttactaacctggtcctaacccccttactgtgcgcgtgtgtgtgcgtgtgcgcacgctctggctgtttgtctatatgtctagctcatctagttcctcttcttaaggggatgggggtcaggggctaggggagggggctgagtttccccactttaggaggaggtgggggctatttctatgcaaatagaaatcagcacattcctcctacttccctttcctccactccccccatatctttaaagtgtggaagcagaaaggacctgcattttcctacattgaggagctgacataggggtaaggtatgggagaggtaggtggatccagggaaaagcagtggggacggaaggcaaagagaccactcaacccccacctggaaggggcaaagaaaagccagagttccatgtttgtactcctgtgctggactgtttcctgagtaccagcaggtccctttttgtctctcatgggcctagcataggtatgagccagggatcctttcctggtccctaagatcaaaccccatggagcagccagcgttagatgcccccacccacctgtactctggagagactgtgctgggaacatgtaccactgagcctgagatggggatgagggcagagagaggggagccccctcttccactcagttgttcctactcagactgttgcactctaaacctagggaggttgaagaatgagacccttaggttttaacacgaatcctgacaccaccatctatagggtcccaacttggttattgtaggcaaccttccctctctccttggtgaagaacatcccaagccagaaagaagttaactacagtgttttcctttgcaccgatccccaccccaattcaatcccggaagggacttacttaggaaacccttctttactagatatcctggccccctgggcttgtgaacacctcctagccacatcactacagtacagtgagtgaccccagcctcctgcctaccccaagatgcccctccccaccctgaccgtgctaactgtgtgtacatatatattctacatatatgtatattaaaactgcactgccatgtctgcccttttttgtggtgtctagcattaacttattgtctaggccagagcgggggtgggaggggaatgccacagtgaagggagtggcagaatcaaattgctacatagtccaaacaaaaaagaaggctttttcaaaaaacattaaattcacatgcagtctcagagactatttagacaaagttcaagttaggagcttttaggatgtgggagtaaaactttaatgggaggggagggctggctgctggaagaaggaagaagccagactggttagacagtactcttaactcctagcccagcctagcgtgccctgcccctctggccactgctgcagacacctgccttaacacacacacctctaggactccacagttttgccttaaaggaccttcccaagtctccctttccctgtctggcttctcccttaagaagagagagatacttgtagaattgggtggggggaatgagcatgaactgtccttccatttgggatatgttacattagagtgagagagagaataaggagcctttcttatggaagaaatgggagaagagagacagggttcttttcagcagagtctagtagtttctctgtaaggcaaaataatctaaaaagactaacctgcccacccactccttatattgctgtgagattgcccctatcttgtgctcttctgtctgcagtgtgcacggccttgttctaacccggaataaaggtgattgattgtattgcaactaa

SEQ ID NO: 370946 - DNA, 2332 bp, Homo sapiens
agcgggacatcaccggccagccgggtggagtgagcggcgctgggctcgggctccggctccgcgggcggaagaggcggcggcggcggcagaagcggcggcggcggcggcggcgggagccgaggaggaggttccggacgctgcttaggaaccggggactcaggagtgcccgcgccctgagcgctcagctccagaggcgtcatggctgagtacgggaccctcctgcaagacctgaccaacaacatcacccttgaagatctagaacagctcaagtcggcctgcaaggaagacatccccagcgaaaagagtgaggagatcactactggcagtgcctggtttagcttcctggagagccacaacaagctggacaaagacaacctctcctacattgagcacatctttgagatctcccgccgtcctgacctactcactatggtggttgactacagaacccgtgtgctgaagatctctgaggaggatgagctggacaccaagctaacccgtatccccagtgccaagaagtacaaagacattatccggcagccctctgaggaagagatcatcaaattggctcccccaccgaagaaggcctgagcaagggggaggaagaggaggaaggttggaccttcatcagaccactcccttcccccatcctccaggagagggggcaagggcaacccaccatctacccacttactaacctggtcctaacccccttactgtgcgcgtgtgtgtgcgtgtgcgcacgctctggctgtttgtctatatgtctagctcatctagttcctcttcttaaggggatgggggtcaggggctaggggagggggctgagtttccccactttaggaggaggtgggggctatttctatgcaaatagaaatcagcacattcctcctacttccctttcctccactccccccatatctttaaagtgtggaagcagaaaggacctgcattttcctacattgaggagctgacataggggtaaggtatgggagaggtaggtggatccagggaaaagcagtggggacggaaggcaaagagaccactcaacccccacctggaaggggcaaagaaaagccagagttccatgtttgtactcctgtgctggactgtttcctgagtaccagcaggtccctttttgtctctcatgggcctagcataggtatgagccagggatcctttcctggtccctaagatcaaaccccatggagcagccagcgttagatgcccccacccacctgtactctggagagactgtgctgggaacatgtaccactgagcctgagatggggatgagggcagagagaggggagccccctcttccactcagttgttcctactcagactgttgcactctaaacctagggaggttgaagaatgagacccttaggttttaacacgaatcctgacaccaccatctatagggtcccaacttggttattgtaggcaaccttccctctctccttggtgaagaacatcccaagccagaaagaagttaactacagtgttttcctttgcaccgatccccaccctgaccgtgctaactgtgtgtacatatatattctacatatatgtatattaaaactgcactgccatgtctgcccttttttgtggtgtctagcattaacttattgtctaggccagagcgggggtgggaggggaatgccacagtgaagggagtggcagaatcaaattgctacatagtccaaacaaaaaagaaggctttttcaaaaaacattaaattcacatgcagtctcagagactatttagacaaagttcaagttaggagcttttaggatgtgggagtaaaactttaatgggaggggagggctggctgctggaagaaggaagaagccagactggttagacagtactcttaactcctagcccagcctagcgtgccctgcccctctggccactgctgcagacacctgccttaacacacacacctctaggactccacagttttgccttaaaggaccttcccaagtctccctttccctgtctggcttctcccttaagaagagagagatacttgtagaattgggtggggggaatgagcatgaactgtccttccatttgggatatgttacattagagtgagagagagaataaggagcctttcttatggaagaaatgggagaagagagacagggttcttttcagcagagtctagtagtttctctgtaaggcaaaataatctaaaaagactaacctgcccacccactccttatattgctgtgagattgcccctatcttgtgctcttctgtctgcagtgtgcacggccttgttctaacccggaataaaggtgattgattgtattgcaactaa

SEQ ID NO: 370947 - DNA, 2466 bp, Homo sapiens
agcgggacatcaccggccagccgggtggagtgagcggcgctgggctcgggctccggctccgcgggcggaagaggcggcggcggcggcagaagcggcggcggcggcggcggcgggagccgaggaggaggttccggacgctgcttaggaaccggggactcaggagtgcccgcgccctgagcgctcagctccagaggcgtcatggctgagtacgggaccctcctgcaagacctgaccaacaacatcacccttgaagatctagaacagctcaagtcggcctgcaaggaagacatccccagcgaaaagagtgaggagatcactactggcagtgcctggtttagcttcctggagagccacaacaagctggacaaagacaacctctcctacattgagcacatctttgagatctcccgccgtcctgacctactcactatggtggttgactacagaacccgtgtgctgaagatctctgaggaggatgagctggacaccaagctaacccgtatccccagtgccaagaagtacaaagacattatccggcagccctctgaggaagagatcatcaaattggctcccccaccgaagaaggcctgagcaagggggaggaagaggaggaaggttggaccttcatcagaccactcccttcccccatcctccaggagagggggcaagggcaacccaccatctacccacttactaacctggtcctaacccccttactgtgcgcgtgtgtgtgcgtgtgcgcacgctctggctgtttgtctatatgtctagctcatctagttcctcttcttaaggggatgggggtcaggggctaggggagggggctgagtttccccactttaggaggaggtgggggctatttctatgcaaatagaaatcagcacattcctcctacttccctttcctccactccccccatatctttaaagtgtggaagcagaaaggacctgcattttcctacattgaggagctgacataggggtaaggtatgggagaggtaggtggatccagggaaaagcagtggggacggaaggcaaagagaccactcaacccccacctggaaggggcaaagaaaagccagagttccatgtttgtactcctgtgctggactgtttcctgagtaccagcaggtccctttttgtctctcatgggcctagcataggtatgagccagggatcctttcctggtccctaagatcaaaccccatggagcagccagcgttagatgcccccacccacctgtactctggagagactgtgctgggaacatgtaccactgagcctgagatggggatgagggcagagagaggggagccccctcttccactcagttgttcctactcagactgttgcactctaaacctagggaggttgaagaatgagacccttaggttttaacacgaatcctgacaccaagctaacccgtatccccagtgccaagaagtacaaagacattatccggcagccctctgaggaagagatcatcaaattggctcccccaccgaagaaggcctgagcaagggggaggacgaggagggaaggttggaccttcatcagaccactcccttcccccatcctccaggagagggggcaagggcaacccacatcactacagtacagtgagtgaccccagcctcctgcctaccccaagatgcccctccccaccctgaccgtgctaactgtgtgtacatatatattctacatatatgtatattaaaactgcactgccatgtctgcccttttttgtggtgtctagcattaacttattgtctaggccagagcgggggtgggaggggaatgccacagtgaagggagtggcagaatcaaattgctacatagtccaaacaaaaaagaaggctttttcaaaaaacattaaattcacatgcagtctcagagactatttagacaaagttcaagttaggagcttttaggatgtgggagtaaaactttaatgggaggggagggctggctgctggaagaaggaagaagccagactggttagacagtactcttaactcctagcccagcctagcgtgccctgcccctctggccactgctgcagacacctgccttaacacacacacctctaggactccacagttttgccttaaaggaccttcccaagtctccctttccctgtctggcttctcccttaagaagagagagatacttgtagaattgggtggggggaatgagcatgaactgtccttccatttgggatatgttacattagagtgagagagagaataaggagcctttcttatggaagaaatgggagaagagagacagggttcttttcagcagagtctagtagtttctctgtaaggcaaaataatctaaaaagactaacctgcccacccactccttatattgctgtgagattgcccctatcttgtgctcttctgtctgcagtgtgcacggccttgttctaacccggaataaaggtgattgattgtattgcaactaa

SEQ ID NO: 370948 - DNA, 2099 bp, Homo sapiens
  misc_feature (14)..(14): n is a, c, g, or t
agggaggacaatgnaggctaggtacgaggcctgggtgttatcgggctccggctccgcgggcggaagaggcggcggcggcggcagaagcggcggcggcggcggcggcgggagccgaggaggaggttccggacgctgcttaggaaccggggactcaggagtgcccgcgccctgagcgctcagctccagaggcgtcatggctgagtacgggaccctcctgcaagacctgaccaacaacatcacccttgaagatctagaacagctcaagtcggcctgcaaggaagacatccccagcgaaaagagtgaggagatcactactggcagtgcctggtttagcttcctggagagccacaacaagctggacaaagacaacctctcctacattgagcacatctttgagatctcccgccgtcctgacctactcactatggtggttgactacagaacccgtgtgctgaagatctgaggaggtgggggctatttctatgcaaatagaaatcagcacattcctcctacttccctttcctccactccccccatatctttaaagtgtggaagcagaaaggacctgcattttcctacattgaggagctgacataggggtaaggtatgggagaggtaggtggatccagggaaaagcagtggggacggaaggcaaagagaccactcaacccccacctggaaggggcaaagaaaagccagagttccatgtttgtactcctgtgctggactgtttcctgagtaccagcaggtccctttttgtctctcatgggcctagcataggtatgagccagggatcctttcctggtccctaagatcaaaccccatggagcagccagcgttagatgcccccacccacctgtactctggagagactgtgctgggaacatgtaccactgagcctgagatggggatgagggcagagagaggggagccccctcttccactcagttgttcctactcagactgttgcactctaaacctagggaggttgaagaatgagacccttaggttttaacacgaatcctgacaccaccatctatagggtcccaacttggttattgtaggcaaccttccctctctccttggtgaagaacatcccaagccagaaagaagttaactacagtgttttcctttgcaccgatccccaccccaattcaatcccggaagggacttacttaggaaacccttctttactagatatcctggccccctgggcttgtgaacacctcctagccacatcactacagtacagtgagtgaccccagcctcctgcctaccccaagatgcccctccccaccctgaccgtgctaactgtgtgtacatatatattctacatatatgtatattaaaactgcactgccatgtctgcccttttttgtggtgtctagcattaacttattgtctaggccagagcgggggtgggaggggaatgccacagtgaagggagtggcagaatcaaattgctacatagtccaaacaaaaaagaaggctttttcaaaaaacattaaattcacatgcagtctcagagactatttagacaaagttcaagttaggagcttttaggatgtgggagtaaaactttaatgggaggggagggctggctgctggaagaaggaagaagccagactggttagacagtactcttaactcctagcccagcctagcgtgccctgcccctctggccactgctgcagacacctgccttaacacacacacctctaggactccacagttttgccttaaaggaccttcccaagtctccctttccctgtctggcttctcccttaagaagagagagatacttgtagaattgggtggggggaatgagcatgaactgtccttccatttgggatatgttacattagagtgagagagagaataaggagcctttcttatggaagaaatgggagaagagagacagggttcttttcagcagagtctagtagtttctctgtaaggcaaaataatctaaaaagactaacctgcccacccactccttatattgctgtgagattgcccctatcttgtgctcttctgtctgcagtgtgcacggccttgttctaacccggaataaaggtgattgattgtattgcaactaa

SEQ ID NO: 370949 - DNA, 1678 bp, Homo sapiens
  misc_feature (14)..(14): n is a, c, g, or t
agggaggacaatgnaggctaggtacgaggcctgggtgttagaggaggtgggggctatttctatgcaaatagaaatcagcacattcctcctacttccctttcctccactccccccatatctttaaagtgtggaagcagaaaggacctgcattttcctacattgaggagctgacataggggtaaggtatgggagaggtaggtggatccagggaaaagcagtggggacggaaggcaaagagaccactcaacccccacctggaaggggcaaagaaaagccagagttccatgtttgtactcctgtgctggactgtttcctgagtaccagcaggtccctttttgtctctcatgggcctagcataggtatgagccagggatcctttcctggtccctaagatcaaaccccatggagcagccagcgttagatgcccccacccacctgtactctggagagactgtgctgggaacatgtaccactgagcctgagatggggatgagggcagagagaggggagccccctcttccactcagttgttcctactcagactgttgcactctaaacctagggaggttgaagaatgagacccttaggttttaacacgaatcctgacaccaccatctatagggtcccaacttggttattgtaggcaaccttccctctctccttggtgaagaacatcccaagccagaaagaagttaactacagtgttttcctttgcaccgatccccaccccaattcaatcccggaagggacttacttaggaaacccttctttactagatatcctggccccctgggcttgtgaacacctcctagccacatcactacagtacagtgagtgaccccagcctcctgcctaccccaagatgcccctccccaccctgaccgtgctaactgtgtgtacatatatattctacatatatgtatattaaaactgcactgccatgtctgcccttttttgtggtgtctagcattaacttattgtctaggccagagcgggggtgggaggggaatgccacagtgaagggagtggcagaatcaaattgctacatagtccaaacaaaaaagaaggctttttcaaaaaacattaaattcacatgcagtctcagagactatttagacaaagttcaagttaggagcttttaggatgtgggagtaaaactttaatgggaggggagggctggctgctggaagaaggaagaagccagactggttagacagtactcttaactcctagcccagcctagcgtgccctgcccctctggccactgctgcagacacctgccttaacacacacacctctaggactccacagttttgccttaaaggaccttcccaagtctccctttccctgtctggcttctcccttaagaagagagagatacttgtagaattgggtggggggaatgagcatgaactgtccttccatttgggatatgttacattagagtgagagagagaataaggagcctttcttatggaagaaatgggagaagagagacagggttcttttcagcagagtctagtagtttctctgtaaggcaaaataatctaaaaagactaacctgcccacccactccttatattgctgtgagattgcccctatcttgtgctcttctgtctgcagtgtgcacggccttgttctaacccggaataaaggtgattgattgtattgcaactaa

SEQ ID NO: 370950 - DNA, 2829 bp, Homo sapiens
agcgggacatcaccggccagccgggtggagtgagcggcgctgggctcgggctccggctccgcgggcggaagaggcggcggcggcggcagaagcggcggcggcggcggcggcgggagccgaggaggaggttccggacgctgcttaggaaccggggactcaggagtgcccgcgccctgagcgctcagctccagaggcgtcatggctgagtacgggaccctcctgcaagacctgaccaacaacatcacccttgaagatctagaacagctcaagtcggcctgcaaggaagacatccccagcgaaaagagtgaggagatcactactggcagtgcctggtttagcttcctggagagccacaacaagctggacaaagacaacctctcctacattgagcacatctttgagatctcccgccgtcctgacctactcactatggtggttgactacagaacccgtgtgctgaagatctctgaggaggatgagctggacaccaagctaacccgtatccccagtgccaagaagtacaaagacattatccggcagccctctgaggaagagatcatcaaattggctcccccaccgaagaaggcctgagcaagggggaggaagaggaggaaggttggaccttcatcagaccactcccttcccccatcctccaggagagggggcaagggcaacccaccatctacccacttactaacctggtcctaacccccttactgtgcgcgtgtgtgtgcgtgtgcgcacgctctggctgtttgtctatatgtctagctcatctagttcctcttcttaaggggatgggggtcaggggctaggggagggggctgagtttccccactttaggaggaggtgggggctatttctatgcaaatagaaatcagcacattcctcctacttccctttcctccactccccccatatctttaaagtgtggaagcagaaaggacctgcattttcctacattgaggagctgacataggggtaaggtatgggagaggtaggtggatccagggaaaagcagtggggacggaaggcaaagagaccactcaacccccacctggaaggggcaaagaaaagccagagttccatgtttgtactcctgtgctggactgtttcctgagtaccagcaggtccctttttgtctctcatgggcctagcataggtatgagccagggatcctttcctggtccctaagatcaaaccccatggagcagccagcgttagatgcccccacccacctgtactctggagagactgtgctgggaacatgtaccactgagcctgagatggggatgagggcagagagaggggagccccctcttccactcagttgttcctactcagactgttgcactctaaacctagggaggttgaagaatgagacccttaggttttaacacgaatcctgacaccaccatctatagggtcccaacttggttattgtaggcaaccttccctctctccttggtgaagaacatcccaagccagaaagaagttaactacagtgttttcctttgcaccgatccccaccccaattcaatcccggaagggacttacttaggaaacccttctttactagatatcctggccccctgggcttgtgaacacctcctagccacatcactacagtacagtgagtgaccccagcctcctgcctaccccaagatgcccctccccaccctgaccgtgctaactgtgtgtacatatatattctacatatatgtatattaaaactgcactgccatgtctgcccttttttgtggtgtctagcattaacttattgtctaggccagagcgggggtgggaggggaatgccacagtgaagggagtggcagaatcaaattgctacatagtccaaacaaaaaagaaggctttttcaaaaaacattaaattcacatgcagtctcagagactatttagacaaagttcaagttaggagcttttaggatgtgggagtaaaactttaatgggaggggagggctggctgctggaagaaggaagaagccagactggttagacagtactcttaactcctagcccagcctagcgtgccctgcccctctggccactgctgcagacacctgccttaacacacacacctctaggactccacagttttgccttaaaggaccttcccaagtctccctttccctgtctggcttctcccttaagaagagagagatacttgtagaattgggtggggggaatgagcatgaactgtccttccatttgggatatgttacattagagtgagagagagaataaggagcctttcttatggaagaaatgggagaagagagacagggttcttttcagcagagtctagtagtttctctgtaaggcaaaataatctaaaaagactaacctgcccacccactccttatattgctgtgagattgcccctatcttgtgctcttctgtctgcagtgtgcacggccttgttctaacccggaataaaggtgattgattgtattgcaactaactaactgattttaaaatttctgtgagtgaccaggattttgcaggctttgaatcactgggaagggagggggaacaatatttatggcccagaataagggctgggaaaataccccaagtgtataccctcaccccacccaatctcctaagtatcactgagctaaatggagtgtatcctacttccaacagtctccaattggagcccaagcactggaaatacgggtctcccaaaatggactttctaacactgtatcatgtgcagaatgagaggggaaggctaggtacctacattagtaggaacaaaaaccatccattgtgaataaatggaccacataccacacagagcagcagt

SEQ ID NO: 370951 - DNA, 1493 bp, Homo sapiens
  misc_feature (26)..(26): n is a, c, g, or t
cggacgcgtgggtcgacccacgcgtncgagcagtggggacggaaggcaaagagaccactcaacccccacctggaaggggcaaagaaaagccagagttccatgtttgtactcctgtgctggactgtttcctgagtaccagcaggtccctttttgtctctcatgggcctagcataggtatgagccagggatcctttcctggtccctaagatcaaaccccatggagcagccagcgttagatgcccccacccacctgtactctggagagactgtgctgggaacatgtaccactgagcctgagatggggatgagggcagagagaggggagccccctcttccactcagttgttcctactcagactgttgcactctaaacctagggaggttgaagaatgagacccttaggttttaacacgaatcctgacaccaccatctatagggtcccaacttggttattgtaggcaaccttccctctctccttggtgaagaacatcccaagccagaaagaagttaactacagtgttttcctttgcaccgatccccaccccaattcaatcccggaagggacttacttaggaaacccttctttactagatatcctggccccctgggcttgtgaacacctcctagccacatcactacagtacagtgagtgaccccagcctcctgcctaccccaagatgcccctccccaccctgaccgtgctaactgtgtgtacatatatattctacatatatgtatattaaaactgcactgccatgtctgcccttttttgtggtgtctagcattaacttattgtctaggccagagcgggggtgggaggggaatgccacagtgaagggagtggcagaatcaaattgctacatagtccaaacaaaaaagaaggctttttcaaaaaacattaaattcacatgcagtctcagagactatttagacaaagttcaagttaggagcttttaggatgtgggagtaaaactttaatgggaggggagggctggctgctggaagaaggaagaagccagactggttagacagtactcttaactcctagcccagcctagcgtgccctgcccctctggccactgctgcagacacctgccttaacacacacacctctaggactccacagttttgccttaaaggaccttcccaagtctccctttccctgtctggcttctcccttaagaagagagagatacttgtagaattgggtggggggaatgagcatgaactgtccttccatttgggatatgttacattagagtgagagagagaataaggagcctttcttatggaagaaatgggagaagagagacagggttcttttcagcagagtctagtagtttctctgtaaggcaaaataatctaaaaagactaacctgcccacccactccttatattgctgtgagattgcccctatcttgtgctcttctgtctgcagtgtgcacggccttgttctaacccggaataaaggtgattgattgtattgcaactaa

SEQ ID NO: 370952 - DNA, 1537 bp, Homo sapiens
cgacttataacgcgtgtgcactggccgtcgtatacgggtaaggtatgggagaggtaggtggatccagggaaaagcagtggggacggaaggcaaagagaccactcaacccccacctggaaggggcaaagaaaagccagagttccatgtttgtactcctgtgctggactgtttcctgagtaccagcaggtccctttttgtctctcatgggcctagcataggtatgagccagggatcctttcctggtccctaagatcaaaccccatggagcagccagcgttagatgcccccacccacctgtactctggagagactgtgctgggaacatgtaccactgagcctgagatggggatgagggcagagagaggggagccccctcttccactcagttgttcctactcagactgttgcactctaaacctagggaggttgaagaatgagacccttaggttttaacacgaatcctgacaccaccatctatagggtcccaacttggttattgtaggcaaccttccctctctccttggtgaagaacatcccaagccagaaagaagttaactacagtgttttcctttgcaccgatccccaccccaattcaatcccggaagggacttacttaggaaacccttctttactagatatcctggccccctgggcttgtgaacacctcctagccacatcactacagtacagtgagtgaccccagcctcctgcctaccccaagatgcccctccccaccctgaccgtgctaactgtgtgtacatatatattctacatatatgtatattaaaactgcactgccatgtctgcccttttttgtggtgtctagcattaacttattgtctaggccagagcgggggtgggaggggaatgccacagtgaagggagtggcagaatcaaattgctacatagtccaaacaaaaaagaaggctttttcaaaaaacattaaattcacatgcagtctcagagactatttagacaaagttcaagttaggagcttttaggatgtgggagtaaaactttaatgggaggggagggctggctgctggaagaaggaagaagccagactggttagacagtactcttaactcctagcccagcctagcgtgccctgcccctctggccactgctgcagacacctgccttaacacacacacctctaggactccacagttttgccttaaaggaccttcccaagtctccctttccctgtctggcttctcccttaagaagagagagatacttgtagaattgggtggggggaatgagcatgaactgtccttccatttgggatatgttacattagagtgagagagagaataaggagcctttcttatggaagaaatgggagaagagagacagggttcttttcagcagagtctagtagtttctctgtaaggcaaaataatctaaaaagactaacctgcccacccactccttatattgctgtgagattgcccctatcttgtgctcttctgtctgcagtgtgcacggccttgttctaacccggaataaaggtgattgattgtattgcaactaa

SEQ ID NO: 370953 - DNA, 2229 bp, Homo sapiens
agcgggacatcaccggccagccgggtggagtgagcggcgctgggctcgggctccggctccgcgggcggaagaggcggcggcggcggcagaagcggcggcggcggcggcggcgggagccgaggaggaggttccggacgctgcttaggaaccggggactcaggagtgcccgcgccctgagcgctcagctccagaggcgtcatggctgagtacgggaccctcctgcaagacctgaccaacaacatcacccttgaagatctagaacagctcaagtcggcctgcaaggaagacatccccagcgaaaagagtgaggagatcactactggcagtgcctggtttagcttcctggagagccacaacaagctggacaaagacaacctctcctacattgagcacatctttgagatctcccgccgtcctgacctactcactatggtggttgactacagaacccgtgtgctgaagatctctgaggaggatgagctggacaccaagctaacccgtatccccagtgccaagaagtacaaagacattatccggcagccctctgaggaagagatcatcaaattggctcccccaccgaagaaggcctgagcaagggggaggaagaggaggaaggttggaccttcatcagaccactcccttcccccatcctccaggagagggggcaagggcaacccaccatctacccacttactaacctggtcctaacccccttactgtgcgcgtgtgtgtgcgtgtgcgcacgctctggctgtttgtctatatgtctagctcatctagttcctcttcttaaggggatgggggtcaggggctaggggagggggctgagtttccccactttaggaggaggtgggggctatttctatgcaaatagaaatcagcacattcctcctacttccctttcctccactccccccatatctttaaagtgtggaagcagaaaggacctgcattttcctacattgaggagctgacataggggtaaggtatgggagaggtaggtggatccagggaaaagcagtggggacggaaggcaaagagaccactcaacccccacctggaaggggcaaagaaaagccagagttccatgtttgtactcctgtgctggactgtttcctgagtaccagcaggtccctttttgtctctcatgggcctagcataggtatgagccagggatcctttcctggtccctaagatcaaaccccatggagcagccagcgttagatgcccccacccacctgtactctggagagactgtgctgggaacatgtaccactgagcctgagatggggatgagggcagagagaggggagccccctcttccactcagttgttcctactcagactgttgcactctaaacctagggaggttgaagaatgagacccttaggttttaacacgaatcctgacaccaccatctatagggtcccaacttggttattgtaggcaaccttccctctctccttggtgaagaacatcccaagccagaaagaagttaactacagtgttttcctttgcaccgatccccaccccaattcaatcccggaagggacttacttaggaaacccttctttactagatatcctggccccctgggcttgtgaacacctcctagccacatcactacagtacagtgagtgaccccagcctcctgcctaccccaagatgcccctccccaccctgaccgtgctaactgtgtgtacatatatattctacatatatgtatattaaaactgcactgccatgtctgcccttttttgtggtgtctagcattaacttattgtctaggccagagcgggggtgggaggggaatgccacagtgaagggagtggcagaatcaaattgctacatagtccaaacaaaaaagaaggctttttcaaaaaacattaaattcacatgcagtctcagagactatttagacaaagttcaagttaggagcttttaggatgtgggagtaaaactttaatgggaggggagggctggctgctggaagaaggaagaagccagactggttagacagtactcttaactcctagcccagcctagcgtgccctgcccctctggccactgctgcagacacctgccttaacacacacacctctaggactccacagttttgccttaaaggaccttcccaagtctccctttccctgtctggcttctcccttaagaagagagagatacttgtagaattgggagagatatgagcgtaacatgggccgagctcga

SEQ ID NO: 370954 - DNA, 1261 bp, Homo sapiens
agctcggtacccgttggtcgatcatctggagagactgtgctgggaacatgtaccactgagcctgagatggggatgagggcagagagaggggagccccctcttccactcagttgttcctactcagactgttgcactctaaacctagggaggttgaagaatgagacccttaggttttaacacgaatcctgacaccaccatctatagggtcccaacttggttattgtaggcaaccttccctctctccttggtgaagaacatcccaagccagaaagaagttaactacagtgttttcctttgcaccgatccccaccccaattcaatcccggaagggacttacttaggaaacccttctttactagatatcctggccccctgggcttgtgaacacctcctagccacatcactacagtacagtgagtgaccccagcctcctgcctaccccaagatgcccctccccaccctgaccgtgctaactgtgtgtacatatatattctacatatatgtatattaaaactgcactgccatgtctgcccttttttgtggtgtctagcattaacttattgtctaggccagagcgggggtgggaggggaatgccacagtgaagggagtggcagaatcaaattgctacatagtccaaacaaaaaagaaggctttttcaaaaaacattaaattcacatgcagtctcagagactatttagacaaagttcaagttaggagcttttaggatgtgggagtaaaactttaatgggaggggagggctggctgctggaagaaggaagaagccagactggttagacagtactcttaactcctagcccagcctagcgtgccctgcccctctggccactgctgcagacacctgccttaacacacacacctctaggactccacagttttgccttaaaggaccttcccaagtctccctttccctgtctggcttctcccttaagaagagagagatacttgtagaattgggtggggggaatgagcatgaactgtccttccatttgggatatgttacattagagtgagagagagaataaggagcctttcttatggaagaaatgggagaagagagacagggttcttttcagcagagtctagtagtttctctgtaaggcaaaataatctaaaaagactaacctgcccacccactccttatattgctgtgagattgcccctatcttgtgctcttctgtctgcagtgtgcacggccttgttctaacccggaataaaggtgattgattgtattgcaactaa

SEQ ID NO: 370955 - DNA, 2157 bp, Homo sapiens
agcgggacatcaccggccagccgggtggagtgagcggcgctgggctcgggctccggctccgcgggcggaagaggcggcggcggcggcagaagcggcggcggcggcggcggcgggagccgaggaggaggttccggacgctgcttaggaaccggggactcaggagtgcccgcgccctgagcgctcagctccagaggcgtcatggctgagtacgggaccctcctgcaagacctgaccaacaacatcacccttgaagatctagaacagctcaagtcggcctgcaaggaagacatccccagcgaaaagagtgaggagatcactactggcagtgcctggtttagcttcctggagagccacaacaagctggacaaagacaacctctcctacattgagcacatctttgagatctcccgccgtcctgacctactcactatggtggttgactacagaacccgtgtgctgaagatctctgaggaggatgagctggacaccaagctaacccgtatccccagtgccaagaagtacaaagacattatccggcagccctctgaggaagagatcatcaaattggctcccccaccgaagaaggcctgagcaagggggaggaagaggaggaaggttggaccttcatcagaccactcccttcccccatcctccaggagagggggcaagggcaacccaccatctacccacttactaacctggtcctaacccccttactgtgcgcgtgtgtgtgcgtgtgcgcacgctctggctgtttgtctatatgtctagctcatctagttcctcttcttaaggggatgggggtcaggggctaggggagggggctgagtttccccactttaggaggaggtgggggctatttctatgcaaatagaaatcagcacattcctcctacttccctttcctccactccccccatatctttaaagtgtggaagcagaaaggacctgcattttcctacattgaggagctgacataggggtaaggtatgggagaggtaggtggatccagggaaaagcagtggggacggaaggcaaagagaccactcaacccccacctggaaggggcaaagaaaagccagagttccatgtttgtactcctgtgctggactgtttcctgagtaccagcaggtccctttttgtctctcatgggcctagcataggtatgagccagggatcctttcctggtccctaagatcaaaccccatggagcagccagcgttagatgcccccacccacctgtactctggagagactgtgctgggaacatgtaccactgagcctgagatggggatgagggcagagagaggggagccccctcttccactcagttgttcctactcagactgttgcactctaaacctagggaggttgaagaatgagacccttaggttttaacacgaatcctgacaccaccatctatagggtcccaacttggttattgtaggcaaccttccctctctccttggtgaagaacatcccaagccagaaagaagttaactacagtgttttcctttgcaccgatccccaccccaattcaatcccggaagggacttacttaggaaacccttctttactagatatcctggccccctgggcttgtgaacacctcctagccacatcactacagtacagtgagtgaccccagcctcctgcctaccccaagatgcccctccccaccctgaccgtgctaactgtgtgtacatatatattctacatatatgtatattaaaactgcactgccatgtctgcccttttttgtggtgtctagcattaacttattgtctaggccagagcgggggtgggaggggaatgccacagtgaagggagtggcagaatcaaattgctacatagtccaaacaaaaaagaaggctttttcaaaaaacattaaattcacatgcagtctcagagactatttagacaaagttcaagttaggagcttttaggatgtgggagtaaaactttaatgggaggggagggctggctgctggaagaaggaagaagccagactggttagacagtactcttaactcctagcccagcctagcgtgccctgcccctctggccagagattgcccctatcttgtgctcttctgtctgcagtgtgcacggccttgttctaacccggaataaaggtgattgattgtattgcaactaa

SEQ ID NO: 370956 - DNA, 2338 bp, Homo sapiens
agcgggacatcaccggccagccgggtggagtgagcggcgctgggctcgggctccggctccgcgggcggaagaggcggcggcggcggcagaagcggcggcggcggcggcggcgggagccgaggaggaggttccggacgctgcttaggaaccggggactcaggagtgcccgcgccctgagcgctcagctccagaggcgtcatggctgagtacgggaccctcctgcaagacctgaccaacaacatcacccttgaagatctagaacagctcaagtcggcctgcaaggaagacatccccagcgaaaagagtgaggagatcactactggcagtgcctggtttagcttcctggagagccacaacaagctggacaaagacaacctctcctacattgagcacatctttgagatctcccgccgtcctgacctactcactatggtggttgactacagaacccgtgtgctgaagatctctgaggaggatgagctggacaccaagctaacccgtatccccagtgccaagaagtacaaagacattatccggcagccctctgaggaagagatcatcaaattggctcccccaccgaagaaggcctgagcaagggggaggaagaggaggaaggttggaccttcatcagaccactcccttcccccatcctccaggagagggggcaagggcaacccaccatctacccacttactaacctggtcctaacccccttactgtgcgcgtgtgtgtgcgtgtgcgcacgctctggctgtttgtctatatgtctagctcatctagttcctcttcttaaggggatgggggtcaggggctaggggagggggctgagtttccccactttaggaggaggtgggggctatttctatgcaaatagaaatcagcacattcctcctacttccctttcctccactccccccatatctttaaagtgtggaagcagaaaggacctgcattttcctacattgaggagctgacataggggtaaggtatgggagaggtaggtggatccagggaaaagcagtggggacggaaggcaaagagaccactcaacccccacctggaaggggcaaagaaaagccagagttccatgtttgtactcctgtgctggactgtttcctgagtaccagcaggtccctttttgtctctcatgggcctagcataggtatgagccagggatcctttcctggtccctaagatcaaaccccatggagcagccagcgttagatgcccccacccacctgtactctggagagactgtgctgggaacatgtaccactgagcctgagatggggatgagggcagagagaggggagccccctcttccactcagttgttcctactcagactgttgcactctaaacctagggaggttgaagaatgagacccttaggttttaacacgaatcctgacaccaccatctatagggtcccaacttggttattgtaggcaaccttccctctctccttggtgaagaacatcccaagccagaaagaagttaactacagtgttttcctttgcaccgatccccaccccaattcaatcccggaagggacttacttaggaaacccttctttactagatatcctggccccctgggcttgtgaacacctcctagccacatcactacagtacagtgagtgaccccagcctcctgcctaccccaagatgcccctccccaccctgaccgtgctaactgtgtgtacatatatattctacatatatgtatattaaaactgcactgccatgtctgcccttttttgtggtgtctagcattaacttattgtctaggccagagcgggggtgggaggggaatgccacagtgaagggagtggcagaatcaaattgctacatagtccaaacaaaaaagaaggctttttcaaaaaacattaaattcacatgcagtctcagagactatttagacaaagttcaagttaggagcttttaggatgtgggagtggttagacagttcttttaagttgtaggtgaaataaagggtgaatgcctttatggtgaatggtgatgcgccaggctaacacagatcgcctggttggtctcttagttttgcctttaaggaccttaccagggatccgtttacttgcctgtgttctccctttataaggtacagaaacttgtgaaatttgggggaggtggaaggggatgaaatgggcgtactgtggggatttgttccataagatggaggaaagtggatatgtcaccccgttcttgtggttgaacacggttagaacaataaacagtcttcctttttaatataagtctttgcgtgttctttgtcaagaagaataaatctaagttggattattcttgggaaccccctttc

SEQ ID NO: 370957 - DNA, 1443 bp, Homo sapiens
agcgggacatcaccggccagccgggtggagtgagcggcgctgggctcgggctccggctccgcgggcggaagaggcggcggcggcggcagaagcggcggcggcggcggcggcgggagccgaggaggaggttccggacgctgcttaggaaccggggactcaggagtgcccgcgccctgagcgctcagctccagaggcgtcatggctgagtacgggaccctcctgcaagacctgaccaacaacatcacccttgaagatctagaacagctcaagtcggcctgcaaggaagacatccccagcgaaaagagtgaggagatcactactggcagtgcctggtttagcttcctggagagccacaacaagctggacaaagacaacctctcctacattgagcacatctttgagatctcccgccgtcctgacctactcactatggtggttgactacagaacccgtgtgctgaagatctctgaggaggatgagctggacaccaagctaacccgtatccccagtgccaagaagtacaaagacattatccggcagccctctgaggaagagatcatcaaattggctcccccaccgaagaaggcctgagcaagggggaggaagaggaggaaggttggaccttcatcagaccactcccttcccccatcctccaggagagggggcaagggcaacccaccatctacccacttactaacctggtcctaacccccttactgtgcgcgtgtgtgtgcgtgtgcgcacgctctggctgtttgtctatatgtctagctcatctagttcctcttcttaaggggatgggggtcaggggctaggggagggggctgagtttccccactttaggaggaggtgggggctatttctatgcaaatagaaatcagcacattcctcctacttccctttcctccactccccccatatctttaaagtgtggaagcagaaaggacctgcattttcctacattgaggagctgacataggggtaaggtatgggagaggtaggtggatccagggaaaagcagtggggacggaaggcaaagagaccactcaacccccacctggaaggggcaaagaaaagccagagttccatgtttgtactcctgtgctggactgtttcctgagtaccagcaggtccctttttgtctctcatgggcctagcataggtatgagccagggatcctttcctggtccctaagatcaaaccccatggagcagccagcgttagatgcccccacccacctgtactctggagagactgtgctgggaacatgtaccactgagcctgagatggggatgagggcagagagaggggagccccctcttcaaactcaccgtctctctaaccacgagccgtcgtttacaactggccgggcgtttacagctggcactgttatacatctaaccctcagtttaccctgacctcgttatactcgcactcgttacc

SEQ ID NO: 370958 - DNA, 2476 bp, Homo sapiens
  misc_feature (14)..(14): n is a, c, g, or t
agggaggacaatgnaggctaggtacgaggcctgggtgttatcgggctccggctccgcgggcggaagaggcggcggcggcggcagaagcggcggcggcggcggcggcgggagccgaggaggaggttccggacgctgcttaggaaccggggactcaggagtgcccgcgccctgagcgctcagctccagaggcgtcatggctgagtacgggaccctcctgcaagacctgaccaacaacatcacccttgaagatctagaacagctcaagtcggcctgcaaggaagacatccccagcgaaaagagtgaggagatcactactggcagtgcctggtttagcttcctggagagccacaacaagctggacaaagacaacctctcctacattgagcacatctttgagatctcccgccgtcctgacctactcactatggtggttgactacagaacccgtgtgctgaagatctctgaggaggatgagctggacaccaagctaacccgtatccccagtgccaagaagtacaaagacattatccggcagccctctgaggaagagatcatcaaattggctcccccaccgaagaaggcctgagcaagggggaggaagaggaggaaggttggaccttcatcagaccactcccttcccccatcctccaggagagggggcaagggcaacccaccatctacccacttactaacctggtcctaacccccttactgtgcgcgtgtgtgtgcgtgtgcgcacgctctggctgtttgtctatatgtctagctcatctagttcctcttcttaaggggatgggggtcaggggctaggggagggggctgagtttccccactttaggaggaggtgggggctatttctatgcaaatagaaatcagcacattcctcctacttccctttcctccactccccccatatctttaaagtgtggaagcagaaaggacctgcattttcctacattgaggagctgacataggggtaaggtatgggagaggtaggtggatccagggaaaagcagtggggacggaaggcaaagagaccactcaacccccacctggaaggggcaaagaaaagccagagttccatgtttgtactcctgtgctggactgtttcctgagtaccagcaggtccctttttgtctctcatgggcctagcataggtatgagccagggatcctttcctggtccctaagatcaaaccccatggagcagccagcgttagatgcccccacccacctgtactctggagagactgtgctgggaacatgtaccactgagcctgagatggggatgagggcagagagaggggagccccctcttccactcagttgttcctactcagactgttgcactctaaacctagggaggttgaagaatgagacccttaggttttaacacgaatcctgacaccaccatctatagggtcccaacttggttattgtaggcaaccttccctctctccttggtgaagaacatcccaagccagaaagaagttaactacagtgttttcctttgcaccgatccccaccccaattcaatcccggaagggacttacttaggaaacccttctttactagatatcctggccccctgggcttgtgaacacctcctagccacatcactacagtacagtgagtgaccccagcctcctgcctaccccaagatgcccctccccaccctgaccgtgctaactgtgtgtacatatatattctacatatatgtatattaaaactgcactgccatgtctgcccttttttgtggtgtctagcattaacttattgtctaggccagagcgggggtgggaggggaatgccacagtgaagggagtggcagaatcaaattgctacatagtccaaacaaaaaagaaggctttttcaaaaaacattaaattcacatgcagtctcagagactatttagacaaagttcaagttaggagcttttaggatgtgggagtaaaactttaatgggaggggagggctggctgctggaagaaggaagaagccagactggttagacagtactcttaactcctagcccagcctagcgtgccctgcccctctggccactgctgcagacacctgccttaacacacacacctctaggactccacagttttgccttaaaggaccttcccaagtctccctttccctgtctggcttctcccttaagaagagagagatacttgtagaattgggtggggggaatgagcatgaactgtccttccatttgggatatgttacattagagtgagagagagaataaggagcctttcttatggaagaaatgggagaagagagacagggttcttttcagcagagtctagtagtttctctgtaaggcaaaataatctaaaaagactaacctgcccacccactccttatattgctgtgagattgcccctatcttgtgctcttctgtctgcagtgtgcacggccttgttctaacccggaataaaggtgattgattgtattgcaactaa

SEQ ID NO: 370959 - DNA, 2463 bp, Homo sapiens
agcggggccgacgagtctcttctgcattcacactgtctttctgcctggccctccgccgatgccatgagcagcggcggcggtaaacggtcggccggtgcggacgggagccgagagagttccggacgctgttagaaccggactcaggatgcccgccctgacgctcactccagcgttgtgatcatggctgagtacgggaccctcctgcaagacctgaccaacaacatcacccttgaagatctagaacagctcaagtcggcctgcaaggaagacatccccagcgaaaagagtgaggagatcactactggcagtgcctggtttagcttcctggagagccacaacaagctggacaaagacaacctctcctacattgagcacatctttgagatctcccgccgtcctgacctactcactatggtggttgactacagaacccgtgtgctgaagatctctgaggaggatgagctggacaccaagctaacccgtatccccagtgccaagaagtacaaagacattatccggcagccctctgaggaagagatcatcaaattggctcccccaccgaagaaggcctgagcaagggggaggaagaggaggaaggttggaccttcatcagaccactcccttcccccatcctccaggagagggggcaagggcaacccaccatctacccacttactaacctggtcctaacccccttactgtgcgcgtgtgtgtgcgtgtgcgcacgctctggctgtttgtctatatgtctagctcatctagttcctcttcttaaggggatgggggtcaggggctaggggagggggctgagtttccccactttaggaggaggtgggggctatttctatgcaaatagaaatcagcacattcctcctacttccctttcctccactccccccatatctttaaagtgtggaagcagaaaggacctgcattttcctacattgaggagctgacataggggtaaggtatgggagaggtaggtggatccagggaaaagcagtggggacggaaggcaaagagaccactcaacccccacctggaaggggcaaagaaaagccagagttccatgtttgtactcctgtgctggactgtttcctgagtaccagcaggtccctttttgtctctcatgggcctagcataggtatgagccagggatcctttcctggtccctaagatcaaaccccatggagcagccagcgttagatgcccccacccacctgtactctggagagactgtgctgggaacatgtaccactgagcctgagatggggatgagggcagagagaggggagccccctcttccactcagttgttcctactcagactgttgcactctaaacctagggaggttgaagaatgagacccttaggttttaacacgaatcctgacaccaccatctatagggtcccaacttggttattgtaggcaaccttccctctctccttggtgaagaacatcccaagccagaaagaagttaactacagtgttttcctttgcaccgatccccaccccaattcaatcccggaagggacttacttaggaaacccttctttactagatatcctggccccctgggcttgtgaacacctcctagccacatcactacagtacagtgagtgaccccagcctcctgcctaccccaagatgcccctccccaccctgaccgtgctaactgtgtgtacatatatattctacatatatgtatattaaaactgcactgccatgtctgcccttttttgtggtgtctagcattaacttattgtctaggccagagcgggggtgggaggggaatgccacagtgaagggagtggcagaatcaaattgctacatagtccaaacaaaaaagaaggctttttcaaaaaacattaaattcacatgcagtctcagagactatttagacaaagttcaagttaggagcttttaggatgtgggagtaaaactttaatgggaggggagggctggctgctggaagaaggaagaagccagactggttagacagtactcttaactcctagcccagcctagcgtgccctgcccctctggccactgctgcagacacctgccttaacacacacacctctaggactccacagttttgccttaaaggaccttcccaagtctccctttccctgtctggcttctcccttaagaagagagagatacttgtagaattgggtggggggaatgagcatgaactgtccttccatttgggatatgttacattagagtgagagagagaataaggagcctttcttatggaagaaatgggagaagagagacagggttcttttcagcagagtctagtagtttctctgtaaggcaaaataatctaaaaagactaacctgcccacccactccttatattgctgtgagattgcccctatcttgtgctcttctgtctgcagtgtgcacggccttgttctaacccggaataaaggtgattgattgtattgcaactaa

SEQ ID NO: 370960 - DNA, 2410 bp, Homo sapiens
  misc_feature (14)..(14): n is a, c, g, or t
agggaggacaatgnaggctaggtacgaggcctgggtgttatcgggctccggctccgcgggcggaagaggcggcggcggcggcagaagcggcggcggcggcggcggcgggagccgaggaggaggttccggacgctgcttaggaaccggggactcaggagtgcccgcgccctgagcgctcagctccagaggcgtcatggctgagtacgggaccctcctgcaagacctgaccaacaacatcacccttgaagatctagaacagctcaagtcggcctgcaaggaagacatccccagcgaaaagaacaacctctcctacattgagcacatctttgagatctcccgccgtcctgacctactcactatggtggttgactacagaacccgtgtgctgaagatctctgaggaggatgagctggacaccaagctaacccgtatccccagtgccaagaagtacaaagacattatccggcagccctctgaggaagagatcatcaaattggctcccccaccgaagaaggcctgagcaagggggaggaagaggaggaaggttggaccttcatcagaccactcccttcccccatcctccaggagagggggcaagggcaacccaccatctacccacttactaacctggtcctaacccccttactgtgcgcgtgtgtgtgcgtgtgcgcacgctctggctgtttgtctatatgtctagctcatctagttcctcttcttaaggggatgggggtcaggggctaggggagggggctgagtttccccactttaggaggaggtgggggctatttctatgcaaatagaaatcagcacattcctcctacttccctttcctccactccccccatatctttaaagtgtggaagcagaaaggacctgcattttcctacattgaggagctgacataggggtaaggtatgggagaggtaggtggatccagggaaaagcagtggggacggaaggcaaagagaccactcaacccccacctggaaggggcaaagaaaagccagagttccatgtttgtactcctgtgctggactgtttcctgagtaccagcaggtccctttttgtctctcatgggcctagcataggtatgagccagggatcctttcctggtccctaagatcaaaccccatggagcagccagcgttagatgcccccacccacctgtactctggagagactgtgctgggaacatgtaccactgagcctgagatggggatgagggcagagagaggggagccccctcttccactcagttgttcctactcagactgttgcactctaaacctagggaggttgaagaatgagacccttaggttttaacacgaatcctgacaccaccatctatagggtcccaacttggttattgtaggcaaccttccctctctccttggtgaagaacatcccaagccagaaagaagttaactacagtgttttcctttgcaccgatccccaccccaattcaatcccggaagggacttacttaggaaacccttctttactagatatcctggccccctgggcttgtgaacacctcctagccacatcactacagtacagtgagtgaccccagcctcctgcctaccccaagatgcccctccccaccctgaccgtgctaactgtgtgtacatatatattctacatatatgtatattaaaactgcactgccatgtctgcccttttttgtggtgtctagcattaacttattgtctaggccagagcgggggtgggaggggaatgccacagtgaagggagtggcagaatcaaattgctacatagtccaaacaaaaaagaaggctttttcaaaaaacattaaattcacatgcagtctcagagactatttagacaaagttcaagttaggagcttttaggatgtgggagtaaaactttaatgggaggggagggctggctgctggaagaaggaagaagccagactggttagacagtactcttaactcctagcccagcctagcgtgccctgcccctctggccactgctgcagacacctgccttaacacacacacctctaggactccacagttttgccttaaaggaccttcccaagtctccctttccctgtctggcttctcccttaagaagagagagatacttgtagaattgggtggggggaatgagcatgaactgtccttccatttgggatatgttacattagagtgagagagagaataaggagcctttcttatggaagaaatgggagaagagagacagggttcttttcagcagagtctagtagtttctctgtaaggcaaaataatctaaaaagactaacctgcccacccactccttatattgctgtgagattgcccctatcttgtgctcttctgtctgcagtgtgcacggccttgttctaacccggaataaaggtgattgattgtattgcaactaa

SEQ ID NO: 370961 - DNA, 2171 bp, Homo sapiens
  misc_feature (14)..(14): n is a, c, g, or t
agggaggacaatgnaggctaggtacgaggcctgggtgttatcgggctccggctccgcgggcggaagaggcggcggcggcggcagaagcggcggcggcggcggcggcgggagccgaggaggaggttccggacgctgcttaggaaccggggactcaggagtgcccgcgccctgagcgctcagctccagaggcgtcatggctgagtacgggaccctcctgcaagacctgaccaacaacatcacccttgaagatctagaacagctcaagtcggcctgcaaggaagacatccccagcgaaaagagtgaggagatcactactggcagtgcctggtttagcttcctggagagccacaacaagctggacaaagacaacctctcctacattgagcacatctttgagatctcccgccgtcctgacctactcactatggtggttgactacagaacccgtgtgctgaagatctctcatctagttcctcttcttaaggggatgggggtcaggggctaggggagggggctgagtttccccactttaggaggaggtgggggctatttctatgcaaatagaaatcagcacattcctcctacttccctttcctccactccccccatatctttaaagtgtggaagcagaaaggacctgcattttcctacattgaggagctgacataggggtaaggtatgggagaggtaggtggatccagggaaaagcagtggggacggaaggcaaagagaccactcaacccccacctggaaggggcaaagaaaagccagagttccatgtttgtactcctgtgctggactgtttcctgagtaccagcaggtccctttttgtctctcatgggcctagcataggtatgagccagggatcctttcctggtccctaagatcaaaccccatggagcagccagcgttagatgcccccacccacctgtactctggagagactgtgctgggaacatgtaccactgagcctgagatggggatgagggcagagagaggggagccccctcttccactcagttgttcctactcagactgttgcactctaaacctagggaggttgaagaatgagacccttaggttttaacacgaatcctgacaccaccatctatagggtcccaacttggttattgtaggcaaccttccctctctccttggtgaagaacatcccaagccagaaagaagttaactacagtgttttcctttgcaccgatccccaccccaattcaatcccggaagggacttacttaggaaacccttctttactagatatcctggccccctgggcttgtgaacacctcctagccacatcactacagtacagtgagtgaccccagcctcctgcctaccccaagatgcccctccccaccctgaccgtgctaactgtgtgtacatatatattctacatatatgtatattaaaactgcactgccatgtctgcccttttttgtggtgtctagcattaacttattgtctaggccagagcgggggtgggaggggaatgccacagtgaagggagtggcagaatcaaattgctacatagtccaaacaaaaaagaaggctttttcaaaaaacattaaattcacatgcagtctcagagactatttagacaaagttcaagttaggagcttttaggatgtgggagtaaaactttaatgggaggggagggctggctgctggaagaaggaagaagccagactggttagacagtactcttaactcctagcccagcctagcgtgccctgcccctctggccactgctgcagacacctgccttaacacacacacctctaggactccacagttttgccttaaaggaccttcccaagtctccctttccctgtctggcttctcccttaagaagagagagatacttgtagaattgggtggggggaatgagcatgaactgtccttccatttgggatatgttacattagagtgagagagagaataaggagcctttcttatggaagaaatgggagaagagagacagggttcttttcagcagagtctagtagtttctctgtaaggcaaaataatctaaaaagactaacctgcccacccactccttatattgctgtgagattgcccctatcttgtgctcttctgtctgcagtgtgcacggccttgttctaacccggaataaaggtgattgattgtattgcaactaa

SEQ ID NO: 370962 - DNA, 2988 bp, Homo sapiens
agcgggacatcaccggccagccgggtggagtgagcggcgctgggctcgggctccggctccgcgggcggaagaggcggcggcggcggcagaagcggcggcggcggcggcggcgggagccgaggaggaggttccggacgctgcttaggaaccggggactcaggagtgcccgcgccctgagcgctcagctccagaggcgtcatggctgagtacgggaccctcctgcaagacctgaccaacaacatcacccttgaagatctagaacagctcaagtcggcctgcaaggaagacatccccagcgaaaagagtgaggagatcactactggcagtgcctggtttagcttcctggagagccacaacaagctggacaaagacaacctctcctacattgagcacatctttgagatctcccgccgtcctgacctactcactatggtggttgactacagaacccgtgtgctgaagatctctgaggaggatgagctggacaccaagctaacccgtatccccagtgccaagaagtacaaagacattatccggcagccctctgaggaagagatcatcaaattggctcccccaccgaagaaggcctgagcaagggggaggaagaggaggaaggttggaccttcatcagaccactcccttcccccatcctccaggagagggggcaagggcaacccaccatctacccacttactaacctggtcctaacccccttactgtgcgcgtgtgtgtgcgtgtgcgcacgctctggctgtttgtctatatgtctagctcatctagttcctcttcttaaggggatgggggtcaggggctaggggagggggctgagtttccccactttaggaggaggtgggggctatttctatgcaaatagaaatcagcacattcctcctacttccctttcctccactccccccatatctttaaagtgtggaagcagaaaggacctgcattttcctacattgaggagctgacataggggtaaggtatgggagaggtaggtggatccagggaaaagcagtggggacggaaggcaaagagaccactcaacccccacctggaaggggcaaagaaaagccagagttccatgtttgtactcctgtgctggactgtttcctgagtaccagcaggtccctttttgtctctcatgggcctagcataggtatgagccagggatcctttcctggtccctaagatcaaaccccatggagcagccagcgttagatgcccccacccacctgtactctggagagactgtgctgggaacatgtaccactgagcctgagatggggatgagggcagagagaggggagccccctcttccactcagttgttcctactcagactgttgcactctaaacctagggaggttgaagaatgagacccttaggttttaacacgaatcctgacaccaccatctatagggtcccaacttggttattgtaggcaaccttccctctctccttggtgaagaacatcccaagccagaaagaagttaactacagtgttttcctttgcaccgatccccaccccaattcaatcccggaagggacttacttaggaaacccttctttactagatatcctggccccctgggcttgtgaacacctcctagccacatcactacagtacagtgagtgaccccagcctcctgcctaccccaagatgcccctccccaccctgaccgtgctaactgtgtgtacatatatattctacatatatgtatattaaaactgcactgccatgtctgcccttttttgtggtgtctagcattaacttattgtctaggccagagcgggggtgggaggggaatgccacagtgaagggagtggcagaatcaaattgctacatagtccaaacaaaaaagaaggctttttcaaaaaacattaaattcacatgcagtctcagagactatttagacaaagttcaagttaggagcttttaggatgtgggagtaaaactttaatgggaggggagggctggctgctggaagaaggaagaagccagactggttagacagtactcttaactcctagcccagcctagcgtgccctgcccctctggccactgctgcagacacctgccttaacacacacacctctaggactccacagttttgccttaaaggaccttcccaagtctccctttccctgtctggcttctcccttaagaagagagagatacttgtagaattgggtggggggaatgagcatgaactgtccttccatttgggatatgttacattagagtgagagagagaataaggagcctttcttatggaagaaatgggagaagagagacagggttcttttcagcagagtctagtagtttctctgtaaggcaaaataatctaaaaagactaacctgcccacccactccttatattgctgtgagattgcccctatcttgtgctcttctgtctgcagtgtgcacggccttgttctaacccggaataaaggtgattgattgtattgcaactaaaaaaaaaaaaaaaaaaaaaaaaaaaaaaaaaaaaaaaaaaaaaaaaaaaaaaaaaaggggggccgaaaaaaaaaattttaaaaggaggcaacaaacaacagaagcacccaagaacacaaaacaaaaggagcacaaaaaagagcgaacaaaaaaaaaaaaagaacaggcaacggcgaacaaacacaacaaacgacaacaacgaacacgagaaaacaagagaaaaaacaaacaccagagaagcacaaaaaggaaaaagacaacaacaagaaaaaaaacccacagacgacaaaaacacacaccacaagagaccaacggcgcgacaaccacacgccaaacaacgagaaaaaaaacctggcacacacgcacagaaatagaacacaataaacccggcacaggcggcacaaaaacaagaacacagaacacgcacacaccacccacggaaaaaacgaacgacaacagagacacaagacaagccacacacaaaacaaggaccgaacccaaaagacg

SEQ ID NO: 370963 - DNA, 2484 bp, Homo sapiens
agcgggacatcaccggccagccgggtggagtgagcggcgctgggctcgggctccggctccgcgggcggaagaggcggcggcggcggcagaagcggcggcggcggcggcggcgggagccgaggaggaggttccggacgctgcttaggaaccggggactcaggagtgcccgcgccctgagcgctcagctccagaggcgtcatggctgagtacgggaccctcctgcaagacctgaccaacaacatcacccttgaagatctagaacagctcaagtcggcctgcaaggaagacatccccagcgaaaagagtgaggagatcactactggcagtgcctggtttagcttcctggagagccacaacaagctggacaaagacaacctctcctacattgagcacatctttgagatctcccgccgtcctgacctactcactatggtggttgactacagaacccgtgtgctgaagatctctgaggaggatgagctggacaccaagctaacccgtatccccagtgccaagaagtacaaagacattatccggcagccctctgaggaagagatcatcaaattggctcccccaccgaagaaggcctgagcaagggggaggaagaggaggaaggttggaccttcatcagaccactcccttcccccatcctccaggagagggggcaagggcaacccaccatctacccacttactaacctggtcctaacccccttactgtgcgcgtgtgtgtgcgtgtgcgcacgctctggctgtttgtctatatgtctagctcatctagttcctcttcttaaggggatgggggtcaggggctaggggagggggctgagtttccccactttaggaggaggtgggggctatttctatgcaaatagaaatcagcacattcctcctacttccctttcctccactccccccatatctttaaagtgtggaagcagaaaggacctgcattttcctacattgaggagctgacataggggtaaggtatgggagaggtaggtggatccagggaaaagcagtggggacggaaggcaaagagaccactcaacccccacctggaaggggcaaagaaaagccagagttccatgtttgtactcctgtgctggactgtttcctgagtaccagcaggtccctttttgtctctcatgggcctagcataggtatgagccagggatcctttcctggtccctaagatcaaaccccatggagcagccagcgttagatgcccccacccacctgtactctggagagactgtgctgggaacatgtaccactgagcctgagatggggatgagggcagagagaggggagccccctcttccactcagttgttcctactcagactgttgcactctaaacctagggaggttgaagaatgagacccttaggttttaacacgaatcctgacaccaccatctatagggtcccaacttggttattgtaggcaaccttccctctctccttggtgaagaacatcccaagccagaaagaagttaactacagtgttttcctttgcaccgatccccaccccaattcaatcccggaagggacttacttaggaaacccttctttactagatatcctggccccctgggcttgtgaacacctcctagccacatcactacagtacagtgagtgaccccagcctcctgcctaccccaagatgcccctccccaccctgaccgtgctaactgtgtgtacatatatattctacatatatgtatattaaaactgcactgccatgtctgcccttttttgtggtgtctagcattaacttattgtctaggccagagcgggggtgggaggggaatgccacagtgaagggagtggcagaatcaaattgctacatagtccaaacaaaaaagaaggctttttcaaaaaacattaaattcacatgcagtctcagagactatttagacaaagttcaagttaggagcttttaggatgtgggagtaaaactttaatgggaggggagggctggctgctggaagaaggaagaagccagactggttagacagtactcttaactcctagcccagcctagcgtgccctgcccctctggccactgctgcagacacctgccttaacacacacacctctaggactccacagttttgccttaaaggaccttcccaagtctccctttccctgtctggcttctcccttaagaagagagagatacttgtagaattgggtggggggaatgagcatgaactgtccttccatttgggatatgttacattagagtgagagagagaataaggagcctttcttatggaagaaatgggagaagagagacagggttcttttcagcagagtctagtagtttctctgtaaggcaaaataatctaaaaagactaacctgcccacccactccttatattgctgtgagattgcccctatcttgtgctcttctgtctgcagtgtgcactcagtctggacccggaataagtgtggtaccgggggtccggggggggggggg

SEQ ID NO: 370964 - DNA, 1752 bp, Homo sapiens
agcgggacatcaccggccagccgggtggagtgagcggcgctgggctcgggctccggctccgcgggcggaagaggcggcggcggcggcagaagcggcggcggcggcggcggcgggagccgaggaggaggttccggacgctgcttaggaaccggggactcaggagtgcccgcgccctgagcgctcagctccagaggcgtcatggctgagtacgggaccctcctgcaagacctgaccaacaacatcacccttgaagatctagaacagctcaagtcggcctgcaaggaagacatccccagcgaaaagagtgaggagatcactactggcagtgcctggtttagcttcctggagagccacaacaagctggacaaagacaacctctcctacattgagcacatctttgagatctcccgccgtcctgacctactcactatggtggttgactacagaacccgtgtgctgaagatctctgaggaggatgagctggacaccaagctaacccgtatccccagtgccaagaagtacaaagacattatccggcagccctctgaggaagagatcatcaaattggctcccccaccgaagaaggcctgagcaagggggaggaagaggaggaaggttggaccttcatcagaccactcccttcccccatcctccaggagagggggcaagggcaacccaccatctacccacttactaacctggtcctaacccccttactgtgcgcgtgtgtgtgcgtgtgcgcacgctctggctgtttgtctatatgtctagctcatctagttcctcttcttaaggggatgggggtcaggggctaggggagggggctgagtttccccactttaggaggaggtgggggctatttctatgcaaatagaaatcagcacattcctcctacttccctttcctccactccccccatatctttaaagtgtggaagcagaaaggacctgcattttcctacattgaggagctgacataggggtaaggtatgggagaggtaggtggatccagggaaaagcagtggggacggaaggcaaagagaccactcaacccccacctggaaggggcaaagaaaagccagagttccatgtttgtactcctgtgctggactgtttcctgagtaccagcaggtccctttttgtctctcatgggcctagcataggtatgagccagggatcctttcctggtccctaagatcaaaccccatggagcagccagcgttagatgcccccacccacctgtactctggagagactgtgctgggaacatgtaccactgagcctgagatggggatgagggcagagagaggggagccccctcttccactcagttgttcctactcagactgttgcactctaaacctagggaggttgaagaatgagacccttaggttttaacacgaatcctgacaccaccatctatagggtcccaacttggttattgtaggcaaccttccctctctccttggtgaagaacatcccaagccagaaagaagttaactacagtgttttcctttgcaccgatccccaccccaattcaatcccggaagggacttacttaggaaacccttctttactagatatcctggccccctgggcttgtgaacacctcctagccacatcactacagtacagtgagtgaccccagcctcctgcctaccccaagatgcccctccccaccctgaccgtgctaactgtgtgtacatatatattctacatatatgtatattaaaactgcactgccatgtctgcc

SEQ ID NO: 370965 - DNA, 2064 bp, Homo sapiens
agcgggacatcaccggccagccgggtggagtgagcggcgctgggctcgggctccggctccgcgggcggaagaggcggcggcggcggcagaagcggcggcggcggcggcggcgggagccgaggaggaggttccggacgctgcttaggaaccggggactcaggagtgcccgcgccctgagcgctcagctccagaggcgtcatggctgagtacgggaccctcctgcaagacctgaccaacaacatcacccttgaagatctagaacagctcaagtcggcctgcaaggaagacatccccagcgaaaagagtgaggagatcactactggcagtgcctggtttagcttcctggagagccacaacaagctggacaaagacaacctctcctacattgagcacatctttgagatctcccgccgtcctgacctactcactatggtggttgactacagaacccgtgtgctgaagatctctgaggaggatgagctggacaccaagctaacccgtatccccagtgccaagaagtacaaagacattatccggcagccctctgaggaagagatcatcaaattggctcccccaccgaagaaggcctgagcaagggggaggaagaggaggaaggttggaccttcatcagaccactcccttcccccatcctccaggagagggggcaagggcaacccaccatctacccacttactaacctggtcctaacccccttactgtgcgcgtgtgtgtgcgtgtgcgcacgctctggctgtttgtctatatgtctagctcatctagttcctcttcttaaggggatgggggtcaggggctaggggagggggctgagtttccccactttaggaggaggtgggggctatttctatgcaaatagaaatcagcacattcctcctacttccctttcctccactccccccatatctttaaagtgtggaagcagaaaggacctgcattttcctacattgaggagctgacataggggtaaggtatgggagaggtaggtggatccagggaaaagcagtggggacggaaggcaaagagaccactcaacccccacctggaaggggcaaagaaaagccagagttccatgtttgtactcctgtgctggactgtttcctgagtaccagcaggtccctttttgtctctcatgggcctagcataggtatgagccagggatcctttcctggtccctaagatcaaaccccatggagcagccagcgttagatgcccccacccacctgtactctggagagactgtgctgggaacatgtaccactgagcctgagatggggatgagggcagagagaggggagccccctcttccactcagttgttcctactcagactgttgcactctaaacctagggaggttgaagaatgagacccttaggttttaacacgaatcctgacaccaccatctatagggtcccaacttggttattgtaggcaaccttccctctctccttggtgaagaacatcccaagccagaaagaagttaactacagtgttttcctttgcaccgatccccaccccaattcaatcccggaagggacttacttaggaaacccttctttactagatatcctggccccctgggcttgtgaacacctcctagccacatcactacagtacagtgagtgaccccagcctcctgcctaccccaagatgcccctccccaccctgaccgtgctaactgtgtgtacatatatattctacatatatgtatattaaaactgcactgccatgtctgcccttttttgtggtgtctagcattaacttattgtctaggccagagcgggggtgggaggggaatgccacagtgaagggagtggcagaatcaaattgctacatagtccaaacaaaaaagaaggctttttcaaaaaacattaaattcacatgcaagtctagtagtttctctgtaaggcaaaataatctaaaaagactaacctgcccacccactccttatattgctgtgagattgcccctatcttgtgctcttctgtctgcagtgtgcacggccttgttctaacccggaataaaggtgattgattgtattgcaactaa

SEQ ID NO: 370966 - DNA, 455 bp, Homo sapiens
  misc_feature (14)..(14): n is a, c, g, or t
agggaggacaatgnaggctaggtacgaggcctgggtgttatcgggctccggctccgcgggcggaagaggcggcggcggcggcagaagcggcggcggcggcggcggcgggagccgaggaggaggttccggacgctgcttaggaaccggggactcaggagtgcccgcgccctgagcgctcagctccagaggcgtcatggctgagtacgggaccctcctgcaagacctgaccaacaacatcacccttgaagatctagaacagctcaagtcggcctgcaaggaagacatccccagcgaaaagagtgaggagatcactactggcagtgcctggtttagcttcctggagagccacaacaagctggacaaaggagattgcccctatcttgtgctcttctgtctgcagtgtgcacggccttgttctaacccggaataaaggtgattgattgtattgcaactaa

SEQ ID NO: 370967 - DNA, 2052 bp, Homo sapiens
ctgtggatgtttttcgaaggataattttggaggcagaaaaaatggacggggcagcttcacaaggtcaagtcttcatgctcggtgatgtgattctgctgcaaagcctgaggacactgggaatatattctacctgaagaagcaaactgcccgttctccttgaagataaactatgcttcttttttcttctgttaacctgaaagatatcatttgggtcagagctcccctcccttcagattatgttaactctgagtctgtccaaatgagttcacttccattttcaaattttaagcaatcatattttcaatttatatattgtatttcttaatattatgaccaagaattttatcggcattaatttttcagtgtagttgttgtttaaaataatgtaatcatcaaaatgatgcatattgttacactactattaactaggcttcagtatatcagtgtttatttcattgtgttaaatgtatacttgtaaataaaatagctgcaaacctcaaaaaaaaacattcgcttgactcacgccttcgccgtagcatctttcgcagcggaccgaagagaagaaaagtaggccagagccgaactctcttcctgccaagatgtctattggtgtgccgattaaagtactgcatgaggccgagggccacattgtgacatgtgagacgaacaccggtgaggtatatcgggggaagctcattgaagcagaggacaacatgaactgccagatgtccaacatcacagtcacatacagagatggccgagtggcacagctggagcaggtatacatccgtggcagcaaaatccgctttctgattttgcctgacatgctgaagaacgcacccatgttaaagagcatgaaaaataaaaaccaaggctcaggggctggccgaggaaaagctgccattctcaaggcccaagtggccgcaagaggaagaggacgtggaatgggacgtggaaacatctttcaaaagcgaagataattttctaagttgaacagaactttgtccttttttctttcaggttatctgagttcattggagtgggtgcttgtgcatatatgctaggtatcttttgccatctttctctttagatcaggggaaatgtttaagctaaataaatctggggggttttttgttctgttttgttttgttttctttgagaaaataaggactttgtgttcatttgaagtttgctttggctaaattttgacaccctgggggatgtcctgggagaatgccagtactttgaaatagcacagctattgatgagattttaagctgctgttcctggccagttgcaggttaagccccagaaaagttcaccttggagaagctccgagaacacacagattgtgtctcattcatcttcagacacaggcacatagtgtggcactttgttcagttaacatttgtggagctgtcatcagctcagctttaacaacacaggtgactctttcccttgataaagtcataggtaattcaggggctgggtgcggcggctcacgcatgtaatcccagcactttgggaggccaaggcgggcggatcacgaggtcaggagttcgagaccagcctggccaatatggtgaaacctcgtgtgtactaaaaataaaaaaattagccgggtgcggtggcatgtacctgtagtcccagctactcgggaggctgaggcagaagattcgcttgaacccaggaggtggacattgcagtgagcagagatcatgccactgtactccagcttgggtgacagagcgagactgcacctcaaaaaaaaaaaagtaattcaggggatcctagtggccagcttccttggctcgtatactggctacaacaagtagttttgtggtgatttgtggaaacagattcttgggagcatatcagagcatctcagcattgattggcacatccatagttgttaatgtaggaagggtgaccagcagctcagcacagtggcttgcttccagcactctgggaggctgaggtagaggattgtttgagaggagttcaaaaccagcccgcgagacatagtgagaccctgtctctacaaaaaattct

SEQ ID NO: 370968 - DNA, 460 bp, Homo sapiens
tggccctgccctcgacagccttgctggtggtcgtgaaggctctaaacacctgcatggcaatgaggccaaccttctccgcttgatccgtttcaggctctggctccgctactgcatcgtgtgcttctgtccaagaggcagagagactgaaactatctgctgccgcctggattctcccagagattgcctggaacaccagctcgggtcctcgcacaccatcctggtaggaatctctcagtgacaattgagagtttgtgggctggcttagggccagtggtgggcagggagtcagcagggcgcaagggactggagagcttggcatttctccaacaggagtttcagggagagctcagaggcctgcttatgtgacaggtttatcagcttgcctggcccagggccggctctcataccgttttgatttaaataatagattgctcacagaataaatgtatgttggtttaag

SEQ ID NO: 370969 - DNA, 224 bp, Homo sapiens
ttacaacagctccagttacaacagctataataggtgtgagccactgcacccggccaccattatcttttgaatcctctcttcctcctgcccaccatgaatttacttcctctcacccatctccctgatattgtaattctggttagatcatattcagtgtcaaattattaagatgtgattaaactttttaaaaatatgacagtgtcatagtgatcacagctgagtca

SEQ ID NO: 370970 - DNA, 1206 bp, Homo sapiens
taggtgtaagccctgatcccgcccagtgcatccccgaggccccaagcaactctcctccaactgtctttagggataaccctgagcgggcagcgtctactctatacctaactttatccgtaccagatacctagcctcactcagggccccccttacctggcggtgcgggatcaacaaatgaaattgtgacgggaagtcctggcccttggcccaacctcctgctgtccccggtctgagggcccaagccccgcgtctccgccttgccgtccagcctgtccttggtgtggggtgcttggaagtgtgagcaccctctctggctctttgccggccccaagggtcgttgcggcggcccccgggcccagtcatcagccctcttttccggtgccggaactatcgtactggtgccctagtttcccagccggcaggcggagtgaggaggaagcggaggcgagaccgcgctcaacactggggaaaggaaggaggcgggccctgcgcgcagcattttgggaaagagtggaattctgggtgttaggcccgccattcgcttgactcacgccttcgccgtagcatctttcgcagcggaccgaagagaagaaaagtaggccagagccgaactctcttcctgccaagatgtctattggtgtgccgattaaagtactgcatgaggccgagggccacattgtgacatgtgagacgaacaccggtgaggtatatcgggggaagctcattgaagcagaggacaacatgaactgccagatgtccaacatcacagtcacatacagagatggccgagtggcacagctggagcaggtatacatccgtggcagcaaaatccgctttctgattttgcctgacatgctgaagaacgcacccatgttaaagagcatgaaaaataaaaaccaaggctcaggggctggccgaggaaaagctgccattctcaaggcccaagtggccgcaagaggaagaggacgtggaatgggacgtggaaacatctttcaaaagcgaagataattttctaagttgaacagaactttgtccttttttctttcaggttatctgagttcattggagtgggtgcttgtgcatatatgctaggtatcttttgccatctttctctttagatcaggggaaatgtttaagctaaataaatctggggggtttttaaaaaaaaaaaccacccacaaaacaaaagcaaaggaacacggggcg

SEQ ID NO: 370971 - DNA, 1260 bp, Homo sapiens
taggtgtaagccctgatcccgcccagtgcatccccgaggccccaagcaactctcctccaactgtctttagggataaccctgagcgggcagcgtctactctatacctaactttatccgtaccagatacctagcctcactcagggccccccttacctggcggtgcgggatcaacaaatgaaattgtgacgggaagtcctggcccttggcccaacctcctgctgtccccggtctgagggcccaagccccgcgtctccgccttgccgtccagcctgtccttggtgtggggtgcttggaagtgtgagcaccctctctggctctttgccggccccaagggtcgttgcggcggcccccgggcccagtcatcagccctcttttccggtgccggaactatcgtactggtgccctagtttcccagccggcaggcggagtgaggaggaagcggaggcgagaccgcgctcaacactggggaaaggaaggaggcgggccctgcgcgcagcattttgggaaagagtggaattctgggtgttaggcccgccattcgcttgactcacgccttcgccgtagcatctttcgcagcggaccgaagagaagaaaagtaggccagagccgaactctcttcctgccaagatgtctattggtgtgccgattaaagtactgcatgaggccgagggccacattgtgacatgtgagacgaacaccggtgaggtatatcgggggaagctcattgaagcagaggacaacatgaactgccagatgtccaacatcacagtcacatacagagatggccgagtggcacagctggagcaggtatacatccgtggcagcaaaatccgctttctgattttgcctgacatgctgaagaacgcacccatgttaaagagcatgaaaaataaaaaccaaggctcaggggctggccgaggaaaagctgccattctcaaggcccaagtggccgcaagaggaagaggacgtggaatgggacgtggaaacatctttcaaaagcgaagataattttctaagttgaacagaactttgtccttttttctttcaggctctggctccgctactgcatcgtgtgcttctgtccaagaggcagagagactgaaactatctgctgccgcctggattctcccagagattgcctggaacaccagctcgggtcctcgcacaccatcctgcgggtgcagcccagaactgtcttctgaggaagaggtgctctcctgggcccccactgtccccaggcctcaggtaagcccatcaggg

SEQ ID NO: 370972 - DNA, 1415 bp, Homo sapiens
taggtgtaagccctgatcccgcccagtgcatccccgaggccccaagcaactctcctccaactgtctttagggataaccctgagcgggcagcgtctactctatacctaactttatccgtaccagatacctagcctcactcagggccccccttacctggcggtgcgggatcaacaaatgaaattgtgacgggaagtcctggcccttggcccaacctcctgctgtccccggtctgagggcccaagccccgcgtctccgccttgccgtccagcctgtccttggtgtggggtgcttggaagtgtgagcaccctctctggctctttgccggccccaagggtcgttgcggcggcccccgggcccagtcatcagccctcttttccggtgccggaactatcgtactggtgccctagtttcccagccggcaggcggagtgaggaggaagcggaggcgagaccgcgctcaacactggggaaaggaaggaggcgggccctgcgcgcagcattttgggaaagagtggaattctgggtgttaggcccgccattcgcttgactcacgccttcgccgtagcatctttcgcagcggaccgaagagaagaaaagtaggccagagccgaactctcttcctgccaagatgtctattggtgtgccgattaaagtactgcatgaggccgagggccacattgtgacatgtgagacgaacaccggtgaggtatatcgggggaagctcattgaagcagaggacaacatgaactgccagatgtccaacatcacagtcacatacagagatggccgagtggcacagctggagcaggtatacatccgtggcagcaaaatccgctttctgattttgcctgacatgctgaagaacgcacccatgttaaagagcatgaaaaataaaaaccaaggctcaggggctggccgaggaaaagctgccattctcaaggcccaagtggccgcaagaggaagaggacgtggaatgggacgtggaaacatctttcaaaagcgaagataattttctaagttgaacagaactttgtccttttttctttcaggctctggctccgctactgcatcgtgtgcttctgtccaagaggcagagagactgaaactatctgctgccgcctggattctcccagagattgcctggaacaccagctcgggtcctcgcacaccatcctggtaggaatctctcagtgacaattgagagtttgtgggctggcttagggccagtggtgggcagggagtcagcagggcgcaagggactggagagcttggcatttctccaacaggagtttcagggagagctcagaggcctgcttatgtgacaggtttatcagcttgcctggcccagggccggctctcataccgttttgatttaaataatagattgctcacagaataaatgtatgttggtttaag

SEQ ID NO: 370973 - DNA, 2080 bp, Homo sapiens
taggtgtaagccctgatcccgcccagtgcatccccgaggccccaagcaactctcctccaactgtctttagggataaccctgagcgggcagcgtctactctatacctaactttatccgtaccagatacctagcctcactcagggccccccttacctggcggtgcgggatcaacaaatgaaattgtgacgggaagtcctggcccttggcccaacctcctgctgtccccggtctgagggcccaagccccgcgtctccgccttgccgtccagcctgtccttggtgtggggtgcttggaagtgtgagcaccctctctggctctttgccggccccaagggtcgttgcggcggcccccgggcccagtcatcagccctcttttccggtgccggaactatcgtactggtgccctagtttcccagccggcaggcggagtgaggaggaagcggaggcgagaccgcgctcaacactggggaaaggaaggaggcgggccctgcgcgcagcattttgggaaagagtggaattctgggtgttaggcccgccattcgcttgactcacgccttcgccgtagcatctttcgcagcggaccgaagagaagaaaagtaggccagagccgaactctcttcctgccaagatgtctattggtgtgccgattaaagtactgcatgaggccgagggccacattgtgacatgtgagacgaacaccggtgaggtatatcgggggaagctcattgaagcagaggacaacatgaactgccagatgtccaacatcacagtcacatacagagatggccgagtggcacagctggagcaggtatacatccgtggcagcaaaatccgctttctgattttgcctgacatgctgaagaacgcacccatgttaaagagcatgaaaaataaaaaccaaggctcaggggctggccgaggaaaagctgccattctcaaggcccaagtggccgcaagaggaagaggacgtggaatgggacgtggaaacatctttcaaaagcgaagataattttctaagttgaacagaactttgtccttttttctttcaggttatctgagttcattggagtgggtgcttgtgcatatatgctaggtatcttttgccatctttctctttagatcaggggaaatgtttaagctaaataaatctggggggttttttgttctgttttgttttgttttctttgagaaaataaggactttgtgttcatttgaagtttgctttggctaaattttgacaccctgggggatgtcctgggagaatgccagtactttgaaatagcacagctattgatgagattttaagctgctgttcctggccagttgcaggttaagccccagaaaagttcaccttggagaagctccgagaacacacagattgtgtctcattcatcttcagacacaggcacatagtgtggcactttgttcagttaacatttgtggagctgtcatcagctcagctttaacaacacaggtgactctttcccttgataaagtcataggtaattcaggggctgggtgcggcggctcacgcatgtaatcccagcactttgggaggccaaggcgggcggatcacgaggtcaggagttcgagaccagcctggccaatatggtgaaacctcgtgtgtactaaaaataaaaaaattagccgggtgcggtggcatgtacctgtagtcccagctactcgggaggctgaggcagaagattcgcttgaacccaggaggtggacattgcagtgagcagagatcatgccactgtactccagcttgggtgacagagcgagactgcacctcaaaaaaaaaaaagtaattcaggggatcctagtggccagcttccttggctcgtatactggctacaacaagtagttttgtggtgatttgtggaaacagattcttgggagcatatcagagcatctcagcattgattggcacatccatagttgttaatgtaggaagggtgaccagcagctcagcacagtggcttgcttccagcactctgggaggctgaggtagaggattgtttgagaggagttcaaaaccagcccgcgagacatagtgagaccctgtctctacaaaaaattct

SEQ ID NO: 370974 - DNA, 1641 bp, Homo sapiens
cccccccccccccaccccagcccactcccgctcacggatccttaattaaattaatccccccccccccccccctggaattctgggtgttaggcccgccattcgcttgactcacgccttcgccgtagcatctttcgcagcggaccgaagagaagaaaagtaggccagagccgaactctcttcctgccaagatgtctattggtgtgccgattaaagtactgcatgaggccgagggccacattgtgacatgtgagacgaacaccggtgaggtatatcgggggaagctcattgaagcagaggacaacatgaactgccagatgtccaacatcacagtcacatacagagatggccgagtggcacagctggagcaggtatacatccgtggcagcaaaatccgctttctgattttgcctgacatgctgaagaacgcacccatgttaaagagcatgaaaaataaaaaccaaggctcaggggctggccgaggaaaagctgccattctcaaggcccaagtggccgcaagaggaagaggacgtggaatgggacgtggaaacatctttcaaaagcgaagataattttctaagttgaacagaactttgtccttttttctttcaggttatctgagttcattggagtgggtgcttgtgcatatatgctaggtatcttttgccatctttctctttagatcaggggaaatgtttaagctaaataaatctggggggttttttgttctgttttgttttgttttctttgagaaaataaggactttgtgttcatttgaagtttgctttggctaaattttgacaccctgggggatgtcctgggagaatgccagtactttgaaatagcacagctattgatgagattttaagctgctgttcctggccagttgcaggttaagccccagaaaagttcaccttggagaagctccgagaacacacagattgtgtctcattcatcttcagacacaggcacatagtgtggcactttgttcagttaacatttgtggagctgtcatcagctcagctttaacaacacaggtgactctttcccttgataaagtcataggtaattcaggggctgggtgcggcggctcacgcatgtaatcccagcactttgggaggccaaggcgggcggatcacgaggtcaggagttcgagaccagcctggccaatatggtgaaacctcgtgtgtactaaaaataaaaaaattagccgggtgcggtggcatgtacctgtagtcccagctactcgggaggctgaggcagaagattcgcttgaacccaggaggtggacattgcagtgagcagagatcatgccactgtactccagcttgggtgacagagcgagactgcacctcaaaaaaaaaaaagtaattcaggggatcctagtggccagcttccttggctcgtatactggctacaacaagtagttttgtggtgatttgtggaaacagattcttgggagcatatcagagcatctcagcattgattggcacatccatagttgttaatgtaggaagggtgaccagcagctcagcacagtggcttgcttccagcactctgggaggctgaggtagaggattgtttgagaggagttcaaaaccagcccgcgagacatagtgagaccctgtctctacaaaaaattct

SEQ ID NO: 370975 - DNA, 1368 bp, Homo sapiens
taggtgtaagccctgatcccgcccagtgcatccccgaggccccaagcaactctcctccaactgtctttagggataaccctgagcgggcagcgtctactctatacctaactttatccgtaccagatacctagcctcactcagggccccccttacctggcggtgcgggatcaacaaatgaaattgtgacgggaagtcctggcccttggcccaacctcctgctgtccccggtctgagggcccaagccccgcgtctccgccttgccgtccagcctgtccttggtgtggggtgcttggaagtgtgagcaccctctctggctctttgccggccccaagggtcgttgcggcggcccccgggcccagtcatcagccctcttttccggtgccggaactatcgtactggtgccctagtttcccagccggcaggcggagtgaggaggaagcggaggcgagaccgcgctcaacactggggaaaggaaggaggcgggccctgcgcgcagcattttgggaaagagtggaattctgggtgttaggcccgccattcgcttgactcacgccttcgccgtagcatctttcgcagcggaccgaagagaagaaaagtaggccagagccgaactctcttcctgccaagatgtctattggtgtgccgattaaagtactgcatgaggccgagggccacattgtgacatgtgagacgaacaccggtgaggtatatcgggggaagctcattgaagcagaggacaacatgaactgccagatgtccaacatcacagtcacatacagagatggccgagtggcacagctggagcaggtatacatccgtggcagcaaaatccgctttctgattttgcctgacatgctgaagaacgcacccatgttaaagagcatgaaaaataaaaaccaaggctcaggggctggccgaggaaaagctgccattctcaaggcccaagtggccgcaagaggaagaggacgtggaatgggacgtggaaacatctttcaaaagcgaagataattttctaagttgaacagaactttgtccttttttctttcaggttatctgagttcattggagtgggtgcttgtgcatatatgctagagacagggttttgccgtgttgcccaagctggtcttgaactccggggctcaagtgatctgcccgcctcggcctgctgggattataggtgtgagccactgcacccggccaccattatcttttgaatcctctcttcctcctgcccaccatgaatttacttcctctcacccatctccctgatattgtaattctggttagatcatattcagtgtcaaattattaagatgtgattaaactttttaaaaatatgacagtgtcatagtgatcacagctgagtca

SEQ ID NO: 370976 - DNA, 209 bp, Homo sapiens
gcctcaaaagaaatttagaaaatgatctttctccagttaatattgctaacatccaaaccagataaattcaggataaagagaaatctactttgtcccctgaattgatggtacttggaacagaccatgtactcgccaactcttccctttcctttggactctgaacctgtcctaaggcaatatgtcttccccaaccttccttttttcctaaa

SEQ ID NO: 370977 - DNA, 2132 bp, Homo sapiens
cttacggcggccggccttctttgtaggcctggcaccgtagaggtagaggagctacattggccgcgtcccctgtccctctgccctcttgcccatctgcccaaacttttgtatttgatctctgttttgatgtcgaaccccaaagcactgtaattggggggggcggggggggtggtggaacctgcggacctgagagcagcgcgcgtgcgcacgacacgcgctgtgcgccggaagagcacgcccagtccgggctgcgcggaggaagcgctggggtcccggagggcgggggtggcggcgccggaggtcgccatggctaccgagcccgaagccgcggagccggtggtgccttcgctcgtggatcgatacttcactcgctggtacaaaccggatgtcaaaggaaaattttgtgaggaccactgtatactacagcactctaaccgaatatgtgtcatcacattggcagaatctcatccagttcttcaaagtggaaaaacaattaaaagcatttcctatcagatcagtaccaactgtagcagacttcagaacaaggtctctgggaaatttaagcggggggcacagtttctaacagagcttgcacctctctgtaagatttactgctcagatggtgaagaatatactgtgtctagttgtgttagaggacgtttgatggaagtgaatgaaaacatcctccataagccatctattcttcaagaaaagccatctactgaaggctacattgcagttgtgttacccaaatttgaagaaagtaaaagcataacagaagggttactgacacaaaaacaatatgaagaagtcatggtgaaacgcattaatgccacaacagctacgtcatgaggattgacatggaacaaaaagcaaagtgggattcttgttacctggcctaaaccatcagggtactaaaggagaagaaccagtatatgtaaagcatacctaacagccagccatatgcaggggaggcctagtgcttcacttagttttccctctctgtcttcataatgagccttggttcccatttgtctacagcctgccagatctggcctgcccatgtactcacactgttctcttgcatctctctaacaactggcatgcaaggcatgtttttctgattaaaaacaaacaaagctctttgaagaagatttagaaaatacagaagagttttaagtagccaagtaaaaataatttacccatcatcccataatccagaagtaaatacatttgacccttgagcaacataggtttgaactgcaagggtccacttatgcatggactattttcaactataaacgagtcaaaaatatatcattaaccaaacacgaaacccacttatagagcaggttcatatactcaggttccaaagggccaactgcaggacttgagttctcacgtatggatttgggtatatgtggaagttcctggaaccaatcccctatgtaaaccaagggataactactacattttaacctacttctgtttgaacatatggtatggttattgcttttgcctcgttttcctaacagtttgaagtttaaaaaaacctaacccacctttcttacccagtcttctataatgtgcctaccaaaaagcctagtcctagcccatctgcctcaactcctctcccttttaggttgtagggaagaggccggagtgtagagtatattatatcttctgtcccccttatgccaacaagatggccttcccctctgaaacaaagtaaaactgcaacactgtgacttcttaaatgagggatatgtgaaaaggctatgaaaaatacaaaggctttcctaggaaatgtgttataatgcagcgggaagctaattcttgaaatatgcacattatagttactcagtctcacatactctagttactggcaaagaagttactgagaatatgtcattcaaaggcataggggcctttgaatggaacaaatgctttcacatcatttaaagtaaaaaaaaacctccaacaactgtgaatttatagtttaagagtgatttacactgaatttcaaataaaaggactataaaacgtgttatttttctgtaagggctataacatacatgtcaatatcactgtttttaaataaaatatacttttatacagaaaaaaaaaaacga

SEQ ID NO: 370978 - DNA, 680 bp, Homo sapiens
cttcatttgggaatattttacatatcaaactatattcattaataatatattcccccaagtcttattagtcaaaaacattttttaaaagcatgattttcatcaccatggaaataactagcttgattccagccaaaagctgagatttttgttatttcagttagtctgtgcaaatttattgtgggtaaacacaggagttccattttgcattcttttagaggcctgggccatcagattttaaaaaggtatgaacttaaaaaggtcaaaattcatgttgggaagactcaatcacaggataagcttgctaacaacagttaagaacaatggaaggaaaccaccaaaggaatggtctccaatgatggaaaatatgataaggtactgacaaatgacagctaaacagcagcaaaatttctaactcctatcatttctgccttctttttccagagaattatctatctagaaaaggtagaagacgtcatcaagaggaaaatgatgcctctaagcttgggactgcatcttccccactcttaatcctccttctataggaaggaatcttcacgagcacagcatccctcacttctgtctgctgcctcacctatcccatcccataaaaggaggtggatgctcatcttttcagtctttctggtgactttgcaaaaataaattgaacacattaacccttt

SEQ ID NO: 370979 - DNA, 297 bp, Homo sapiens
cagtttggagacaattcattgaacattgatttaatgactaagctcacataggaagaagagaattatctatctagaaaaggtagaagacgtcatcaagaggaaaatgatgcctctaagcttgggactgcatcttccccactcttaatcctccttctataggaaggaatcttcacgagcacagcatccctcacttctgtctgctgcctcacctatcccatcccataaaaggaggtggatgctcatcttttcagtctttctggtgactttgcaaaaataaattgaacacattaacccttt

SEQ ID NO: 370980 - DNA, 2750 bp, Homo sapiens
cttacggcggccggccttctttgtaggcctggcaccgtagaggtagaggagctacattggccgcgtcccctgtccctctgccctcttgcccatctgcccaaacttttgtatttgatctctgttttgatgtcgaaccccaaagcactgtaattggggggggcggggggggtggtggaacctgcggacctgagagcagcgcgcgtgcgcacgacacgcgctgtgcgccggaagagcacgcccagtccgggctgcgcggaggaagcgctggggtcccggagggcgggggtggcggcgccggaggtcgccatggctaccgagcccgaagccgcggagccggtggtgccttcgctcgtggatcgatacttcactcgctggtacaaaccggatgtcaaaggaaaattttgtgaggaccactgtatactacagcactctaaccggtaagcaaattgggaattttaaattatcaaaaatttttttttcctggtattgtagcctggtatggtcttgtggtcttggattgaacaaatgttcactaaacaaacatgcattaattatcttctactgtgttgaaatggtattattataggagtttgtttggcaagaatgagtattccagtgcctggccactctgaacatataaatttgattactcaaacatccaaatggaggaccacatcatcagctgctacttgaagtggccagtctgtgcccaactactgaactgttcagagcccacagaaagggctacggtagagacatgtatggtatctcgtatacacaggcatgccttatttctttgtcttctaccccagtgctacctacctaaagacctctggtactcttccctttcctgggaaagaaattcaatcttgttttctcttttattattgtattctctattctacagttatgccccaatagtagccaaaggaaaaagggggaagatgatagtttgactaaacaaataccagttcatacattcttgttccaataggagttatgggaggaaaaattattccaagcaatcacacaggatcaactttttctccttgtagaatatgtgtcatcacattggcagaatctcatccagttcttcaaagtggaaaaacaattaaaagcatttcctatcagatcagtaccaactgtagcagacttcagaacaaggtctctgggaaatttaagcggggggcacagtttctaacagagcttgcacctctctgtaagatttactgctcagatggtgaagaatatactgtgtctagttgtgttagaggacgtttgatggaagtgaatgaaaacatcctccataagccatctattcttcaagaaaagccatctactgaaggctacattgcagttgtgttacccaaatttgaagaaagtaaaagcataacagaagggttactgacacaaaaacaatatgaagaagtcatggtgaaacgcattaatgccacaacagctacgtcatgaggattgacatggaacaaaaagcaaagtgggattcttgttacctggcctaaaccatcagggtactaaaggagaagaaccagtatatgtaaagcatacctaacagccagccatatgcaggggaggcctagtgcttcacttagttttccctctctgtcttcataatgagccttggttcccatttgtctacagcctgccagatctggcctgcccatgtactcacactgttctcttgcatctctctaacaactggcatgcaaggcatgtttttctgattaaaaacaaacaaagctctttgaagaagatttagaaaatacagaagagttttaagtagccaagtaaaaataatttacccatcatcccataatccagaagtaaatacatttgacccttgagcaacataggtttgaactgcaagggtccacttatgcatggactattttcaactataaacgagtcaaaaatatatcattaaccaaacacgaaacccacttatagagcaggttcatatactcaggttccaaagggccaactgcaggacttgagttctcacgtatggatttgggtatatgtggaagttcctggaaccaatcccctatgtaaaccaagggataactactacattttaacctacttctgtttgaacatatggtatggttattgcttttgcctcgttttcctaacagtttgaagtttaaaaaaacctaacccacctttcttacccagtcttctataatgtgcctaccaaaaagcctagtcctagcccatctgcctcaactcctctcccttttaggttgtagggaagaggccggagtgtagagtatattatatcttctgtcccccttatgccaacaagatggccttcccctctgaaacaaagtaaaactgcaacactgtgacttcttaaatgagggatatgtgaaaaggctatgaaaaatacaaaggctttcctaggaaatgtgttataatgcagcgggaagctaattcttgaaatatgcacattatagttactcagtctcacatactctagttactggcaaagaagttactgagaatatgtcattcaaaggcataggggcctttgaatggaacaaatgctttcacatcatttaaagtaaaaaaaaacctccaacaactgtgaatttatagtttaagagtgatttacactgaatttcaaataaaaggactataaaacgtgttatttttctgtaagggctataacatacatgtcaatatcactgtttttaaataaaatatacttttatacagaaaaaaaaaaacga

SEQ ID NO: 370981 - DNA, 806 bp, Homo sapiens
cttacggcggccggccttctttgtaggcctggcaccgtagaggtagaggagctacattggccgcgtcccctgtccctctgccctcttgcccatctgcccaaacttttgtatttgatctctgttttgatgtcgaaccccaaagcactgtaattggggggggcggggggggtggtggaacctgcggacctgagagcagcgcgcgtgcgcacgacacgcgctgtgcgccggaagagcacgcccagtccgggctgcgcggaggaagcgctggggtcccggagggcgggggtggcggcgccggaggtcgccatggctaccgagcccgaagccgcggagccggtggtgccttcgctcgtggatcgatacttcactcgctggtacaaaccggatgtcaaaggaaaattttgtgaggaccactgtatactacagcactctaaccgaatatgtgtcatcacattggcagaatctcatccagttcttcaaagtggaaaaacaattaaaagcatttcctatcagatcagtaccaactgtagcagacttcagaacaaggtctctgggaaatttaagcggagaattatctatctagaaaaggtagaagacgtcatcaagaggaaaatgatgcctctaagcttgggactgcatcttccccactcttaatcctccttctataggaaggaatcttcacgagcacagcatccctcacttctgtctgctgcctcacctatcccatcccataaaaggaggtggatgctcatcttttcagtctttctggtgactttgcaaaaataaattgaacacattaacccttt

SEQ ID NO: 370982 - DNA, 2080 bp, Homo sapiens
cttacggcggccggccttctttgtaggcctggcaccgtagaggtagaggagctacattggccgcgtcccctgtccctctgccctcttgcccatctgcccaaacttttgtatttgatctctgttttgatgtcgaaccccaaagcactgtaattggggggggcggggggggtggtggaacctgcggacctgagagcagcgcgcgtgcgcacgacacgcgctgtgcgccggaagagcacgcccagtccgggctgcgcggaggaagcgctggggtcccggagggcgggggtggcggcgccggaggtcgccatggctaccgagcccgaagccgcggagccggtggtgccttcgctcgtggatcgatacttcactcgctggtacaaaccggaatatgtgtcatcacattggcagaatctcatccagttcttcaaagtggaaaaacaattaaaagcatttcctatcagatcagtaccaactgtagcagacttcagaacaaggtctctgggaaatttaagcggggggcacagtttctaacagagcttgcacctctctgtaagatttactgctcagatggtgaagaatatactgtgtctagttgtgttagaggacgtttgatggaagtgaatgaaaacatcctccataagccatctattcttcaagaaaagccatctactgaaggctacattgcagttgtgttacccaaatttgaagaaagtaaaagcataacagaagggttactgacacaaaaacaatatgaagaagtcatggtgaaacgcattaatgccacaacagctacgtcatgaggattgacatggaacaaaaagcaaagtgggattcttgttacctggcctaaaccatcagggtactaaaggagaagaaccagtatatgtaaagcatacctaacagccagccatatgcaggggaggcctagtgcttcacttagttttccctctctgtcttcataatgagccttggttcccatttgtctacagcctgccagatctggcctgcccatgtactcacactgttctcttgcatctctctaacaactggcatgcaaggcatgtttttctgattaaaaacaaacaaagctctttgaagaagatttagaaaatacagaagagttttaagtagccaagtaaaaataatttacccatcatcccataatccagaagtaaatacatttgacccttgagcaacataggtttgaactgcaagggtccacttatgcatggactattttcaactataaacgagtcaaaaatatatcattaaccaaacacgaaacccacttatagagcaggttcatatactcaggttccaaagggccaactgcaggacttgagttctcacgtatggatttgggtatatgtggaagttcctggaaccaatcccctatgtaaaccaagggataactactacattttaacctacttctgtttgaacatatggtatggttattgcttttgcctcgttttcctaacagtttgaagtttaaaaaaacctaacccacctttcttacccagtcttctataatgtgcctaccaaaaagcctagtcctagcccatctgcctcaactcctctcccttttaggttgtagggaagaggccggagtgtagagtatattatatcttctgtcccccttatgccaacaagatggccttcccctctgaaacaaagtaaaactgcaacactgtgacttcttaaatgagggatatgtgaaaaggctatgaaaaatacaaaggctttcctaggaaatgtgttataatgcagcgggaagctaattcttgaaatatgcacattatagttactcagtctcacatactctagttactggcaaagaagttactgagaatatgtcattcaaaggcataggggcctttgaatggaacaaatgctttcacatcatttaaagtaaaaaaaaacctccaacaactgtgaatttatagtttaagagtgatttacactgaatttcaaataaaaggactataaaacgtgttatttttctgtaagggctataacatacatgtcaatatcactgtttttaaataaaatatacttttatacagaaaaaaaaaaacga

SEQ ID NO: 370983 - DNA, 1607 bp, Homo sapiens
cttacggcggccggccttctttgtaggcctggcaccgtagaggtagaggagctacattggccgcgtcccctgtccctctgccctcttgcccatctgcccaaacttttgtatttgatctctgttttgatgtcgaaccccaaagcactgtaattggggggggcggggggggtggtggaacctgcggacctgagagcagcgcgcgtgcgcacgacacgcgctgtgcgccggaagagcacgcccagtccgggctgcgcggaggaagcgctggggtcccggagggcgggggtggcggcgccggaggtcgccatggctaccgagcccgaagccgcggagccggtggtgccttcgctcgtggatcgatacttcactcgctggtacaaaccggatgtcaaaggaaaattttgtgaggaccactgtatactacagcactctaaccggtaagcaaattgggaattttaaattatcaaaaatttttttttcctggtattgtagcctggtatggtcttgtggtcttggattgaacaaatgttcactaaacaaacatgcattaattatcttctactgtgttgaaatggtattattataggagtttgtttggcaagaatgagtattccagtgcctggccactctgaacatataaatttgattactcaaacatccaaatggaggaccacatcatcagctgctacttgaagtggccagtctgtgcccaactactgaactgttcagagcccacagaaagggctacggtagagacatgtatggtatctcgtatacacaggcatgccttatttctttgtcttctaccccagtgctacctacctaaagacctctggtactcttccctttcctgggaaagaaattcaatcttgttttctcttttattattgtattctctattctacagttatgccccaatagtagccaaaggaaaaagggggaagatgatagtttgactaaacaaataccagttcatacattcttgttccaataggagttatgggaggaaaaattattccaagcaatcacacaggatcaactttttctccttgtagaatatgtgtcatcacattggcagaatctcatccagttcttcaaagtggaaaaacaattaaaagcatttcctatcagatcagtaccaactgtagcagacttcagaacaaggtctctgggaaatttaagcgggtatgttcctgtaattctgtgattatctacttacatcctctatattcatggtaatgacagatccaatgaaccttagaatccagtagcatatgcttagcatacttctctagcagtttgaggtgctaattttaggtatactttcacctaaagaaattctcagctcccccaaattaggtatctcaggaggtgtagtatctgttatattaggttctgtgctactatccctataatgcccaggatggaggagggggaaggcaggcctttgaaaggagaactctaatagcaatataacaagatattttgtcccttctagttgtattaaactagtatgtcgagttctgtaaaatttaggtgactaactcttctttaccatatatttccacatgtaaattaaacagaaaaaaaattcccaagggagttag

SEQ ID NO: 370984 - DNA, 736 bp, Homo sapiens
tctcacccttctgtgtctcctcaaactttctaagatactctaagatatcttagacattcaggacaaaaagccaagacacactctgccacctacaaatatccctaaagagttcaaccttgttaactgcttgaaaggatcaagaaaaaggagggaaaaatagaagaaaagacactaagccaatacagtccccaccccttataattcctggttactgatgtagtcattatgtcattaacatactgtagttattactacattatgttactatgtattaggctgtctaggtgaggctgagaaacacttgatgacagtatttggtatcctccagaatatactgggaatacggttccaataacacataggatggttcctcggccactctgagccatcgtcaatgaatccctgtgaacactcctctagcttagttatgctgttcttttaagtttgtctttgagttgggaaagtagacctatttggcttggcttaagggctaaatgtctcctcttcacttggtcttctaatcctcagtccttcctggctatgtggcatcatgtctttaaagcagggagagtaaagtatcaatattttaagaaggaacattcttcccacttacgttttctattcttctttcttttgagccctttctagaaagagtaatgctctagccttcaaccagaaatgaaaagtctatcttcaaatggtttaaacttttcatatatgccttcatatatgtgtc

SEQ ID NO: 370985 - DNA, 2495 bp, Homo sapiens
agcgtcatcattgcctccttcagtgcagcaaaagatacttgcaactgccaccaccagtacctcaggaatggttgaggcctcccaaatgccaaccgttatttatgtatctcctgtaaatacagtgaaaaatgtagttaccaagaactttcaaaacatttacccaaaacctgttacagaaatagcaaagccagtaatactaaataccacacaaattccaaagaatgttgctacagagacacaattgaaaggtggtcagcattctcaagctgctccagtgaaatggattttccaagataatctacagccttttacgccatctcttgttcctgttaagtcttcaaataatgtggcttcaaagattttaaaaacttttgtagataggaaaaatttgggagataatactataaatatgccaccattgagtaccatcgatcctagtgggacgcgatccaaaaatatgcctattaaagataatgctttggttatgtttaatgggaaagtctatctgttggctaaaaaggggacagatgttctgccatcacaaattgaccaacagaattctgtttctcctgatactccagtaagaaaagacacgttacagacagtgagttcaagtccagtcacagaaatatccagagaggttgtaaatattgttttggctaaaagtaaatcttcccagatggagacaaaatcactttccaatacccagcttgcttccatggccaatctaagggcagagaagaataaagtggagaaaccatctccttctaccacaaatccacatatgaaccaatccagtaactacttaaaacagagtaagactttattcacaaatccaatctttccagttggatttagtacaggacacaatgcccccagaaaagtaacagccgtcatttatgctagaaaaggaagtgtcctccagagcatagagaaaataagttcctctgttgatgcaacaactgttacttcacaacagtgtgttttcagagaccaagaaccaaagatccataatgagatggcatcaacatcagataaaggtgcccaaggaagaaatgacaagaaagattctcaaggaagaagtaataaggcattacatctgaagagtgatgctgaatttaaaaagatatttggccttactaaggatttgagagtgtgccttactcgaattcctgaccatttgacctctggagaaggtttcgattcctttagcagtttggtaaagagtggtacttacaaagagacagagtttatggtgaaggaaggagagagaaaacagcagaattttgataagaaaagaaaagcaaaaactaataagaagatggatcacataaagaagagaaaaacagagaatgcttataacgcaatcataaatggggaagctaatgtcaccggttcccaactcctaagcagtattttaccaacttcagatgtgtcacaacataacattctcacgagtcacagcaaaaccagacaagaaaagagaactgagatggaatactatacccatgagaagcaagagaaaggcactttgaattcaaatgcagcttatgaacaaagtcatttcttcaataaaaattataccgaagatattttcccagtgacaccaccggagttagaagaaaccattcgagatgaaaaaataagaagacttaagcaggtgctgagagagaaagaagcagctcttgaagaaatgcgtaagaagatgcaccaaaaataaaatctcctgtaaagacttcagtgaaatagctgttttttaaaatatacttcagcattaataagttaattgtaggtgtgttctgaaagtgtctttgaatatgaagcttgttttttcatcagtcgattgtacaactttaaggaatacagaaaaggttgattcacatatgacttgtgaataatttacatggggtatctatacctttgtcttagatacctttttttggaaggataaattttatatttttctattattttaactagaattctccaagtttgaatatttgggcagggtttttgttattgtttgtatctttacctaaattgctcaggcattattccagcagtagatagtgactgtgtattactgaaattttacaattcaagagaggaaatcagctccaaacttagcttttccagtggatttgtatatgtacttgctttatctctttacccttaaaatgatgataccttgtattcaccattgttttttttaatgtcgtgaaataatatgtattatggcaacattatttaaacattcaaacatttctcaagaatgagcaacatttgtaactttacaatgtaattttatataatccaaaggtattttagaattcaggccatttgatgttttgtttgcttatagtgatgtgttcccaggcaaatgctgctttttttttttttggggactatgtacatacgttactgagattgtgtaaaaagtagatcctgaacagttatcacatttaatatttcttaaactgtaaaagtgtattttc

SEQ ID NO: 370986 - DNA, 1919 bp, Homo sapiens
gttttgcagtctttcactttaaaaactcaaaatggaaaattatatactttattttaatatttacaaatatttacaaatatttatttttaaataaaatgtatataccatgtagtatgttgtatttatttactcaatgttcttttaagtgtttcaggctgcatgtaccaagtagttcagacgattggctcggatggaaaaaatcttctgcaattacttccaattcctaagtcttctggaaatcttataccactagttcaatcttcagtcatgtctgatgctttgaaagggaatacaggaaaaccagttcaagttacttttcagactcagatttccagctcttccacaagtgcatcagttcaattgcccatttttcagccagccagttcttcaaactattttcttacaagaacagtagatacatcagaaaaagatccataatgagatggcatcaacatcagataaaggtgcccaaggaagaaatgacaagaaagattctcaaggaagaagtaataaggcattacatctgaagagtgatgctgaatttaaaaagatatttggccttactaaggatttgagagtgtgccttactcgaattcctgaccatttgacctctggagaaggtttcgattcctttagcagtttggtaaagagtggtacttacaaagagacagagtttatggtgaaggaaggagagagaaaacagcagaattttgataagaaaagaaaagcaaaaactaataagaagatggatcacataaagaagagaaaaacagagaatgcttataacgcaatcataaatggggaagctaatgtcaccggttcccaactcctaagcagtattttaccaacttcagatgtgtcacaacataacattctcacgagtcacagcaaaaccagacaagaaaagagaactgagatggaatactatacccatgagaagcaagagaaaggcactttgaattcaaatgcagcttatgaacaaagtcatttcttcaataaaaattataccgaagatattttcccagtgacaccaccggagttagaagaaaccattcgagatgaaaaaataagaagacttaagcaggtgctgagagagaaagaagcagctcttgaagaaatgcgtaagaagatgcaccaaaaataaaatctcctgtaaagacttcagtgaaatagctgttttttaaaatatacttcagcattaataagttaattgtaggtgtgttctgaaagtgtctttgaatatgaagcttgttttttcatcagtcgattgtacaactttaaggaatacagaaaaggttgattcacatatgacttgtgaataatttacatggggtatctatacctttgtcttagatacctttttttggaaggataaattttatatttttctattattttaactagaattctccaagtttgaatatttgggcagggtttttgttattgtttgtatctttacctaaattgctcaggcattattccagcagtagatagtgactgtgtattactgaaattttacaattcaagagaggaaatcagctccaaacttagcttttccagtggatttgtatatgtacttgctttatctctttacccttaaaatgatgataccttgtattcaccattgttttttttaatgtcgtgaaataatatgtattatggcaacattatttaaacattcaaacatttctcaagaatgagcaacatttgtaactttacaatgtaattttatataatccaaaggtattttagaattcaggccatttgatgttttgtttgcttatagtgatgtgttcccaggcaaatgctgctttttttttttttggggactatgtacatacgttactgagattgtgtaaaaagtagatcctgaacagttatcacatttaatatttcttaaactgtaaaagtgtattttc

SEQ ID NO: 370987 - DNA, 1811 bp, Homo sapiens
cagcgtagggctgtgagggcgcagtccaccgccaggagccttccggtttctgcgcggtgcgcgacctcgtcccgaagcctggggatacaccctctcgagagcccgctgtcgccctccgttaaggtcgaacccctcacagttgctgtgggcaactccagcccaacattccctcgctctggttctcgccccattgggaaactcggccccacgcttcccacttttctggatgaggtgtcccctttctccccactaaaatgtcaaataacctacggagggtcttcctgaaacccgcagaggaaaattcaggcaacgcctcgcgttgatccataatgagatggcatcaacatcagataaaggtgcccaaggaagaaatgacaagaaagattctcaaggaagaagtaataaggcattacatctgaagagtgatgctgaatttaaaaagatatttggccttactaaggatttgagagtgtgccttactcgaattcctgaccatttgacctctggagaaggtttcgattcctttagcagtttggtaaagagtggtacttacaaagagacagagtttatggtgaaggaaggagagagaaaacagcagaattttgataagaaaagaaaagcaaaaactaataagaagatggatcacataaagaagagaaaaacagagaatgcttataacgcaatcataaatggggaagctaatgtcaccggttcccaactcctaagcagtattttaccaacttcagatgtgtcacaacataacattctcacgagtcacagcaaaaccagacaagaaaagagaactgagatggaatactatacccatgagaagcaagagaaaggcactttgaattcaaatgcagcttatgaacaaagtcatttcttcaataaaaattataccgaagatattttcccagtgacaccaccggagttagaagaaaccattcgagatgaaaaaataagaagacttaagcaggtgctgagagagaaagaagcagctcttgaagaaatgcgtaagaagatgcaccaaaaataaaatctcctgtaaagacttcagtgaaatagctgttttttaaaatatacttcagcattaataagttaattgtaggtgtgttctgaaagtgtctttgaatatgaagcttgttttttcatcagtcgattgtacaactttaaggaatacagaaaaggttgattcacatatgacttgtgaataatttacatggggtatctatacctttgtcttagatacctttttttggaaggataaattttatatttttctattattttaactagaattctccaagtttgaatatttgggcagggtttttgttattgtttgtatctttacctaaattgctcaggcattattccagcagtagatagtgactgtgtattactgaaattttacaattcaagagaggaaatcagctccaaacttagcttttccagtggatttgtatatgtacttgctttatctctttacccttaaaatgatgataccttgtattcaccattgttttttttaatgtcgtgaaataatatgtattatggcaacattatttaaacattcaaacatttctcaagaatgagcaacatttgtaactttacaatgtaattttatataatccaaaggtattttagaattcaggccatttgatgttttgtttgcttatagtgatgtgttcccaggcaaatgctgctttttttttttttggggactatgtacatacgttactgagattgtgtaaaaagtagatcctgaacagttatcacatttaatatttcttaaactgtaaaagtgtattttc

SEQ ID NO: 370988 - DNA, 1697 bp, Homo sapiens
ttatatagctaataatgataaaaagaaatgtctataactttgcctactgttatactttgacttatgagtatgtcattatcatgtaatattctgaactttagatcagagactagtaaaccttttcgaatgaaaatcctccatatgtgcctgctgtgcaaaggaaaagaaaaaaacaatcaattttatatctcaggcactttacaagtgctattatatttctgtggtgagtcagtatgccttctaatacttgacttgagcaagaaaatgtgaattaggcaatttcttcttactgaatatgattaagacattttggtaccatacagtgggaaatatttccctcttgctgtagttgtcttccataaattttgttaattgtaatagctagatatttgtttctgcagacgttgttaagtttggtagtacccggtgcatttagcagtaacatttcgtttttgttttggaatgttattcaatattgcagcagaattttgataagaaaagaaaagcaaaaactaataagaagatggatcacataaagaagagaaaaacagagaatgcttataacgcaatcataaatggggaagctaatgtcaccggttcccaactcctaagcagtattttaccaacttcagatgtgtcacaacataacattctcacgagtcacagcaaaaccagacaagaaaagagaactgagatggaatactatacccatgagaagcaagagaaaggcactttgaattcaaatgcagcttatgaacaaagtcatttcttcaataaaaattataccgaagatattttcccagtgacaccaccggagttagaagaaaccattcgagatgaaaaaataagaagacttaagcaggtgctgagagagaaagaagcagctcttgaagaaatgcgtaagaagatgcaccaaaaataaaatctcctgtaaagacttcagtgaaatagctgttttttaaaatatacttcagcattaataagttaattgtaggtgtgttctgaaagtgtctttgaatatgaagcttgttttttcatcagtcgattgtacaactttaaggaatacagaaaaggttgattcacatatgacttgtgaataatttacatggggtatctatacctttgtcttagatacctttttttggaaggataaattttatatttttctattattttaactagaattctccaagtttgaatatttgggcagggtttttgttattgtttgtatctttacctaaattgctcaggcattattccagcagtagatagtgactgtgtattactgaaattttacaattcaagagaggaaatcagctccaaacttagcttttccagtggatttgtatatgtacttgctttatctctttacccttaaaatgatgataccttgtattcaccattgttttttttaatgtcgtgaaataatatgtattatggcaacattatttaaacattcaaacatttctcaagaatgagcaacatttgtaactttacaatgtaattttatataatccaaaggtattttagaattcaggccatttgatgttttgtttgcttatagtgatgtgttcccaggcaaatgctgctttttttttttttggggactatgtacatacgttactgagattgtgtaaaaagtagatcctgaacagttatcacatttaatatttcttaaactgtaaaagtgtattttc

SEQ ID NO: 370989 - DNA, 681 bp, Homo sapiens
cagcgtagggctgtgagggcgcagtccaccgccaggagccttccggtttctgcgcggtgcgcgacctcgtcccgaagcctggggatacaccctctcgagagcccgctgtcgccctccgttaaggtcgaacccctcacagttgctgtgggcaactccagcccaacattccctcgctctggttctcgccccattgggaaactcggccccacgcttcccacttttctggatgaggtgtcccctttctccccactaaaatgtcaaataacctacggagggtcttcctgaaacccgcagaggaaaattcaggcaacgcctcgcgttgtgtttcaggctgcatgtaccaagtagttcagacgattggctcggatggaaaaaatcttctgcaattacttccaattcctaagtcttctggaaatcttataccactagttcaatcttcagtcatgtctgatgctttgaaagggaatacaggaaaaccagttcaagttacttttcagactcagatttccagctcttccacaagtgcatcagttcaattgcccatttttcagccagccagttcttcaaactattttcttacaagaacagtagatacatcagaaaaaggtagagttacttctgtgggaactggaaatttttcttcatcagtttctaaagttcagagtcatggtgtgaaaattg

SEQ ID NO: 370990 - DNA, 1757 bp, Homo sapiens
cagcgtagggctgtgagggcgcagtccaccgccaggagccttccggtttctgcgcggtgcgcgacctcgtcccgaagcctggggatacaccctctcgagagcccgctgtcgccctccgttaaggtcgaacccctcacagttgctgtgggcaactccagcccaacattccctcgctctggttctcgccccattgggaaactcggccccacgcttcccacttttctggatgaggtgtcccctttctccccactaaaatgtcaaataacctacggagggtcttcctgaaacccgcagaggaaaattcaggcaacgcctcgcgttgatccataatgagatggcatcaacatcagataaaggtgcccaaggaagaaatgacaagaaagattctcaaggaagaagtaataaggcattacatctgaagagtgatgctgaatttaaaaagatatttggccttactaaggatttgagagtgtgccttactcgaattcctgaccatttgacctctggagaaggtttcgattcctttagcagtttggtaaagagtggtacttacaaagagacagagtttatggtgaaggaaggagagagaaaacagcagaattttgataagaaaagaaaagcaaaaactaataagaagatggatcacataaagaagagaaaaacagagaatgcttataacgcaatcataaatggggaagctaatgtcaccggttcccaactcctaagcagtattttaccaacttcagatgtgtcacaacataacattctcacgagtcacagcaaaaccagacaagaaaagagaactgagatggaatactatacccatgagaagcaagagaaaggcactttgaattcaaatgcagcttatgaacaaagtcatttcttcaataaaaattataccgaagatattttcccagtgacaccaccggagttagaagaaaccattcgagatgaaaaaataagaagacttaagcaggtgctgagagagaaagaagcagctcttgaagaaatgcgtaagaagatgcaccaaaaataaaatctcctgtaaagacttcagtgaaatagctgttttttaaaatatacttcagcattaataagttaattgtaggtgtgttctgaaagtgtctttgaatatgaagcttgttttttcatcagtcgattgtacaactttaaggaatacagttgtcttagatacctttttttggaaggataaattttatatttttctattattttaactagaattctccaagtttgaatatttgggcagggtttttgttattgtttgtatctttacctaaattgctcaggcattattccagcagtagatagtgactgtgtattactgaaattttacaattcaagagaggaaatcagctccaaacttagcttttccagtggatttgtatatgtacttgctttatctctttacccttaaaatgatgataccttgtattcaccattgttttttttaatgtcgtgaaataatatgtattatggcaacattatttaaacattcaaacatttctcaagaatgagcaacatttgtaactttacaatgtaattttatataatccaaaggtattttagaattcaggccatttgatgttttgtttgcttatagtgatgtgttcccaggcaaatgctgctttttttttttttggggactatgtacatacgttactgagattgtgtaaaaagtagatcctgaacagttatcacatttaatatttcttaaactgtaaaagtgtattttc

SEQ ID NO: 370991 - DNA, 438 bp, Homo sapiens
agaacccaaaaggtccaatgagaaccgtctggctcaggcacagtgcacctcacatctgcacttcatggaccatcgttgaaaatttccaaccccggttgaacactttcatgattaagaatgcacggctgtaaggtttcagaccttgttaccacaccgccggaaccaccaaggtgctctgaaacataaaatgaacaaccactttctggtgttgactgtgtgccaggcacaatctacatgcaaaaatgaactgtcctagtgacgaccttcaaaggactcccagtggcatacaggagaccaacatggagagaggcaatcataatacaggaagcctcctttaatcagtttatttattcaacagaaatttaccgagtgcttactatgtggcaggcactgttataggtactagacatacagcagtaaatgaaacagacacaaaaa

SEQ ID NO: 370992 - DNA, 474 bp, Homo sapiens
cggtggacacgtggaggagaacaaaggggagccccaggggcatctgcagccaggtggagccgttcagccttctggcacacatctgttggctgggtggaggtatgagggcgcagatctgaaaaccaagtggtgacctagggagggaacaagcgctgtgcagcattgatgaaacttaaaagatgaagtcctggtccgggcacggtggctcacttctgtaattccaacactttgggaggccgaggcaggaagatggcttcagcccacgacaaaaaaaaaaaaaaaaacacaaaaaattagcagggcgtggtgacatgtgcctctagtctcagttactcgggaggctgaggttgggagatcagttgagcctgggaggtcaaggctgcagtgagcagagattgcaccactgcactccagcctcgacaacaggcttttggacatagcctgcctcaacaaaaaaaaaaaaaaaaaaaaaaa

SEQ ID NO: 370993 - DNA, 488 bp, Homo sapiens
attcaattcagtgggaggaagagttttctgagattagtgtcaaatggctcttataggaggtcagaaggtctttacccctggcagtttagggaaacttggcatggagcttgtgcaagggattcatgcatcaaggaggggtgggattgggctagagggcttggctggcctcttccattcccagaattctctgattctgggttccaggagggcctgtgctcttttttctaaagaaagactacctagaggaatacgccacactgtatagcaactttatgtgattgctgaggcctccccagccacctgtgatctgtgaactggcctcttgttcttgcatcttttaaataagttaatgtccatgctcttaattttggttttggatgagttattatttctagatacttaaagcaattaggccttatagtgccagtattggttaagaatagtacatcaccaaggcaggagaatcacttaaggccaggagtttgagg

SEQ ID NO: 370994 - DNA, 3247 bp, Homo sapiens
aggccctcttccccgggcgtggcctaagcggcccggtccagtcgccctggggctgcttgggggcttttcctgctcgtggagctctgcgctggtcttcatgcgccctagccctctttcggggatactggccgaccccctcttccttttcccctttagtgaaggcctcccccgtcgccgcgcggcttcccggagccgactgcagactccctcagcccggtgttccccgcgtccggacgccgaggtcgcggcttcgcagaaactcgggcccctccatccgccctcagaaaagggagcgatgttgatctcaggaagcacaaagggaccttcctagctctgactgaaccacggagctcaccctggacagtatcactccgtggaggaagactgtgagactgtggctggaagccagattgtagccacacatccgcccctgccctaccccagagccctggagcagcaactggctgcagatcacagacacagtgaggatatgagtgtaggggtgagcacctcagcccctctttccccaacctcgggcacaagcgtgggcatgtctaccttctccatcatggactatgtggtgttcgtcctgctgctggttctctctcttgccattgggctctaccatgcttgtcgtggctggggccggcatactgttggtgagctgctgatggcggaccgcaaaatgggctgccttccggtggcactgtccctgctggccaccttccagtcagccgtggccatcctgggtgtgccgtcagagatctaccgatttgggacccaatattggttcctgggctgctgctactttctggggctgctgatacctgcacacatcttcatccccgttttctaccgcctgcatctcaccagtgcctatgagtacctggagcttcgattcaataaaactgtgcgagtgtgtggaactgtgaccttcatctttcagatggtgatctacatgggagttgtgctctatgctccgtcattggctctcaatgcagtgactggctttgatctgtggctgtccgtgctggccctgggcattgtctgtaccgtctatacagctctgggtgggctgaaggccgtcatctggacagatgtgttccagacactggtcatgttcctcgggcagctggcagttatcatcgtggggtcagccaaggtgggcggcttggggcgtgtgtgggccgtggcttcccagcacggccgcatctctgggtttgagctggatccagacccctttgtgcggcacaccttctggaccttggccttcgggggtgtcttcatgatgctctccttatacggggtgaaccaggctcaggtgcagcggtacctcagttcccgcacggagaaggctgctgtgctctcctgttatgcagtgttccccttccagcaggtgtccctctgcgtgggctgcctcattggcctggtcatgttcgcgtattaccaggagtatcccatgagcattcagcaggctcaggcagccccagaccagttcgtcctgtactttgtgatggatctcctgaagggcctgccaggcctgccagggctcttcattgcctgcctcttcagcggctctctcagcactatatcctctgcttttaattcattggcaactgttacgatggaagacctgattcgaccttggttccctgagttctctgaagcccgggccatcatgctttccagaggccttgcctttggctatgggctgctttgtctaggaatggcctatatttcctcccagatgggacctgtgctgcaggcagcaatcagcatctttggcatggttgggggaccgctgctgggactcttctgccttggaatgttctttccatgtgctaaccctcctggtgctgttgtgggcctgttggctgggctcgtcatggccttctggattggcatcgggagcatcgtgaccagcatgggcttcagcatgccaccctctccctctaatgggtccagcttctccctgcccaccaatctaaccgttgccactgtgaccacactgatgcccttgactaccttctccaagcccacagggctgcagcggttctattccttgtcttacttatggtacagtgctcacaactccaccacagtgattgtggtgggcctgattgtcagtctactcactgggagaatgcgaggccggtccctgaaccctgcaaccatttacccagtgttgccaaagctcctgtccctccttccgttgtcctgtcagaagcggctccactgcaggagctacggccaggaccacctcgacactggcctgtttcctgagaagccgaggaatggtgtgctgggggacagcagagacaaggaggccatggccctggatggcacagcctatcaggggagcagctccacctgcatcctccaggagacctccctgtgatgttgactcaggaccccgcctctgtcctcactgtgccaggccatagccagaggccaccctgtagtacagggatgagtcttggtgtgttctgcagggacaggcctggatgatctagctcataccaaaggaccttgttctgagaggttcttgcctgcaggagaagctgtcacatctcaagcatgtgaggcaccgtttttctcgtcgcttgccaatctgttttttaaaggatcaggctcgtagggagcaggatcatgccagaaatagggatggaagtgcatcctctgggaaaaagataatggcttctgattcaacatagccatagtcctttgaagtaagtggctagaaacagcactctggttataattgccccagggcctgattcaggactgactctccaccataaaactggaagctgcttcccctgtagtccccatttcagtaccagttctgccagccacagtgagcccctattattactttcagattgtctgtgacactcaagcccctctcatttttatctgtctacctccattctgaagagggaggttttggtgtccctggtcctctgggaatagaagatccatttgtctttgtgtagagcaagcacgttttccacctcactgtctccatcctccacctctgagatggacacttaagagacggggcaaatgtggatccaagaaaccagggccatgaccaggtccactgtggagcagccatctatctacctgactcctgagccaggctgccgtggtgtcatttctgtcatccgtgctctgtttccttttggagtttcttctccacattatctttgttcctggggaataaaaactaccattggacctagaa

SEQ ID NO: 370995 - DNA, 3332 bp, Homo sapiens
aggccctcttccccgggcgtggcctaagcggcccggtccagtcgccctggggctgcttgggggcttttcctgctcgtggagctctgcgctggtcttcatgcgccctagccctctttcggggatactggccgaccccctcttccttttcccctttagtgaaggcctcccccgtcgccgcgcggcttcccggagccgactgcagactccctcagcccggtgttccccgcgtccggacgccgaggtcgcggcttcgcagaaactcgggcccctccatccgccctcagaaaagggagcgatgttgatctcaggaagcacaaagggaccttcctagctctgactgaaccacggagctcaccctggacagtatcactccgtggaggaagactgtgagactgtggctggaagccagattgtagccacacatccgcccctgccctaccccagagccctggagcagcaactggctgcagatcacagacacagtgaggatatgagtgtaggggtgagcacctcagcccctctttccccaacctcgggcacaagcgtgggcatgtctaccttctccatcatggactatgtggtgttcgtcctgctgctggttctctctcttgccattgggctctaccatgcttgtcgtggctggggccggcatactgttggtgagctgctgatggcggaccgcaaaatgggctgccttccggtggcactgtccctgctggccaccttccagtcagccgtggccatcctgggtgtgccgtcagagatctaccgatttgggacccaatattggttcctgggctgctgctactttctggggctgctgatacctgcacacatcttcatccccgttttctaccgcctgcatctcaccagtgcctatgagtacctggagcttcgattcaataaaactgtgcgagtgtgtggaactgtgaccttcatctttcagatggtgatctacatgggagttgtgctctatgctccgtcattggctctcaatgcagtgactggctttgatctgtggctgtccgtgctggccctgggcattgtctgtaccgtctatacagctctgggtgggctgaaggccgtcatctggacagatgtgttccagacactggtcatgttcctcgggcagctggcagttatcatcgtggggtcagccaaggtgggcggcttggggcgtgtgtgggccgtggcttcccagcacggccgcatctctgggtttgagctggatccagacccctttgtgcggcacaccttctggaccttggccttcgggggtgtcttcatgatgctctccttatacggggtgaaccaggctcaggtgcagcggtacctcagttcccgcacggagaaggctgctgtgctctcctgttatgcagtgttccccttccagcaggtgtccctctgcgtgggctgcctcattggcctggtcatgttcgcgtattaccaggagtatcccatgagcattcagcaggctcaggcagccccagaccagttcgtcctgtactttgtgatggatctcctgaagggcctgccaggcctgccagggctcttcattgcctgcctcttcagcggctctctcagcactatatcctctgcttttaattcattggcaactgttacgatggaagacctgattcgaccttggttccctgagttctctgaagcccgggccatcatgctttccagaggccttggtggggttatgcttcctcatctcttcagtctgggtctttctaagcttcatcctgaccattgtcatcagtttgctgtaaaacacccactttatccggggctcagcacttgcctaatgaagcacacaaccttccctgcatgcatggttgtttccatctcagggcatgtcctagggaggtctctgagtcacataggagtgaggacttggtgggaggaagctggggcgtgatgtaatatgccttttgtttccagagagacagaggtggtagtttggctgggcagggagccttgctttaccccattgcttgtgttaactcacaccttcttgtttcctctcctgtccttttcccccagcctttggctatgggctgctttgtctaggaatggcctatatttcctcccagatgggacctgtgctgcaggcagcaatcagcatctttggcatggttgggggaccgctgctgggactcttctgccttggaatgttctttccatgtgctaaccctcctggtgctgttgtgggcctgttggctgggctcgtcatggccttctggattggcatcgggagcatcgtgaccagcatgggcttcagcatgccaccctctccctctaatgggtccagcttctccctgcccaccaatctaaccgttgccactgtgaccacactgatgcccttgactaccttctccaagcccacagggctgcagcggttctattccttgtcttacttatggtacagtgctcacaactccaccacagtgattgtggtgggcctgattgtcagtctactcactgggagaatgcgaggccggtccctgaaccctgcaaccatttacccagtgttgccaaagctcctgtccctccttccgttgtcctgtcagaagcggctccactgcaggagctacggccaggaccacctcgacactggcctgtttcctgagaagccgaggaatggtgtgctgggggacagcagagacaaggaggccatggccctggatggcacagcctatcaggggagcagctccacctgcatcctccaggagacctccctgtgatgttgactcaggaccccgcctctgtcctcactgtgccaggccatagccagaggccaccctgtagtacagggatgagtcttggtgtgttctgcagggacaggcctggatgatctagctcataccaaaggaccttgttctgagaggttcttgcctgcaggagaagctgtcacatctcaagcatgtgaggcaccgtttttctcgtcgcttgccaatctgttttttaaaggatcaggctcgtagggagcaggatcatgccagaaatagggatggaagtgcatcctctgggaaaaagataatggcttctgattcaacatagccatagtcctttgaaagcaagcacgttttccacctcactgtctccatcctccacctctgagatggacacttaagagacggggcaaatgtggatccaagaaaccagggccatgaccaggtccactgtggagcagccatctatctacctgactcctgagccaggctgccgtggtgtcatttctgtcatccgtgctctgtttccttttggagtttcttctccacattatctttgttcctggggaataaaaactaccattggacctagaa

SEQ ID NO: 370996 - DNA, 225 bp, Homo sapiens
tcctcggcgttctgaggatccccccttcccccacagtgagcccctattattactttcagattgtctgtgacactcaagcccctctcatttttatctgtctacctccattctgaagagggaggttttggtgtccctggtcctctgggaatagaagatccatttgtctttgtgtagagcaagcacgttttccacctcacagtgggggaaggggggatcctcagtagc

SEQ ID NO: 370997 - DNA, 3082 bp, Homo sapiens
tcatacccaacagcacacaagaccaacactatcgtatgtgagcctgatgttaattgccagagggtacgtggtggtctccgccgcgtagagggaagcgggaaaccgagaaagaacgagggaaaagggagcgatgttgatctcaggaagcacaaagggaccttcctagctctgactgaaccacggagctcaccctggacagtatcactccgtggaggaagactgtgagactgtggctggaagccagattgtagccacacatccgcccctgccctaccccagagccctggagcagcaactggctgcagatcacagacacagtgaggatatgagtgtaggggtgagcacctcagcccctctttccccaacctcgggcacaagcgtgggcatgtctaccttctccatcatggactatgtggtgttcgtcctgctgctggttctctctcttgccattgggctctaccatgcttgtcgtggctggggccggcatactgttggtgagctgctgatggcggaccgcaaaatgggctgccttccggtggcactgtccctgctggccaccttccagtcagccgtggccatcctgggtgtgccgtcagagatctaccgatttgggacccaatattggttcctgggctgctgctactttctggggctgctgatacctgcacacatcttcatccccgttttctaccgcctgcatctcaccagtgcctatgagtacctggagcttcgattcaataaaactgtgcgagtgtgtggaactgtgaccttcatctttcagatggtgatctacatgggagttgtgctctatgctccgtcattggctctcaatgcagtgactggctttgatctgtggctgtccgtgctggccctgggcattgtctgtaccgtctatacagctctgggtgggctgaaggccgtcatctggacagatgtgttccagacactggtcatgttcctcgggcagctggcagttatcatcgtggggtcagccaaggtgggcggcttggggcgtgtgtgggccgtggcttcccagcacggccgcatctctgggtttgagctggatccagacccctttgtgcggcacaccttctggaccttggccttcgggggtgtcttcatgatgctctccttatacggggtgaaccaggctcaggtgcagcggtacctcagttcccgcacggagaaggctgctgtgctctcctgttatgcagtgttccccttccagcaggtgtccctctgcgtgggctgcctcattggcctggtcatgttcgcgtattaccaggagtatcccatgagcattcagcaggctcaggcagccccagaccagttcgtcctgtactttgtgatggatctcctgaagggcctgccaggcctgccagggctcttcattgcctgcctcttcagcggctctctcagcactatatcctctgcttttaattcattggcaactgttacgatggaagacctgattcgaccttggttccctgagttctctgaagcccgggccatcatgctttccagaggccttgcctttggctatgggctgctttgtctaggaatggcctatatttcctcccagatgggacctgtgctgcaggcagcaatcagcatctttggcatggttgggggaccgctgctgggactcttctgccttggaatgttctttccatgtgctaaccctcctggtgctgttgtgggcctgttggctgggctcgtcatggccttctggattggcatcgggagcatcgtgaccagcatgggcttcagcatgccaccctctccctctaatgggtccagcttctccctgcccaccaatctaaccgttgccactgtgaccacactgatgcccttgactaccttctccaagcccacagggctgcagcggttctattccttgtcttacttatggtacagtgctcacaactccaccacagtgattgtggtgggcctgattgtcagtctactcactgggagaatgcgaggccggtccctgaaccctgcaaccatttacccagtgttgccaaagctcctgtccctccttccgttgtcctgtcagaagcggctccactgcaggagctacggccaggaccacctcgacactggcctgtttcctgagaagccgaggaatggtgtgctgggggacagcagagacaaggaggccatggccctggatggcacagcctatcaggggagcagctccacctgcatcctccaggagacctccctgtgatgttgactcaggaccccgcctctgtcctcactgtgccaggccatagccagaggccaccctgtagtacagggatgagtcttggtgtgttctgcagggacaggcctggatgatctagctcataccaaaggaccttgttctgagaggttcttgcctgcaggagaagctgtcacatctcaagcatgtgaggcaccgtttttctcgtcgcttgccaatctgttttttaaaggatcaggctcgtagggagcaggatcatgccagaaatagggatggaagtgcatcctctgggaaaaagataatggcttctgattcaacatagccatagtcctttgaagtaagtggctagaaacagcactctggttataattgccccagggcctgattcaggactgactctccaccataaaactggaagctgcttcccctgtagtccccatttcagtaccagttctgccagccacagtgagcccctattattactttcagattgtctgtgacactcaagcccctctcatttttatctgtctacctccattctgaagagggaggttttggtgtccctggtcctctgggaatagaagatccatttgtctttgtgtagagcaagcacgttttccacctcactgtctccatcctccacctctgagatggacacttaagagacggggcaaatgtggatccaagaaaccagggccatgaccaggtccactgtggagcagccatctatctacctgactcctgagccaggctgccgtggtgtcatttctgtcatccgtgctctgtttccttttggagtttcttctccacattatctttgttcctggggaataaaaactaccattggacctagaa

SEQ ID NO: 370998 - DNA, 3050 bp, Homo sapiens
ggggcgggcagggggcggggcccccgcgggctcccggccagggctctcggccgggctctggctacccacgtgtggagaccgggcaggaaaagggagcgatgttgatctcaggaagcacaaagggaccttcctagctctgactgaaccacggagctcaccctggacagtatcactccgtggaggaagactgtgagactgtggctggaagccagattgtagccacacatccgcccctgccctaccccagagccctggagcagcaactggctgcagatcacagacacagtgaggatatgagtgtaggggtgagcacctcagcccctctttccccaacctcgggcacaagcgtgggcatgtctaccttctccatcatggactatgtggtgttcgtcctgctgctggttctctctcttgccattgggctctaccatgcttgtcgtggctggggccggcatactgttggtgagctgctgatggcggaccgcaaaatgggctgccttccggtggcactgtccctgctggccaccttccagtcagccgtggccatcctgggtgtgccgtcagagatctaccgatttgggacccaatattggttcctgggctgctgctactttctggggctgctgatacctgcacacatcttcatccccgttttctaccgcctgcatctcaccagtgcctatgagtacctggagcttcgattcaataaaactgtgcgagtgtgtggaactgtgaccttcatctttcagatggtgatctacatgggagttgtgctctatgctccgtcattggctctcaatgcagtgactggctttgatctgtggctgtccgtgctggccctgggcattgtctgtaccgtctatacagctctgggtgggctgaaggccgtcatctggacagatgtgttccagacactggtcatgttcctcgggcagctggcagttatcatcgtggggtcagccaaggtgggcggcttggggcgtgtgtgggccgtggcttcccagcacggccgcatctctgggtttgagctggatccagacccctttgtgcggcacaccttctggaccttggccttcgggggtgtcttcatgatgctctccttatacggggtgaaccaggctcaggtgcagcggtacctcagttcccgcacggagaaggctgctgtgctctcctgttatgcagtgttccccttccagcaggtgtccctctgcgtgggctgcctcattggcctggtcatgttcgcgtattaccaggagtatcccatgagcattcagcaggctcaggcagccccagaccagttcgtcctgtactttgtgatggatctcctgaagggcctgccaggcctgccagggctcttcattgcctgcctcttcagcggctctctcagcactatatcctctgcttttaattcattggcaactgttacgatggaagacctgattcgaccttggttccctgagttctctgaagcccgggccatcatgctttccagaggccttgcctttggctatgggctgctttgtctaggaatggcctatatttcctcccagatgggacctgtgctgcaggcagcaatcagcatctttggcatggttgggggaccgctgctgggactcttctgccttggaatgttctttccatgtgctaaccctcctggtgctgttgtgggcctgttggctgggctcgtcatggccttctggattggcatcgggagcatcgtgaccagcatgggcttcagcatgccaccctctccctctaatgggtccagcttctccctgcccaccaatctaaccgttgccactgtgaccacactgatgcccttgactaccttctccaagcccacagggctgcagcggttctattccttgtcttacttatggtacagtgctcacaactccaccacagtgattgtggtgggcctgattgtcagtctactcactgggagaatgcgaggccggtccctgaaccctgcaaccatttacccagtgttgccaaagctcctgtccctccttccgttgtcctgtcagaagcggctccactgcaggagctacggccaggaccacctcgacactggcctgtttcctgagaagccgaggaatggtgtgctgggggacagcagagacaaggaggccatggccctggatggcacagcctatcaggggagcagctccacctgcatcctccaggagacctccctgtgatgttgactcaggaccccgcctctgtcctcactgtgccaggccatagccagaggccaccctgtagtacagggatgagtcttggtgtgttctgcagggacaggcctggatgatctagctcataccaaaggaccttgttctgagaggttcttgcctgcaggagaagctgtcacatctcaagcatgtgaggcaccgtttttctcgtcgcttgccaatctgttttttaaaggatcaggctcgtagggagcaggatcatgccagaaatagggatggaagtgcatcctctgggaaaaagataatggcttctgattcaacatagccatagtcctttgaagtaagtggctagaaacagcactctggttataattgccccagggcctgattcaggactgactctccaccataaaactggaagctgcttcccctgtagtccccatttcagtaccagttctgccagccacagtgagcccctattattactttcagattgtctgtgacactcaagcccctctcatttttatctgtctacctccattctgaagagggaggttttggtgtccctggtcctctgggaatagaagatccatttgtctttgtgtagagcaagcacgttttccacctcactgtctccatcctccacctctgagatggacacttaagagacggggcaaatgtggatccaagaaaccagggccatgaccaggtccactgtggagcagccatctatctacctgactcctgagccaggctgccgtggtgtcatttctgtcatccgtgctctgtttccttttggagtttcttctccacattatctttgttcctggggaataaaaactaccattggacctagaa

SEQ ID NO: 370999 - DNA, 3083 bp, Homo sapiens
atatcgcacagggaaggtcctcatctctgaagatcactattcgaacttatttattatgctttctgcagagacttctcaatctgacagccctagtttggcgcggtgtaaaacgaccgcaggaaaagggagcgatgttgatctcaggaagcacaaagggaccttcctagctctgactgaaccacggagctcaccctggacagtatcactccgtggaggaagactgtgagactgtggctggaagccagattgtagccacacatccgcccctgccctaccccagagccctggagcagcaactggctgcagatcacagacacagtgaggatatgagtgtaggggtgagcacctcagcccctctttccccaacctcgggcacaagcgtgggcatgtctaccttctccatcatggactatgtggtgttcgtcctgctgctggttctctctcttgccattgggctctaccatgcttgtcgtggctggggccggcatactgttggtgagctgctgatggcggaccgcaaaatgggctgccttccggtggcactgtccctgctggccaccttccagtcagccgtggccatcctgggtgtgccgtcagagatctaccgatttgggacccaatattggttcctgggctgctgctactttctggggctgctgatacctgcacacatcttcatccccgttttctaccgcctgcatctcaccagtgcctatgagtacctggagcttcgattcaataaaactgtgcgagtgtgtggaactgtgaccttcatctttcagatggtgatctacatgggagttgtgctctatgctccgtcattggctctcaatgcagtgactggctttgatctgtggctgtccgtgctggccctgggcattgtctgtaccgtctatacagctctgggtgggctgaaggccgtcatctggacagatgtgttccagacactggtcatgttcctcgggcagctggcagttatcatcgtggggtcagccaaggtgggcggcttggggcgtgtgtgggccgtggcttcccagcacggccgcatctctgggtttgagctggatccagacccctttgtgcggcacaccttctggaccttggccttcgggggtgtcttcatgatgctctccttatacggggtgaaccaggctcaggtgcagcggtacctcagttcccgcacggagaaggctgctgtgctctcctgttatgcagtgttccccttccagcaggtgtccctctgcgtgggctgcctcattggcctggtcatgttcgcgtattaccaggagtatcccatgagcattcagcaggctcaggcagccccagaccagttcgtcctgtactttgtgatggatctcctgaagggcctgccaggcctgccagggctcttcattgcctgcctcttcagcggctctctcagcactatatcctctgcttttaattcattggcaactgttacgatggaagacctgattcgaccttggttccctgagttctctgaagcccgggccatcatgctttccagaggccttgcctttggctatgggctgctttgtctaggaatggcctatatttcctcccagatgggacctgtgctgcaggcagcaatcagcatctttggcatggttgggggaccgctgctgggactcttctgccttggaatgttctttccatgtgctaaccctcctggtgctgttgtgggcctgttggctgggctcgtcatggccttctggattggcatcgggagcatcgtgaccagcatgggcttcagcatgccaccctctccctctaatgggtccagcttctccctgcccaccaatctaaccgttgccactgtgaccacactgatgcccttgactaccttctccaagcccacagggctgcagcggttctattccttgtcttacttatggtacagtgctcacaactccaccacagtgattgtggtgggcctgattgtcagtctactcactgggagaatgcgaggccggtccctgaaccctgcaaccatttacccagtgttgccaaagctcctgtccctccttccgttgtcctgtcagaagcggctccactgcaggagctacggccaggaccacctcgacactggcctgtttcctgagaagccgaggaatggtgtgctgggggacagcagagacaaggaggccatggccctggatggcacagcctatcaggggagcagctccacctgcatcctccaggagacctccctgtgatgttgactcaggaccccgcctctgtcctcactgtgccaggccatagccagaggccaccctgtagtacagggatgagtcttggtgtgttctgcagggacaggcctggatgatctagctcataccaaaggaccttgttctgagaggttcttgcctgcaggagaagctgtcacatctcaagcatgtgaggcaccgtttttctcgtcgcttgccaatctgttttttaaaggatcaggctcgtagggagcaggatcatgccagaaatagggatggaagtgcatcctctgggaaaaagataatggcttctgattcaacatagccatagtcctttgaagtaagtggctagaaacagcactctggttataattgccccagggcctgattcaggactgactctccaccataaaactggaagctgcttcccctgtagtccccatttcagtaccagttctgccagccacagtgagcccctattattactttcagattgtctgtgacactcaagcccctctcatttttatctgtctacctccattctgaagagggaggttttggtgtccctggtcctctgggaatagaagatccatttgtctttgtgtagagcaagcacgttttccacctcactgtctccatcctccacctctgagatggacacttaagagacggggcaaatgtggatccaagaaaccagggccatgaccaggtccactgtggagcagccatctatctacctgactcctgagccaggctgccgtggtgtcatttctgtcatccgtgctctgtttccttttggagtttcttctccacattatctttgttcctggggaataaaaactaccattggacctagaa

SEQ ID NO: 371000 - DNA, 3195 bp, Homo sapiens
aggccctcttccccgggcgtggcctaagcggcccggtccagtcgccctggggctgcttgggggcttttcctgctcgtggagctctgcgctggtcttcatgcgccctagccctctttcggggatactggccgaccccctcttccttttcccctttagtgaaggcctcccccgtcgccgcgcggcttcccggagccgactgcagactccctcagcccggtgttccccgcgtccggacgccgaggtcgcggcttcgcagaaactcgggcccctccatccgccctcagaaaagggagcgatgttgatctcaggaagcacaaagggaccttcctagctctgactgaaccacggagctcaccctggacagtatcactccgtggaggaagactgtgagactgtggctggaagccagattgtagccacacatccgcccctgccctaccccagagccctggagcagcaactggctgcagatcacagacacagtgaggatatgagtgtaggggtgagcacctcagcccctctttccccaacctcgggcacaagcgtgggcatgtctaccttctccatcatggactatgtggtgttcgtcctgctgctggttctctctcttgccattgggctctaccatgcttgtcgtggctggggccggcatactgttggtgagctgctgatggcggaccgcaaaatgggctgccttccggtggcactgtccctgctggccaccttccagtcagccgtggccatcctgggtgtgccgtcagagatctaccgatttgggacccaatattggttcctgggctgctgctactttctggggctgctgatacctgcacacatcttcatccccgttttctaccgcctgcatctcaccagtgcctatgagtacctggagcttcgattcaataaaactgtgcgagtgtgtggaactgtgaccttcatctttcagatgtgactggctttgatctgtggctgtccgtgctggccctgggcattgtctgtaccgtctatacagctctgggtgggctgaaggccgtcatctggacagatgtgttccagacactggtcatgttcctcgggcagctggcagttatcatcgtggggtcagccaaggtgggcggcttggggcgtgtgtgggccgtggcttcccagcacggccgcatctctgggtttgagctggatccagacccctttgtgcggcacaccttctggaccttggccttcgggggtgtcttcatgatgctctccttatacggggtgaaccaggctcaggtgcagcggtacctcagttcccgcacggagaaggctgctgtgctctcctgttatgcagtgttccccttccagcaggtgtccctctgcgtgggctgcctcattggcctggtcatgttcgcgtattaccaggagtatcccatgagcattcagcaggctcaggcagccccagaccagttcgtcctgtactttgtgatggatctcctgaagggcctgccaggcctgccagggctcttcattgcctgcctcttcagcggctctctcagcactatatcctctgcttttaattcattggcaactgttacgatggaagacctgattcgaccttggttccctgagttctctgaagcccgggccatcatgctttccagaggccttgcctttggctatgggctgctttgtctaggaatggcctatatttcctcccagatgggacctgtgctgcaggcagcaatcagcatctttggcatggttgggggaccgctgctgggactcttctgccttggaatgttctttccatgtgctaaccctcctggtgctgttgtgggcctgttggctgggctcgtcatggccttctggattggcatcgggagcatcgtgaccagcatgggcttcagcatgccaccctctccctctaatgggtccagcttctccctgcccaccaatctaaccgttgccactgtgaccacactgatgcccttgactaccttctccaagcccacagggctgcagcggttctattccttgtcttacttatggtacagtgctcacaactccaccacagtgattgtggtgggcctgattgtcagtctactcactgggagaatgcgaggccggtccctgaaccctgcaaccatttacccagtgttgccaaagctcctgtccctccttccgttgtcctgtcagaagcggctccactgcaggagctacggccaggaccacctcgacactggcctgtttcctgagaagccgaggaatggtgtgctgggggacagcagagacaaggaggccatggccctggatggcacagcctatcaggggagcagctccacctgcatcctccaggagacctccctgtgatgttgactcaggaccccgcctctgtcctcactgtgccaggccatagccagaggccaccctgtagtacagggatgagtcttggtgtgttctgcagggacaggcctggatgatctagctcataccaaaggaccttgttctgagaggttcttgcctgcaggagaagctgtcacatctcaagcatgtgaggcaccgtttttctcgtcgcttgccaatctgttttttaaaggatcaggctcgtagggagcaggatcatgccagaaatagggatggaagtgcatcctctgggaaaaagataatggcttctgattcaacatagccatagtcctttgaagtaagtggctagaaacagcactctggttataattgccccagggcctgattcaggactgactctccaccataaaactggaagctgcttcccctgtagtccccatttcagtaccagttctgccagccacagtgagcccctattattactttcagattgtctgtgacactcaagcccctctcatttttatctgtctacctccattctgaagagggaggttttggtgtccctggtcctctgggaatagaagatccatttgtctttgtgtagagcaagcacgttttccacctcactgtctccatcctccacctctgagatggacacttaagagacggggcaaatgtggatccaagaaaccagggccatgaccaggtccactgtggagcagccatctatctacctgactcctgagccaggctgccgtggtgtcatttctgtcatccgtgctctgtttccttttggagtttcttctccacattatctttgttcctggggaataaaaactaccattggacctagaa

SEQ ID NO: 371001 - DNA, 3001 bp, Homo sapiens
aggccctcttccccgggcgtggcctaagcggcccggtccagtcgccctggggctgcttgggggcttttcctgctcgtggagctctgcgctggtcttcatgcgccctagccctctttcggggatactggccgaccccctcttccttttcccctttagtgaaggcctcccccgtcgccgcgcggcttcccggagccgactgcagactccctcagcccggtgttccccgcgtccggacgccgaggtcgcggcttcgcagaaactcgggcccctccatccgccctcagaaaagggagcgatgttgatctcaggaagcacaaagggaccttcctagctctgactgaaccacggagctcaccctggacagtatcactccgtggaggaagactgtgagactgtggctggaagccagattgtagccacacatccgcccctgccctaccccagagccctggagcagcaactggctgcagatcacagacacagtgaggatatgagtgtaggggtgagcacctcagcccctctttccccaacctcgggcacaagcgtgggcatgtctaccttctccatcatggactatgtggtgttcgtcctgctgctggttctctctcttgccattgggctctaccatgcttgtcgtggctggggccggcatactgttggtgagctgctgatggcggaccgcaaaatgggctgccttccggtggcactgtccctgctggccaccttccagtcagccgtggccatcctgggtgtgccgtcagagatctaccgatttgggacccaatattggttcctgggctgctgctactttctggggctgctgatacctgcacacatcttcatccccgttttctaccgcctgcatctcaccagtgcctatgagtacctggagcttcgattcaataaaactgtgcgagtgtgtggaactgtgaccttcatctttcagatggtgatctacatgggagttgtgctctatgctccgtcattggctctcaatgcagtgactggctttgatctgtggctgtccgtgctggccctgggcattgtctgtaccgtctatacagctctgggtgggctgaaggccgtcatctggacagatgtgttccagacactggtcatgttcctcgggcagctggcagttatcatcgtggggtcagccaaggtgggcggcttggggcgtgtgtgggccgtggcttcccagcacggccgcatctctgggtttgagctggatccagacccctttgtgcggcacaccttctggaccttggccttcgggggtgtcttcatgatgctctccttatacggggtgaaccaggctcaggtgcagcggtacctcagttcccgcacggagaaggctgctgtgctctcctgttatgcagtgttccccttccagcaggtgtccctctgcgtgggctgcctcattggcctggtcatgttcgcgtattaccaggagtatcccatgagcattcagcaggctcaggcagccccagaccagttcgtcctgtactttgtgatggatctcctgaagggcctgccaggcctgccagggctcttcattgcctgcctcttcagcggctctctcagcactatatcctctgcttttaattcattggcaactgttacgatggaagacctgattcgaccttggttccctgagttctctgaagcccgggccatcatgctttccagaggccttgcctttggctatgggctgctttgtctaggaatggcctatatttcctcccagatgggacctgtgctgcaggcagcaatcagcatctttggcatggttgggggaccgctgctgggactcttctgccttggaatgttctttccatgtgctaaccctcctggtgctgttgtgggcctgttggctgggctcgtcatggccttctggattggcatcgggagcatcgtgaccagcatgggcttcagcatgccaccctctccctctaatgggtccagcttctccctgcccaccaatctaaccgttgccactgtgaccacactgatgcccttgactaccttctccaagcccacagggctgcagcggttctattccttgtcttacttatggtacagtgctcacaactccaccacagtgattgtggtgggcctgattgtcagtctactcactgggagaatgcgaggccggtccctgaaccctgcaaccatttacccagtgttgccaaagctcctgtccctccttccgttgtcctgtcagaagcggctccactgcaggagctacggccaggaccacctcgacactggcctgtttcctgagaagccgaggaatggtgtgctgggggacagcagagacaaggaggccatggccctggatggcacagcctatcaggggagcagctccacctgcatcctccaggagacctccctgtgatgttgactcaggaccccgcctctgtcctcactgtgccaggccatagccagaggccaccctgtagtacagggatgagtcttggtgtgttctgcagggacaggcctggatgatctagctcataccaaaggaccttgttctgagaggttcttgcctgcaggagaagctgtcacatctcaagcatgtgaggcaccgtttttctcgtcgcttgccaatctgttttttaaaggatcaggctcgtagggagcaggatcatgccagaaatagggatggaagtgcatcctctgggaaaaagataatggcttctgattcaacatagccatagtcctttgaagtaagtggctagaaacagcactctggttataattgccccagggcctgattcaggactgactctccaccataaaactggaagctgcttcccctgtagtccccatttcagtaccagttctgccaggtccactgtggagcagccatctatctacctgactcctgagccaggctgccgtggtgtcatttctgtcatccgtgctctgtttccttttggagtttcttctccacattatctttgttcctggggaataaaaactaccattggacctagaa

SEQ ID NO: 371002 - DNA, 2940 bp, Homo sapiens
  misc_feature (2877)..(2877): n is a, c, g, or t
  misc_feature (2884)..(2884): n is a, c, g, or t
aggccctcttccccgggcgtggcctaagcggcccggtccagtcgccctggggctgcttgggggcttttcctgctcgtggagctctgcgctggtcttcatgcgccctagccctctttcggggatactggccgaccccctcttccttttcccctttagtgaaggcctcccccgtcgccgcgcggcttcccggagccgactgcagactccctcagcccggtgttccccgcgtccggacgccgaggtcgcggcttcgcagaaactcgggcccctccatccgccctcagaaaagggagcgatgttgatctcaggaagcacaaagggaccttcctagctctgactgaaccacggagctcaccctggacagtatcactccgtggaggaagactgtgagactgtggctggaagccagattgtagccacacatccgcccctgccctaccccagagccctggagcagcaactggctgcagatcacagacacagtgaggatatgagtgtaggggtgagcacctcagcccctctttccccaacctcgggcacaagcgtgggcatgtctaccttctccatcatggactatgtggtgttcgtcctgctgctggttctctctcttgccattgggctctaccatgcttgtcgtggctggggccggcatactgttggtgagctgctgatggcggaccgcaaaatgggctgccttccggtggcactgtccctgctggccaccttccagtcagccgtggccatcctgggtgtgccgtcagagatctaccgatttgggacccaatattggttcctgggctgctgctactttctggggctgctgatacctgcacacatcttcatccccgttttctaccgcctgcatctcaccagtgcctatgagtacctggagcttcgattcaataaaactgtgcgagtgtgtggaactgtgaccttcatctttcagatggtgatctacatgggagttgtgctctatgctccgtcattggctctcaatgcagtgactggctttgatctgtggctgtccgtgctggccctgggcattgtctgtaccgtctatacagctctgggtgggctgaaggccgtcatctggacagatgtgttccagacactggtcatgttcctcgggcagctggcagttatcatcgtggggtcagccaaggtgggcggcttggggcgtgtgtgggccgtggcttcccagcacggccgcatctctgggtttgagctggatccagacccctttgtgcggcacaccttctggaccttggccttcgggggtgtcttcatgatgctctccttatacggggtgaaccaggctcaggtgcagcggtacctcagttcccgcacggagaaggctgctgtgctctcctgttatgcagtgttccccttccagcaggtgtccctctgcgtgggctgcctcattggcctggtcatgttcgcgtattaccaggagtatcccatgagcattcagcaggctcaggcagccccagaccagttcgtcctgtactttgtgatggatctcctgaagggcctgccaggcctgccagggctcttcattgcctgcctcttcagcggctctctcagcactatatcctctgcttttaattcattggcaactgttacgatggaagacctgattcgaccttggttccctgagttctctgaagcccgggccatcatgctttccagaggccttgcctttggctatgggctgctttgtctaggaatggcctatatttcctcccagatgggacctgtgctgcaggcagcaatcagcatctttggcatggttgggggaccgctgctgggactcttctgccttggaatgttctttccatgtgctaaccctcctggtgctgttgtgggcctgttggctgggctcgtcatggccttctggattggcatcgggagcatcgtgaccagcatgggcttcagcatgccaccctctccctctaatgggtccagcttctccctgcccaccaatctaaccgttgccactgtgaccacactgatgcccttgactaccttctccaagcccacagggctgcagcggttctattccttgtcttacttatggtacagtgctcacaactccaccacagtgattgtggtgggcctgattgtcagtctactcactgggagaatgcgaggccggtccctgaaccctgcaaccatttacccagtgttgccaaagctcctgtccctccttccgttgtcctgtcagaagcggctccactgcaggagctacggccaggaccacctcgacactggcctgtttcctgagaagccgaggaatggtgtgctgggggacagcagagacaaggaggccatggccctggatggcacagcctatcaggggagcagctccacctgcatcctccaggagacctccctgtgatgttgactcaggaccccgcctctgtcctcactgtgccaggccatagccagaggccaccctgtagtacagggatgagtcttggtgtgttctgcagggacaggcctggatgatctagctcataccaaaggaccttgttctgagaggttcttgcctgcaggagaagctgtcacatctcaagcatgtgaggcaccgtttttctcgtcgcttgccaatctgttttttaaaggatcaggctcgtagggagcaggatcatgccagaaatagggatggaagtgcatcctctgggaaaaagataatggcttctgattcaacatagccatagtcctttgaagtaagtggctagaaacagcactctggttataattgccccagggcctgattcaggactgactctccaccataaaactggaagctgcttcccctgtagtccccatttcagtaccagttctgccagccacagtgagcccctattatttatntaacctnttccagcaattgggctcttggttggaacacctccaaaggcccccttcctcaaaatt

SEQ ID NO: 371003 - DNA, 425 bp, Homo sapiens
tcctcggcgttctgaggatccccccttcccccacagtgagcccctattattactttcagattgtctgtgacactcaagcccctctcatttttatctgtctacctccattctgaagagggaggttttggtgtccctggtcctctgggaatagaagatccatttgtctttgtgtagagcaagcacgttttccacctcactgtctccatcctccacctctgagatggacacttaagagacggggcaaatgtggatccaagaaaccagggccatgaccaggtccactgtggagcagccatctatctacctgactcctgagccaggctgccgtggtgtcatttctgtcatccgtgctctgtttccttttggagtttcttctccacattatctttgttcctggggaataaaaactaccattggacctagaa

SEQ ID NO: 371004 - DNA, 1075 bp, Homo sapiens
aggccctcttccccgggcgtggcctaagcggcccggtccagtcgccctggggctgcttgggggcttttcctgctcgtggagctctgcgctggtcttcatgcgccctagccctctttcggggatactggccgaccccctcttccttttcccctttagtgaaggcctcccccgtcgccgcgcggcttcccggagccgactgcagactccctcagcccggtgttccccgcgtccggacgccgaggtcgcggcttcgcagaaactcgggcccctccatccgccctcagaaaagggagcgatgttgatctcaggaagcacaaagggaccttcctagctctgactgaaccacggagctcaccctggacagtatcactccgtggaggaagactgtgagactgtggctggaagccagattgtagccacacatccgcccctgccctaccccagagccctggagcagcaactggctgcagatcacagacacagtgaggatatgagtgtaggggtgagcacctcagcccctctttccccaacctcgggcacaagcgtgggcatgtctaccttctccatcatggactatgtggtgttcgtcctgctgctggttctctctcttgccattgggctctaccatgcttgtcgtggctggggccggcatactgttggtgagctgctgatggcggaccgcaaaatgggctgccttccggtggcactgtccctgctggccaccttccagtcagccgtggccatcctgggtgtgccgtcagagatctaccgatttgggacccaatattggttcctgggctgctgctactttctggggctgctgatacctgcacacatcttcatccccgttttctaccgcctgcatctcaccagtgcctatgagtacctggagcttcgattcaataaaactgtgcgagtgtgtggaactgtgaccttcatctttcagatgtctacctgactcctgagccaggctgccgtggtgtcatttctgtcatccgtgctctgtttccttttggagtttcttctccacattatctttgttcctggggaataaaaactaccattggacctagaa

SEQ ID NO: 371005 - DNA, 260 bp, Homo sapiens
ggcaggaaggctgtgtctctcaggctttgcacaatgactgggtggtgtctgttacaggctggatccagacccctttgtgcggcacaccttctggaccttggccttcgggggtgtcttcatgatgctctccttatacggggtgaaccaggctcaggtgcagcggtacctcagttcccgcacggagaaggctgctgtgctgtgagtgcagggacaggaagggagtggagcaaggtctaggggaaggggttccccagagataa

SEQ ID NO: 371006 - DNA, 395 bp, Homo sapiens
cctgtagtccccatttcagtaccagttctgccagccacagtgagcccctattattactttcagattgtctgtgacactcaagcccctctcatttttatctgtctacctccattctgaagagggaggttttggtgtccctggtcctctgggaatagaagatccatttgtctttgtgtagagcaagcacgttttccacctcactgtctccatcctccacctctgagatggacacttaagagacggggcaaatgtggatccaagaaaccagggccatgaccaggtccactgtggagcagccatctatctacctgactcctgagccaggctgccgtggtgtcatttctgtcatccgtgctctgtttccttttggagtttcttctccacattatctttgt

SEQ ID NO: 371007 - DNA, 634 bp, Homo sapiens
tggtccacctcaattgacagctagtaacatgttaccatgccctatctgaactggttagtcaatatcttttggtggagctctgcaaacatttttctccgttgtggtgaatgatttatttcattgttaatgaccaatgctttatctctgtggcatgacgtgattgccctaccagggcttctcccctggggaacccttttccagggataagaatgtggcttctatgcttacagtgactggctttgatctgtggctgtccgtgctggccctgggcattgtctgtaccgtctatacagctctgggtgggctgaaggccgtcatctggacagatgtgttccagacactggtcatgttcctcgggcagctggcagttatcatcgtggggtcagccaaggtgggcggcttggggcgtgtgtgggccgtggcttcccagcacggccgcatctctgggtttgagtaagtatacccctactcctggctggggtctgcagtgcctgggcgctgagcccatcctagaggctggtcttggctatagtaagcagaaggtaaactgggaagcctgaggtgtaacagcagacagtgggaaactggtcctgcagagatggagggtgattacaggtgcccggctagtgtttat

SEQ ID NO: 371008 - DNA, 4187 bp, Homo sapiens
aggccctcttccccgggcgtggcctaagcggcccggtccagtcgccctggggctgcttgggggcttttcctgctcgtggagctctgcgctggtcttcatgcgccctagccctctttcggggatactggccgaccccctcttccttttcccctttagtgaaggcctcccccgtcgccgcgcggcttcccggagccgactgcagactccctcagcccggtgttccccgcgtccggacgccgaggtcgcggcttcgcagaaactcgggcccctccatccgccctcagaaaagggagcgatgttgatctcaggaagcacaaagggaccttcctagctctgactgaaccacggagctcaccctggacagtatcactccgtggaggaagactgtgagactgtggctggaagccagattgtagccacacatccgcccctgccctaccccagagccctggagcagcaactggctgcagatcacagacacagtgaggatatgagtgtaggggtgagcacctcagcccctctttccccaacctcgggcacaagcgtgggcatgtctaccttctccatcatggactatgtggtgttcgtcctgctgctggttctctctcttgccattgggctctaccatgcttgtcgtggctggggccggcatactgttggtgagctgctgatggcggaccgcaaaatgggctgccttccggtggcactgtccctgctggccaccttccagtcagccgtggccatcctgggtgtgccgtcagagatctaccgatttgggacccaatattggttcctgggctgctgctactttctggggctgctgatacctgcacacatcttcatccccgttttctaccgcctgcatctcaccagtgcctatgagtacctggagcttcgattcaataaaactgtgcgagtgtgtggaactgtgaccttcatctttcagatggtgatctacatgggagttgtgctctatgctccgtcattggctctcaatgcagtgactggctttgatctgtggctgtccgtgctggccctgggcattgtctgtaccgtctatacagctctgggtgggctgaaggccgtcatctggacagatgtgttccagacactggtcatgttcctcgggcagctggcagttatcatcgtggggtcagccaaggtgggcggcttggggcgtgtgtgggccgtggcttcccagcacggccgcatctctgggtttgagctggatccagacccctttgtgcggcacaccttctggaccttggccttcgggggtgtcttcatgatgctctccttatacggggtgaaccaggctcaggtgcagcggtacctcagttcccgcacggagaaggctgctgtgctctcctgttatgcagtgttccccttccagcaggtgtccctctgcgtgggctgcctcattggcctggtcatgttcgcgtattaccaggagtatcccatgagcattcagcaggctcaggcagccccagaccagttcgtcctgtactttgtgatggatctcctgaagggcctgccaggcctgccagggctcttcattgcctgcctcttcagcggctctctcagcactatatcctctgcttttaattcattggcaactgttacgatggaagacctgattcgaccttggttccctgagttctctgaagcccgggccatcatgctttccagaggccttggtggggttatgcttcctcatctcttcagtctgggtctttctaagcttcatcctgaccattgtcatcagtttgctgtaaaacacccactttatccggggctcagcacttgcctaatgaagcacacaaccttccctgcatgcatggttgtttccatctcagggcatgtcctagggaggtctctgagtcacataggagtgaggacttggtgggaggaagctggggcgtgatgtaatatgccttttgtttccagagagacagaggtggtagtttggctgggcagggagccttgctttaccccattgcttgtgttaactcacaccttcttgtttcctctcctgtccttttcccccagcctttggctatgggctgctttgtctaggaatggcctatatttcctcccagatgggacctgtgctgcaggcagcaatcagcatctttggcatggttgggggaccgctgctgggactcttctgccttggaatgttctttccatgtgctaaccctcctgtgagtgatgcatctggatccacagtcatgtgtagcaggatggacctgggggttggcagggctgtcaccaggagagctgaggactgccgtgagggctggcaggactggccttgtgacaggcctgcactgtgtctcggcagggtgctgttgtgggcctgttggctgggctcgtcatggccttctggattggcatcgggagcatcgtgaccagcatgggcttcagcatgccaccctctccctctaatgggtccagcttctccctgcccaccaatctaaccgttgccactgtgaccacactgatgcccttgactaccttctccaagtaaggcagggcttgctatcttcttgttttctcaaagtcctcctttgagggctttcacaggggtcttgctaagggatgggccaccagaggccccagggaaatgttgggtattgggtcccaagaccctgggaccatgcgggcaagtagagattggtgcccaaggaatgccctgccaacgaattgctaattgttctcacctctgctcttcccaggcccacagggctgcagcggttctattccttgtcttacttatggtacagtgctcacaactccaccacagtgattgtggtgggcctgattgtcagtctactcactggtaagggtgtgggattgcggtgcagatgagcaccgaggggttaacagagggccctaagggactctagggagaaaggctcctgccctctgagctcttgggtgtccgtagctgtcaggcttttctgctgggatgtaggaggtgggtgggggctggggtctctgggggccaagggaggacatggggcccgctgctgtggatggttccacccagagactcagaagcacatttccattcagggagaatgcgaggccggtccctgaaccctgcaaccatttacccagtgttgccaaagctcctgtccctccttccgttgtcctgtcagaagcggctccactgcaggagctacggccaggaccacctcgacactggcctgtttcctgagaagccgaggaatggtgtgctgggggacagcagagacaaggaggccatggccctggatggcacagcctatcaggggagcagctccacctgcatcctccaggagacctccctgtgatgttgactcaggaccccgcctctgtcctcactgtgccaggccatagccagaggccaccctgtagtacagggatgagtcttggtgtgttctgcagggacaggcctggatgatctagctcataccaaaggaccttgttctgagaggttcttgcctgcaggagaagctgtcacatctcaagcatgtgaggcaccgtttttctcgtcgcttgccaatctgttttttaaaggatcaggctcgtagggagcaggatcatgccagaaatagggatggaagtgcatcctctgggaaaaagataatggcttctgattcaacatagccatagtcctttgaagtaagtggctagaaacagcactctggttataattgccccagggcctgattcaggactgactctccaccataaaactggaagctgcttcccctgtagtccccatttcagtaccagttctgccagccacagtgagcccctattattactttcagattgtctgtgacactcaagcccctctcatttttatctgtctacctccattctgaagagggaggttttggtgtccctggtcctctgggaatagaagatccatttgtctttgtgtagagcaagcacgttttccacctcactgtctccatcctccacctctgagatggacacttaagagacggggcaaatgtggatccaagaaaccagggccatgaccaggtccactgtggagcagccatctatctacctgactcctgagccaggctgccgtggtgtcatttctgtcatccgtgctctgtttccttttggagtttcttctccacattatctttgttcctggggaataaaaactaccattggacctagaa

SEQ ID NO: 371009 - DNA, 3047 bp, Homo sapiens
aggccctcttccccgggcgtggcctaagcggcccggtccagtcgccctggggctgcttgggggcttttcctgctcgtggagctctgcgctggtcttcatgcgccctagccctctttcggggatactggccgaccccctcttccttttcccctttagtgaaggcctcccccgtcgccgcgcggcttcccggagccgactgcagactccctcagcccggtgttccccgcgtccggacgccgaggtcgcggcttcgcagaaactcgggcccctccatccgccctcagaaaagggagcgatgttgatctcaggaagcacaaagggaccttcctagctctgactgaaccacggagctcaccctggacagtatcactccgtggaggaagactgtgagactgtggctggaagccagattgtagccacacatccgcccctgccctaccccagagccctggagcagcaactggctgcagatcacagacacagtgaggatatgagtgtaggggtgagcacctcagcccctctttccccaacctcgggcacaagcgtgggcatgtctaccttctccatcatggactatgtggtgttcgtcctgctgctggttctctctcttgccattgggctctaccatgcttgtcgtggctggggccggcatactgttggtgagctgctgatggcggaccgcaaaatgggctgccttccggtggcactgtccctgctggccaccttccagtcagccgtggccatcctgggtgtgccgtcagagatctaccgatttgggacccaatattggttcctgggctgctgctactttctggggctgctgatacctgcacacatcttcatccccgttttctaccgcctgcatctcaccagtgcctatgagtacctggagcttcgattcaataaaactgtgcgagtgtgtggaactgtgaccttcatctttcagatggtgatctacatgggagttgtgctctatgctccgtcattggctctcaatgcagtgactggctttgatctgtggctgtccgtgctggccctgggcattgtctgtaccgtctatacagctctgggtgggctgaaggccgtcatctggacagatgtgttccagacactggtcatgttcctcgggcagctggcagttatcatcgtggggtcagccaaggtgggcggcttggggcgtgtgtgggccgtggcttcccagcacggccgcatctctgggtttgagctggatccagacccctttgtgcggcacaccttctggaccttggccttcgggggtgtcttcatgatgctctccttatacggggtgaaccaggctcaggtgcagcggtacctcagttcccgcacggagaaggctgctgtgctctcctgttatgcagtgttccccttccagcaggtgtccctctgcgtgggctgcctcattggcctggtcatgttcgcgtattaccaggagtatcccatgagcattcagcaggctcaggcagccccagaccagttcgtcctgtactttgtgatggatctcctgaagggcctgccaggcctgccagggctcttcattgcctgcctcttcagcggctctctcagcactatatcctctgcttttaattcattggcaactgttacgatggaagacctgattcgaccttggttccctgagttctctgaagcccgggccatcatgctttccagaggccttgcctttggctatgggctgctttgtctaggaatggcctatatttcctcccagatgggacctgtgctgcaggcagcaatcagcatctttggcatggttgggggaccgctgctgggactcttctgccttggaatgttctttccatgtgctaaccctcctggtgctgttgtgggcctgttggctgggctcgtcatggccttctggattggcatcgggagcatcgtgaccagcatgggcttcagcatgccaccctctccctctaatgggtccagcttctccctgcccaccaatctaaccgttgccactgtgaccacactgatgcccttgactaccttctccaagcccacagggctgcagcggttctattccttgtcttacttatggtacagtgctcacaactccaccacagtgattgtggtgggcctgattgtcagtctactcactgggagaatgcgaggccggtccctgaaccctgcaaccatttacccagtgttgccaaagctcctgtccctccttccgttgtcctgtcagaagcggctccactgcaggagctacggccaggaccacctcgacactggcctgtttcctgagaagccgaggaatggtgtgctgggggacagcagagacaaggaggccatggccctggatggcacagcctatcaggggagcagctccacctgcatcctccaggagacctccctgtgatgttgactcaggaccccgcctctgtcctcactgtgccaggccatagccagaggccaccctgtagtacagggatgagtcttggtgtgttctgcagggacaggcctggatgatctagctcataccaaaggaccttgttctgagaggttcttgcctgcaggagaagctgtcacatctcaagcatgtgaggcaccgtttttctcgtcgcttgccaatctgttttttaaaggatcaggctcgtagggagcaggatcatgccagaaatagggatggaagtgcatcctctgggaaaaagataatggcttctgattcaacatagccatagtcctttgaagtaagtggctagaaacagcactctggttataattgccccagggcctgattcaggactgactctccaccataaaactggaagctgcttcccctgtagtccccatttcagtaccagttctgccagccacagtgagcccctattattactttcagattgtctgtgacactcaagcccctctcatttttatctgtctacctccattctgaagagggaggttttggtgtccctggtcctctgggaatagaagatccatttgtctttgtgtagagcaagcacgttttccacctcacagtgggggaaggggggatcctcagtagc

SEQ ID NO: 371010 - DNA, 483 bp, Homo sapiens
cctgcaaccatttacccagtgttgccaaagctcctgtccctccttccgttgtcctgtcagaagcggctccactgcaggagctacggccaggtagtacctgctgtccaagtgacccctccctgcccttctccacagatgccactgactcttcaggttcccttctaccccttttctctccccctgccccgggtgcctctctcaggatcagctaagcctaggctgtcccacacggctgtctcaggttctacccacaggactgcactggcttggtgggcagaaggatctcagggctcagaggagctcagccccagcctgggccagtcagctcccctccccagcccaccctgtgctccctgctgtgctatgccctccctcttttccccctgctctccctcccgaacccagccttgctgggctcccttctggcggggaccttttttgtgtgaatcctgtcaagcacccgtcatccgtcttcaccagttc

SEQ ID NO: 371011 - DNA, 918 bp, Homo sapiens
atggagttttgcttttattgcccaggatggagtgtaatgatgcgatctcggctcactgcaccctctgcctcctggtttcaagcgattttcccgcctcagcctcctgagtagctgggattacaggtgcatgccaccacgcctggctaattttgtatttttagtaaagacgcggtttctccatgttggccaggctggtctcaaactcctgacctcaggtgatctgcccacctcggcctcccaaagtgctgggattacaggcgtgagccactgtgcccggccaggtctgtgaggttttaaaccacctgtctgtggcactttgttacggaacccgagctgagtggtacagggaggaaggccctgtggttcagcgcattttacagctgaggaaactgaggctgcagtctccatctgtgtgtcctttggttgcttgtatgagtgaggtggcaggtttgggaatgaaaccacgcctgcggtgccggggctcccaccggtaacctcccgtttttggcctcggggctccggcaggaaggagtcccaaggcttagatggaggtgcggagggcgtgtgagtgtcctggagctgctgtaacaatgtactgcaaacccagtggcttacaccctcagacgtgcattccctcacggttccggaagccggcagtctgaatcgcggtgtccctgtggctgtgacctgtgagacgggccataatcctcccagcctcttccacttccagcgggggcggcccaccctcaccttggagctgtgcctctccggtctttgcctctgtccacacatggccttctccccatgtgtctctgtctctgttttcccttcctataaggacaccagtcattggattaggggagatttgcgcacagaaacagacgtgctaactagggcatggtgagcgcatgcctgtgg

SEQ ID NO: 371012 - DNA, 493 bp, Homo sapiens
gatctgttgcaggctgggcgtggtggatcacgcctgtaatcccagcactttgggaggtcgaggcaggcggatcatgaggtcaggagttcaagaccagcctggctaacacagtgaaaccccgtcgctattaaaaatacaaaaaattagctgggcatggtggcaggcgcctgtaatcccagctactcaggaggctgaggcaggagaatcgcttgaacctgggaggcggaggttgcggtgagccgagatcgcgccactgcactccagcctcggcgacagagtgagactccgtctcaaaaaaaccaaaaaacaaaaaacagtcaatggcattaaatataaatacatttacagtgttgtgtaaccatcaccactatggatcccccagactttgtcatcatcttcaacctaagcgctccctattaaatagtaactccccacttttcccaggccttggcaaccaccattctaatccctgtctctatgaatttgactcctc

SEQ ID NO: 371013 - DNA, 720 bp, Homo sapiens
gttgatggtgacagcagcagtgaccgtagcagcctagaggtggccgaatgcttactctaatgggctggcccatccctgagtgtctagagttcccagcccgcttaaggaaggaaggaaaacacaggcagctctaagtgtacgacgagggaggtctcatcggcggtgaggaagcccaggcgggtccccttcccagctgaaaggggttcggaatttcactctgtcgccaggctggaatgcagtagggcaatctcggctcactgcaacctccacctcccgagttcaagtgatgctcctgcttcggcctcctgagtagctgggactacaggtgagtgccaccacatccagctaatttttgtatttttagtagagacagggtttcaccatgttggccaggctggtatcaatctcctgacctcgtgatccatctgtctcggcctcccaaagtgctgggattacaggcgtgagccaccgtgcccggccattgactaaggtcttaaaatagctcttcctgcctgtataatctccattatggcagggctcatataagaagatgacagttcatctgatgaggaagaaaacttactcctagttagattgggttgaattcttccctgtttccagcggtgtctgctcctggcacctcaggcacagtcaggggtaggaggtggtgatcagatacactcgctgtgagcagtgcaaggggaagcaggtgcccagagg

SEQ ID NO: 371014 - DNA, 344 bp, Homo sapiens
atcacaccaacaaccacgtgcgtgagcttgctgtgtgctcttgcttgggagcaagttacaggttcagcccaagaggagcggaccactccagggtgtaaataccaagggggcaccgctcctggctgtaacatgttttcaatatcccccctcttcggtggcacaggggctggccccatatacctgtgcctggctgatttttattcttttagttaaggctggttgatattaccttgtgtgtatataccacatgttgtttatccattgttgttgatggacatgtgggtggtttcaccttttggctattgtgaataaagctgctatgaacactgtgtacaaataagtta

SEQ ID NO: 371015 - DNA, 2348 bp, Homo sapiens
gttgatggtgacagcagcagtgaccgtagcagcctagaggtggccgaatgcttactctaatgggctggcccatccctgagtgtctagagttcccagcccgcttaaggaaggaaggaaaacacaggcagctctaagtgtacgacgagggaggtctcatcggcggtgaggaagcccaggcgggtccccttcccagctgaaaggggttcggaatttcactctgtcgccaggctggaatgcagtagggcaatctcggctcactgcaacctccacctcccgagttcaagtgatgctcctgcttcggcctcctgagtagctgggactacagggactatgtcaccggtggggcttgccccagcaaggccaccatccctgggaagacggtcatcgtgacgggcgccaacacaggcatcgggaagcagaccgccttggaactggccaggagaggaggcaacatcatcctggcctgccgagacatggagaagtgtgaggcggcagcaaaggacatccgcggggagaccctcaatcaccatgtcaacgcccggcacctggacttggcttccctcaagtctatccgagagtttgcagcaaagatcattgaagaggaggagcgagtggacattctaatcaacaacgcgggtgtgatgcggtgcccccactggaccaccgaggacggcttcgagatgcagtttggcgttaaccacctgggtcactttctcttgacaaacttgctgctggacaagctgaaagcctcagccccttcgcggatcatcaacctctcgtccctggcccatgttgctgggcacatagactttgacgacttgaactggcagacgaggaagtataacaccaaagccgcctactgccagagcaagctcgccatcgtcctcttcaccaaggagctgagccggcggctgcaaggctctggtgtgactgtcaacgccctgcaccccggcgtggccaggacagagctgggcagacacacgggcatccatggctccaccttctccagcaccacactcgggcccatcttctggctgctggtcaagagccccgagctggccgcccagcccagcacatacctggccgtggcggaggaactggcggatgtttccggaaagtacttcgatggactcaaacagaaggccccggcccccgaggctgaggatgaggaggtggcccggaggctttgggctgaaagtgcccgcctggtgggcttagaggctccctctgtgagggagcagcccctccccagataacctctggagcagatttgaaagccaggatggcgcctccagaccgaggacagctgtccgccatgcccgcagcttcctggcactacctgagccgggagacccaggactggcggccgccatgcccgcagtaggttctagggggcggtgctggccgcagtggactggcctgcaggtgagcactgccctgggctctggctggttccgtctgctctgctgccagcaggggagaggggccatctgatgcttcccctgggaatctaaactgggaatggccgaggaggaaggggctccgtgcacttgcaggccacgtcaggagagccagcggtgcctgtcggggagggttccaaggtgctccgtgaagagcatgggcaagttgtctgacacttggtggattcttgggtccctgtgggaccttgtgcatgcatggtcctctctgagccttggtttcttcagcagtgagatgctcagaataactgctgtctcccatgatggtgtggtacagcgagctgttgtctggctatggcatggctgtgccgggggtgtttgctgagggcttcctgtgccagagcccagccagagagcaggtgcaggtgtcatcctgagttcaggctctgcacggcatggagtgggaaccccaccagctgctgctacaggacctgggattgcctgggactcccaccttcctatcaattctcatggtagtccaaactgcagactctcaaacttgctcatttaaaagaaaaaaaaaagaagaaaatgtacccgagtcgtagattttatttttcctctgtgcatgggtgaatgcccatgagctgaacaaaggcaactcatggctttattccttttaggaaacaaggcatcagtttatcaccagggcaacaggccatgcaaaagttcagacttggccgggcgcggtggatcacgaggtcaggagatcgagaccatcctggctaacacaatgaaaccctgtttctactaaaaaaatacaaaaaattagctgggcatggtggtgggcgcctgcagtcccagccactcgggaggctgaggcaggagaatggtgtgaacccgggaggcggagcttgcagtgagccgaga

SEQ ID NO: 371016 - DNA, 3165 bp, Homo sapiens
atggagttttgcttttattgcccaggatggagtgtaatgatgcgatctcggctcactgcaccctctgcctcctggtttcaagcgattttcccgcctcagcctcctgagtagctgggattacaggtgcatgccaccacgcctggctaattttgtatttttagtaaagacgcggtttctccatgttggccaggctggtctcaaactcctgacctcaggtgatctgcccacctcggcctcccaaagtgctgggattacaggcgtgagccactgtgcccggccaggtctgtgaggttttaaaccacctgtctgtggcactttgttacggaacccgagctgagtggtacagggaggaaggccctgtggttcagcgcattttacagctgaggaaactgaggctgcagtctccatctgtgtgtcctttggttgcttgtatgagtgaggtggcaggtttgggaatgaaaccacgcctgcggtgccggggctcccaccggtaacctcccgtttttggcctcggggctccggcaggaaggagtcccaaggcttagatggaggtgcggagggcgtgtgagtgtcctggagctgctgtaacaatgtactgcaaacccagtggcttacaccctcagacgtgcattccctcacggttccggaagccggcagtctgaatcgcggtgtccctgtggctgtgacctgtgagacgggccataatcctcccagcctcttccacttccagcgggggcggcccaccctcaccttggagctgtgcctctccggtctttgcctctgtccacacatggccttctccccatgtgtctctgtctctgttttcccttcctataaggacaccagtcattggattagggctcaccctaatgaccgcatcctgacatggccacttcggcacagaccctgtttccggcacaggccacattcacaggttgtgggagcacaggagtgtttctgctggtgcatcaggctggggtctgtcctcaccgggatgtctcctcctccacccctctcttccagaggaggagcgagtggacattctaatcaacaacgcgggtgtgatgcggtgcccccactggaccaccgaggacggcttcgagatgcagtttggcgttaaccacctgggtcactttctcttgacaaacttgctgctggacaagctgaaagcctcagccccttcgcggatcatcaacctctcgtccctggcccatgttgctgggcacatagactttgacgacttgaactggcagacgaggaagtataacaccaaagccgcctactgccagagcaagctcgccatcgtcctcttcaccaaggagctgagccggcggctgcaaggctctggtgtgactgtcaacgccctgcaccccggcgtggccaggacagagctgggcagacacacgggcatccatggctccaccttctccagcaccacactcgggcccatcttctggctgctggtcaagagccccgagctggccgcccagcccagcacatacctggccgtggcggaggaactggcggatgtttccggaaagtacttcgatggactcaaacagaaggccccggcccccgaggctgaggatgaggaggtggcccggaggctttgggctgaaagtgcccgcctggtgggcttagaggctccctctgtgagggagcagcccctccccagataacctctggagcagatttgaaagccaggatggcgcctccagaccgaggacagctgtccgccatgcccgcagcttcctggcactacctgagccgggagacccaggactggcggccgccatgcccgcagtaggttctagggggcggtgctggccgcagtggactggcctgcaggtgagcactgccctgggctctggctggttccgtctgctctgctgccagcaggggagaggggccatctgatgcttcccctgggaatctaaactgggaatggccgaggaggaaggggctccgtgcacttgcaggccacgtcaggagagccagcggtgcctgtcggggagggttccaaggtgctccgtgaagagcatgggcaagttgtctgacacttggtggattcttgggtccctgtgggaccttgtgcatgcatggtcctctctgagccttggtttcttcagcagtgagatgctcagaataactgctgtctcccatgatggtgtggtacagcgagctgttgtctggctatggcatggctgtgccgggggtgtttgctgagggcttcctgtgccagagcccagccagagagcaggtgcaggtgtcatcctgagttcaggctctgcacggcatggagtgggaaccccaccagctgctgctacaggacctgggattgcctgggactcccaccttcctatcaattctcatggtagtccaaactgcagactctcaaacttgctcatttaaaagaaaaaaaaaagaagaaaatgtacccgagtcgtagattttatttttcctctgtgcatgggtgaatgcccatgagctgaacaaaggcaactcatggctttattccttttaggaaacaaggcatcagtttatcaccagggcaacaggccatgcaaaagttcagacttggccgggcgcggtggatcacgaggtcaggagatcgagaccatcctggctaacacaatgaaaccctgtttctactaaaaaaatacaaaaaattagctgggcatggtgtgctgggattataggtgtgagccagtgcacccagccctttttgcttttttagagacgaggtcttactgtgttgccaaggctggagtgcagtgccgtcacagctcactacaacctcgacctgtgattctcctgcctcagcctcctgagtatctgggactacaggtgcatgccaccacacttggctaattatttgtagaggtggcaacataacatttgctatgttgcccaggctggtctcaaactcctgggctcaagtgacccttccgccatggcctcccaaattgttgggattacaggcatgagccaccgtacctggccttagttttctttccgatgccacaccaaatggctagagggtgtgtttgggatgacctgagtctggtaggcaacttccagtggaccccacagtgcgaccacctccctttgagtgtgggggagatgtagcgactggcttctagcagtaggagtagggcagaagtg

SEQ ID NO: 371017 - DNA, 2547 bp, Homo sapiens
agccgcgcctgcgcctccgctcgcctgtggctgcgtcgcgcgctcttcctcggagctacccaggcggctggtgtgcagcaagctccgcgccgaccccggacgcctgacgcctgacgcctgtccccggcccggcatgagccgctacctgctgccgctgtcggcgctgggcacggtagcaggcgccgccgtgctgctcaaggactatgtcaccggtggggcttgccccagcaaggccaccatccctgggaagacggtcatcgtgacgggcgccaacacaggcatcgggaagcagaccgccttggaactggccaggagaggaggcaacatcatcctggcctgccgagacatggagaagtgtgaggcggcagcaaaggacatccgcggggagaccctcaatcaccatgtcaacgcccggcacctggacttggcttccctcaagtctatccgagagtttgcagcaaagatcattgaagaggaggagcgagtggacattctaatcaacaacgcgggtgtgatgcggtgcccccactggaccaccgaggacggcttcgagatgcagtttggcgttaaccacctgggtcactttctcttgacaaacttgctgctggacaagctgaaagcctcagccccttcgcggatcatcaacctctcgtccctggcccatgttgctgggcacatagactttgacgacttgaactggcagacgaggaagtataacaccaaagccgcctactgccagagcaagctcgccatcgtcctcttcaccaaggaagctgggcagacacacgggcatccatggctccaccttctccagcaccacactcgggcccatcttctggctgctggtcaagagccccgagctggccgcccagcccagcacatacctggccgtggcggaggaactggcggatgtttccggaaagtacttcgatggactcaaacagaaggccccggcccccgaggctgaggatgaggaggtggcccggaggctttgggctgaaagtgcccgcctggtgggcttagaggctccctctgtgagggagcagcccctccccagataacctctggagcagatttgaaagccaggatggcgcctccagaccgaggacagctgtccgccatgcccgcagcttcctggcactacctgagccgggagacccaggactggcggccgccatgcccgcagtaggttctagggggcggtgctggccgcagtggactggcctgcaggtgagcactgccctgggctctggctggttccgtctgctctgctgccagcaggggagaggggccatctgatgcttcccctgggaatctaaactgggaatggccgaggaggaaggggctccgtgcacttgcaggccacgtcaggagagccagcggtgcctgtcggggagggttccaaggtgctccgtgaagagcatgggcaagttgtctgacacttggtggattcttgggtccctgtgggaccttgtgcatgcatggtcctctctgagccttggtttcttcagcagtgagatgctcagaataactgctgtctcccatgatggtgtggtacagcgagctgttgtctggctatggcatggctgtgccgggggtgtttgctgagggcttcctgtgccagagcccagccagagagcaggtgcaggtgtcatcctgagttcaggctctgcacggcatggagtgggaaccccaccagctgctgctacaggacctgggattgcctgggactcccaccttcctatcaattctcatggtagtccaaactgcagactctcaaacttgctcatttaaaagaaaaaaaaaagaagaaaatgtacccgagtcgtagattttatttttcctctgtgcatgggtgaatgcccatgagctgaacaaaggcaactcatggctttattccttttaggaaacaaggcatcagtttatcaccagggcaacaggccatgcaaaagttcagacttggccgggcgcggtggatcacgaggtcaggagatcgagaccatcctggctaacacaatgaaaccctgtttctactaaaaaaatacaaaaaattagctgggcatggtgtgctgggattataggtgtgagccagtgcacccagccctttttgcttttttagagacgaggtcttactgtgttgccaaggctggagtgcagtgccgtcacagctcactacaacctcgacctgtgattctcctgcctcagcctcctgagtatctgggactacaggtgcatgccaccacacttggctaattatttgtagaggtggcaacataacatttgctatgttgcccaggctggtctcaaactcctgggctcaagtgacccttccgccatggcctcccaaattgttgggattacaggcatgagccaccgtacctggccttagttttctttccgatgccacaccaaatggctagagggtgtgtttgggatgacctgagtctggtaggcaacttccagtggaccccacagtgcgaccacctccctttgagtgtgggggagatgtagcgactggcttctagcagtaggagtagggcagaagtg

SEQ ID NO: 371018 - DNA, 1925 bp, Homo sapiens
gctgaggattgtctgttcatcccaggtggtctagtctgcctggatcagatgtccttccctgctgctgttgggcaggcagctcagccttttggctccagccagctctggtgtgactgtcaacgccctgcaccccggcgtggccaggacagagctgggcagacacacgggcatccatggctccaccttctccagcaccacactcgggcccatcttctggctgctggtcaagagccccgagctggccgcccagcccagcacatacctggccgtggcggaggaactggcggatgtttccggaaagtacttcgatggactcaaacagaaggccccggcccccgaggctgaggatgaggaggtggcccggaggctttgggctgaaagtgcccgcctggtgggcttagaggctccctctgtgagggagcagcccctccccagataacctctggagcagatttgaaagccaggatggcgcctccagaccgaggacagctgtccgccatgcccgcagcttcctggcactacctgagccgggagacccaggactggcggccgccatgcccgcagtaggttctagggggcggtgctggccgcagtggactggcctgcaggtgagcactgccctgggctctggctggttccgtctgctctgctgccagcaggggagaggggccatctgatgcttcccctgggaatctaaactgggaatggccgaggaggaaggggctccgtgcacttgcaggccacgtcaggagagccagcggtgcctgtcggggagggttccaaggtgctccgtgaagagcatgggcaagttgtctgacacttggtggattcttgggtccctgtgggaccttgtgcatgcatggtcctctctgagccttggtttcttcagcagtgagatgctcagaataactgctgtctcccatgatggtgtggtacagcgagctgttgtctggctatggcatggctgtgccgggggtgtttgctgagggcttcctgtgccagagcccagccagagagcaggtgcaggtgtcatcctgagttcaggctctgcacggcatggagtgggaaccccaccagctgctgctacaggacctgggattgcctgggactcccaccttcctatcaattctcatggtagtccaaactgcagactctcaaacttgctcatttaaaagaaaaaaaaaagaagaaaatgtacccgagtcgtagattttatttttcctctgtgcatgggtgaatgcccatgagctgaacaaaggcaactcatggctttattccttttaggaaacaaggcatcagtttatcaccagggcaacaggccatgcaaaagttcagacttggccgggcgcggtggatcacgaggtcaggagatcgagaccatcctggctaacacaatgaaaccctgtttctactaaaaaaatacaaaaaattagctgggcatggtgtgctgggattataggtgtgagccagtgcacccagccctttttgcttttttagagacgaggtcttactgtgttgccaaggctggagtgcagtgccgtcacagctcactacaacctcgacctgtgattctcctgcctcagcctcctgagtatctgggactacaggtgcatgccaccacacttggctaattatttgtagaggtggcaacataacatttgctatgttgcccaggctggtctcaaactcctgggctcaagtgacccttccgccatggcctcccaaattgttgggattacaggcatgagccaccgtacctggccttagttttctttccgatgccacaccaaatggctagagggtgtgtttgggatgacctgagtctggtaggcaacttccagtggaccccacagtgcgaccacctccctttgagtgtgggggagatgtagcgactggcttctagcagtaggagtagggcagaagtg

SEQ ID NO: 371019 - DNA, 2725 bp, Homo sapiens
agccgcgcctgcgcctccgctcgcctgtggctgcgtcgcgcgctcttcctcggagctacccaggcggctggtgtgcagcaagctccgcgccgaccccggacgcctgacgcctgacgcctgtccccggcccggcatgagccgctacctgctgccgctgtcggcgctgggcacggtagcaggcgccgccgtgctgctcaaggactatgtcaccggtggggcttgccccagcaaggccaccatccctgggaagacggtcatcgtgacgggcgccaacacaggcatcgggaagcagaccgccttggaactggccaggagaggaggcaacatcatcctggcctgccgagacatggagaagtgtgaggcggcagcaaaggacatccgcggggagaccctcaatcaccatgtcaacgcccggcacctggacttggcttccctcaagtctatccgagagtttgcagcaaagatcattgaagaggaggagcgagtggacattctaatcaacaacgcgggtgtgatgcggtgcccccactggaccaccgaggacggcttcgagatgcagtttggcgttaaccacctgggtcactttctcttgacaaacttgctgctggacaagctgaaagcctcagccccttcgcggatcatcaacctctcgtccctggcccatgttgctgggcacatagactttgacgacttgaactggcagacgaggaagtataacaccaaagccgcctactgccagagcaagctcgccatcgtcctcttcaccaaggagctgagccggcggctgcaaggctctggtgtgactgtcaacgccctgcaccccggcgtggccaggacagagctgggcagacacacgggcatccatggctccaccttctccagcaccacactcgggcccatcttctggctgctggtcaagagccccgagctggccgcccagcccagcacatacctggccgtggcggaggaactggcggatgtttccggaaagtacttcgatggactcaaacagaaggccccggcccccgaggctgaggatgaggaggtggcccggaggctttgggctgaaagtgcccgcctggtgggcttagaggctccctctgtgagggagcagcccctccccagataacctctggagcagatttgaaagccaggatggcgcctccagaccgaggacagctgtccgccatgcccgcagcttcctggcactacctgagccgggagacccaggactggcggccgccatgcccgcagtaggttctagggggcggtgctggccgcagtggactggcctgcagccagcaaaccccaaacaggaacctatggttggtgatggatgtgcgttcagaaagcagggagggagggggagtcagaggtgagggggtcatcagccatagctgtccgctgcatcaccccctcgctatctccaggaagcgttctgggcttttcctgttgtgcagtgtggaagtgctctatcttcattcatatcaaggaaagtcaaaggacaaactaaagccggcagcgtctttctggcttcctagtcaggctgttcggtagcggagtgtcaccctgatttccagccccgcagcacacacactgagagcctgcctggcgtgattcagaggcaacgtatttcccaaggtggctgtgaaggaaccagggggataaacacagcccgtgaaccgcacgccagaggacaggtccggctgcctgccgcggagtcgtcacggcgtgtcgcgtctgagcgcttctccaaagcacccaagtggcacccggggtgacatttacatcatcttgagtacagttctctcaaggaaaaagcaagcccagcatcttctgccatggcaaccctggcttggagcctccataagagagaaggccctaagaataccattttcttgctctaagttgctcttacgggaaagaagtgataatattcttcctaaacgccatcattcgtgcatccttcccacctacatgtgtcaccggatcattctccgcctgggcggggccgtcctgtgcactgcagaatgctgagcagtgtccttggcttcgaccgaccacatgccaggagcaccccaatttctgccatcgggtgattgacttcactgttgcatttgattttttatgtatcttttaaaaggacccaataccaccacgcccagccgggtttatagttttataacccttatgacaaatctcatagtattctgcagggataagcatgaaaccactcgttcaataagtgcaaacaaaaacgccaacaattcttaagacatttctaatcttattttaccaataattttaaagccagcttatgtattaaagatttataactacttttattaacacgtttaaaattctatgcagcttaaagcatttataatggataaaactgccaatactgagtgcctgacataatatttgaaaggtggcaggcattcaaccatggtcactgaatgagagatgtagggaagatgatggcagggaggtttttagatatcaacaccctgatagttctcattttaaccacctgtaagtgcacatacaagtcaacggcactgtgcctggctgatttttattcttttagttaaggctggttgatattaccttgtgtgtatataccacatgttgtttatccattgttgttgatggacatgtgggtggtttcaccttttggctattgtgaataaagctgctatgaacactgtgtacaaataagtta

SEQ ID NO: 371020 - DNA, 2316 bp, Homo sapiens
agccgcgcctgcgcctccgctcgcctgtggctgcgtcgcgcgctcttcctcggagctacccaggcggctggtgtgcagcaagctccgcgccgaccccggacgcctgacgcctgacgcctgtccccggcccggcatgagccgctacctgctgccgctgtcggcgctgggcacggtagcaggcgccgccgtgctgctcaaggactatgtcaccggtggggcttgccccagcaaggccaccatccctgggaagacggtcatcgtgacgggcgccaacacaggcatcgggaagcagaccgccttggaactggccaggagaggaggcaacatcatcctggcctgccgagacatggagaagtgtgaggcggcagcaaaggacatccgcggggagaccctcaatcaccatgtcaacgcccggcacctggacttggcttccctcaagtctatccgagagtttgcagcaaagatcattgaagaggaggagcgagtggacattctaatcaacaacgcgggtgtgatgcggtgcccccactggaccaccgaggacggcttcgagatgcagtttggcgttaaccacctgggtcactttctcttgacaaacttgctgctggacaagctgaaagcctcagccccttcgcggatcatcaacctctcgtccctggcccatgttgctgggcacatagactttgacgacttgaactggcagacgaggaagtataacaccaaagccgcctactgccagagcaagctcgccatcgtcctcttcaccaaggagctgagccggcggctgcaaggctctggtgtgactgtcaacgccctgcaccccggcgtggccaggacagagctgggcagacacacgggcatccatggctccaccttctccagcaccacactcgggcccatcttctggctgctggtcaagagccccgagctggccgcccagcccagcacatacctggccgtggcggaggaactggcggatgtttccggaaagtacttcgatggactcaaacagaaggccccggcccccgaggctgaggatgaggaggtggcccggaggctttgggctgaaagtgcccgcctggtgggcttagaggctccctctgtgagggagcagcccctccccagataacctctggagcagatttgaaagccaggatggcgcctccagaccgaggacagctgtccgccatgcccgcagcttcctggcactacctgagccgggagacccaggactggcggccgccatgcccgcagtaggttctagggggcggtgctggccgcagtggactggcctgcagccagcaaaccccaaacaggaacctatggttggtgatggatgtgcgttcagaaagcagggagggagggggagtcagaggtgagggggtcatcagccatagctgtccgctgcatcaccccctcgctatctccaggaagcgttctgggcttttcctgttgtgcagtgtggaagtgctctatcttcattcatatcaaggaaagtcaaaggacaaactaaagccggcagcgtctttctggcttcctagtcaggctgttcggtagcggagtgtcaccctgatttccagccccgcagcacacacactgagagcctgcctggcgtgattcagaggcaacgtatttcccaaggtggctgtgaaggaaccagggggataaacacagcccgtgaaccgcacgccagaggacaggtccggctgcctgccgcggagtcgtcacggcgtgtcgcgtctgagcgcttctccaaagcacccaagtggcacccggggtgacatttacatcatcttgagtacagttctctcaaggaaaaagcaagcccagcatcttctgccatggcaaccctggcttggagcctccataagagagaaggccctaagaataccattttcttgctctaagttgctcttacgggaaagaagtgataatattcttcctaaacgccatcattcgtgcatccttcccacctacatgtgtcaccggatcattctccgcctgggcggggccgtcctgtgcactgcagaatgctgagcagtgtccttggcttcgaccgaccacatgccaggagcaccccaatttctgccatcgggtgattgacttcactgttgcatttgattttttatgtatcttttaaaaggacccaatactgtgcctggctgatttttattcttttagttaaggctggttgatattaccttgtgtgtatataccacatgttgtttatccattgttgttgatggacatgtgggtggtttcaccttttggctattgtgaataaagctgctatgaacactgtgtacaaataagtta

SEQ ID NO: 371021 - DNA, 1539 bp, Homo sapiens
agccgcgcctgcgcctccgctcgcctgtggctgcgtcgcgcgctcttcctcggagctacccaggcggctggtgtgcagcaagctccgcgccgaccccggacgcctgacgcctgacgcctgtccccggcccggcatgagccgctacctgctgccgctgtcggcgctgggcacggtagcaggcgccgccgtgctgctcaaggactatgtcaccggtggggcttgccccagcaaggccaccatccctgggaagacggtcatcgtgacgggcgccaacacaggcatcgggaagcagaccgccttggaactggccaggagaggaggcaacatcatcctggcctgccgagacatggagaagtgtgaggcggcagcaaaggacatccgcggggagaccctcaatcaccatgtcaacgcccggcacctggacttggcttccctcaagtctatccgagagtttgcagcaaagatcattgaagaggaggagcgagtggacattctaatcaacaacgcgggtgtgatgcggtgcccccactggaccaccgaggacggcttcgagatgcagtttggcgttaaccacctgggtcactttctcttgacaaacttgctgctggacaagctgaaagcctcagccccttcgcggatcatcaacctctcgtccctggcccatgttgctgggcacatagactttgacgacttgaactggcagacgaggaagtataacaccaaagccgcctactgccagagcaagctcgccatcgtcctcttcaccaaggagctgagccggcggctgcaaggctctggtgtgactgtcaacgccctgcaccccggcgtggccaggacagagctgggcagacacacgggcatccatggctccaccttctccagcaccacactcgggcccatcttctggctgctggtcaagagccccgagctggccgcccagcccagcacatacctggccgtggcggaggaactggcggatgtttccggaaagtacttcgatggactcaaacagaaggccccggcccccgaggctgaggatgaggaggtggcccggaggctttgggctgaaagtgcccgcctggtgggcttagaggctccctctgtgagggagcagcccctccccagataacctctggagcagatttgaaagccaggatggcgcctccagaccgaggacagctgtccgccatgcccgcagcttcctggcactacctgagccgggagacccaggactggcggccgccatgcccgcagtaggttctagggggcggtgctggccgcagtggactggcctgcaggtgagcactgccctgggctctggctggttccgtctgctctgctgccagcaggggagaggggccatctgatgcttcccctgggaatctaaactgggaatggccccacgaggaccccccccccccccccccccccccccccccccgccccccccccccccccccccccccccgcccgcccccccccccccccccccccccccggtggccgtcccttttaataagccattgggacaaaatttgc

SEQ ID NO: 371022 - DNA, 1405 bp, Homo sapiens
agccgcgcctgcgcctccgctcgcctgtggctgcgtcgcgcgctcttcctcggagctacccaggcggctggtgtgcagcaagctccgcgccgaccccggacgcctgacgcctgacgcctgtccccggcccggcatgagccgctacctgctgccgctgtcggcgctgggcacggtagcaggcgccgccgtgctgctcaaggactatgtcaccggtggggcttgccccagcaaggccaccatccctgggaagacggtcatcgtgacgggcgccaacacaggcatcgggaagcagaccgccttggaactggccaggagaggaggcaacatcatcctggcctgccgagacatggagaagtgtgaggcggcagcaaaggacatccgcggggagaccctcaatcaccatgtcaacgcccggcacctggacttggcttccctcaagtctatccgagagtttgcagcaaagatcattgaagaggaggagcgagtggacattctaatcaacaacgcgggtgtgatgcggtgcccccactggaccaccgaggacggcttcgagatgcagtttggcgttaaccacctgggtcactttctcttgacaaacttgctgctggacaagctgaaagcctcagccccttcgcggatcatcaacctctcgtccctggcccatgttgctgggcacatagactttgacgacttgaactggcagacgaggaagtataacaccaaagccgcctactgccagagcaagctcgccatcgtcctcttcaccaaggagctgagccggcggctgcaaggctctggtgtgactgtcaacgccctgcaccccggcgtggccaggacagagctgggcagacacacgggcatccatggctccaccttctccagcaccacactcgggcccatcttctggctgctggtcaagagccccgagctggccgcccagcccagcacatacctggccgtggcggaggaactggcggatgtttccggaaagtacttcgatggactcaaacagaaggccccggcccccgaggctgaggatgaggaggtggcccggaggctttgggctgaaagtgcccgcctggtgggcttagaggctccctctgtgagggagcagcccctccccagataacctctggagcagatttgaaagccaggatggcgcctccagaccgaggacagctgtccgccatgcccgcagcttcctggcactacctgagccgggagacccaggactggcggccgccatgcccgcagtaggttctagggggcggtgctggccgcagtggactggcctgcaggtgagcactgccctgggctctggtgggatacatttgatatgctgccactatgactgagttagaggctgattttttaactttggtatttacctattagtttcatatcg

SEQ ID NO: 371023 - DNA, 1853 bp, Homo sapiens
cagccaaggggaaagggctagaggagggctctgtgggactccagggacccggagctccctgaccggggagcggggcttccttccttctctctgagcgagtgtggactaaatgccctgtgggctgattgcagggcccatcttctggctgctggtcaagagccccgagctggccgcccagcccagcacatacctggccgtggcggaggaactggcggatgtttccggaaagtacttcgatggactcaaacagaaggccccggcccccgaggctgaggatgaggaggtggcccggaggctttgggctgaaagtgcccgcctggtgggcttagaggctccctctgtgagggagcagcccctccccagataacctctggagcagatttgaaagccaggatggcgcctccagaccgaggacagctgtccgccatgcccgcagcttcctggcactacctgagccgggagacccaggactggcggccgccatgcccgcagtaggttctagggggcggtgctggccgcagtggactggcctgcaggtgagcactgccctgggctctggctggttccgtctgctctgctgccagcaggggagaggggccatctgatgcttcccctgggaatctaaactgggaatggccgaggaggaaggggctccgtgcacttgcaggccacgtcaggagagccagcggtgcctgtcggggagggttccaaggtgctccgtgaagagcatgggcaagttgtctgacacttggtggattcttgggtccctgtgggaccttgtgcatgcatggtcctctctgagccttggtttcttcagcagtgagatgctcagaataactgctgtctcccatgatggtgtggtacagcgagctgttgtctggctatggcatggctgtgccgggggtgtttgctgagggcttcctgtgccagagcccagccagagagcaggtgcaggtgtcatcctgagttcaggctctgcacggcatggagtgggaaccccaccagctgctgctacaggacctgggattgcctgggactcccaccttcctatcaattctcatggtagtccaaactgcagactctcaaacttgctcatttaaaagaaaaaaaaaagaagaaaatgtacccgagtcgtagattttatttttcctctgtgcatgggtgaatgcccatgagctgaacaaaggcaactcatggctttattccttttaggaaacaaggcatcagtttatcaccagggcaacaggccatgcaaaagttcagacttggccgggcgcggtggatcacgaggtcaggagatcgagaccatcctggctaacacaatgaaaccctgtttctactaaaaaaatacaaaaaattagctgggcatggtgtgctgggattataggtgtgagccagtgcacccagccctttttgcttttttagagacgaggtcttactgtgttgccaaggctggagtgcagtgccgtcacagctcactacaacctcgacctgtgattctcctgcctcagcctcctgagtatctgggactacaggtgcatgccaccacacttggctaattatttgtagaggtggcaacataacatttgctatgttgcccaggctggtctcaaactcctgggctcaagtgacccttccgccatggcctcccaaattgttgggattacaggcatgagccaccgtacctggccttagttttctttccgatgccacaccaaatggctagagggtgtgtttgggatgacctgagtctggtaggcaacttccagtggaccccacagtgcgaccacctccctttgagtgtgggggagatgtagcgactggcttctagcagtaggagtagggcagaagtg

SEQ ID NO: 371024 - DNA, 1338 bp, Homo sapiens
agccgcgcctgcgcctccgctcgcctgtggctgcgtcgcgcgctcttcctcggagctacccaggcggctggtgtgcagcaagctccgcgccgaccccggacgcctgacgcctgacgcctgtccccggcccggcatgagccgctacctgctgccgctgtcggcgctgggcacggtagcaggcgccgccgtgctgctcaaggactatgtcaccggtggggcttgccccagcaaggccaccatccctgggaagacggtcatcgtgacgggcgccaacacaggcatcgggaagcagaccgccttggaactggccaggagaggaggcaacatcatcctggcctgccgagacatggagaagtgtgaggcggcagcaaaggacatccgcggggagaccctcaatcaccatgtcaacgcccggcacctggacttggcttccctcaagtctatccgagagtttgcagcaaagatcattgaagaggaggagcgagtggacattctaatcaacaacgcgggtgtgatgcggtgcccccacttcctatcaattctcatggtagtccaaactgcagactctcaaacttgctcatttaaaagaaaaaaaaaagaagaaaatgtacccgagtcgtagattttatttttcctctgtgcatgggtgaatgcccatgagctgaacaaaggcaactcatggctttattccttttaggaaacaaggcatcagtttatcaccagggcaacaggccatgcaaaagttcagacttggccgggcgcggtggatcacgaggtcaggagatcgagaccatcctggctaacacaatgaaaccctgtttctactaaaaaaatacaaaaaattagctgggcatggtgtgctgggattataggtgtgagccagtgcacccagccctttttgcttttttagagacgaggtcttactgtgttgccaaggctggagtgcagtgccgtcacagctcactacaacctcgacctgtgattctcctgcctcagcctcctgagtatctgggactacaggtgcatgccaccacacttggctaattatttgtagaggtggcaacataacatttgctatgttgcccaggctggtctcaaactcctgggctcaagtgacccttccgccatggcctcccaaattgttgggattacaggcatgagccaccgtacctggccttagttttctttccgatgccacaccaaatggctagagggtgtgtttgggatgacctgagtctggtaggcaacttccagtggaccccacagtgcgaccacctccctttgagtgtgggggagatgtagcgactggcttctagcagtaggagtagggcagaagtg

SEQ ID NO: 371025 - DNA, 423 bp, Homo sapiens
atttgaaaggtggcaggcattcaaccatggtcactgaatgagagatgtagggaagatgatggcagggaggtttttagatatcaacaccctgatagttctcattttaaccacctgtaagtgcacatacaagtcaacggcactggccgggcgcggtggctcatgcctgtattcccagcactttgggaggccaaatcacaaggtcaggagatcgagaccatcctggctaacacggtgaaaccccatctctactaaaaatacaaaaaatcaactaggcatggtggcacgcacctgtagtcccagctactcaggaggctgaggcaggagaatcgcttgaacctgggaggcggaggttgcggtgagccgagatcgcgccactgcactccagcctcggcgacagagtgagactccgtctcaaaaaaacca

SEQ ID NO: 371026 - DNA, 584 bp, Homo sapiens
gtgccagagcccagccagagagcaggtgcaggtgtcatcctgagttcaggctctgcacggcatggagtgggaaccccaccagctgctgctacaggacctgggattgcctgggactcccaccttcctatcaattctcatggtagtccaaactgcagactctcaaacttgctcatttaaaagaaaaaaaaaagaagaaaatgtacccgagtcgtagattttatttttcctctgtgcatgggtgaatgcccatgagctgaacaaaggcaactcatggctttattccttttaggaaacaaggcatcagtttatcaccagggcaacaggccatgcaaaagttcagacttggccgggcgcggtggatcacgaggtcaggagatcgagaccatcctggctaacacaatgaaaccctgtttctactaaaaaaatacaaaaaattagctgggcatggtggtgggcgcctgcagtcccagccactcgggaggctgaggcaggagaatggtgtgaacccgggaggcggagcttgcagtgagccgagatcatgccactgccctccagcctgggtgacagagcaagattccgtctca

SEQ ID NO: 371027 - DNA, 512 bp, Homo sapiens
gctctggtgtgactgtcaacgccctgcaccccggcgtggccaggacagagctgggcagacacacgggcatccatggctccaccttctccagcaccacactcggtgagtcccctcccagcctggggtctccacgtggagccctccacccctgctttctcagcccagggcccaggaccctccctcagagaccgtccctgaggcctcatgcctgctcctcgcctacgtcttctgaggcacagagcacaggtccctttcctccgttgacctggcctgccagcctctaacagccccgggaagcaggcagagccctgctggcggatgagaaaaccgtgtctcagaggaagaggccgtgggagctgacgcctggagtcaggctgtactcagggtaactccagcttcaccccaaaccagctgcacctcctggggaagagctgttacccctctgagcctgtttcttcatctgcagagtgcaggccttaataggactcacctcacagtcactgggggggtta

SEQ ID NO: 371028 - DNA, 2742 bp, Homo sapiens
gttgatggtgacagcagcagtgaccgtagcagcctagaggtggccgaatgcttactctaatgggctggcccatccctgagtgtctagagttcccagcccgcttaaggaaggaaggaaaacacaggcagctctaagtgtacgacgagggaggtctcatcggcggtgaggaagcccaggcgggtccccttcccagctgaaaggggttcggaatttcactctgtcgccaggctggaatgcagtagggcaatctcggctcactgcaacctccacctcccgagttcaagtgatgctcctgcttcggcctcctgagtagctgggactacagggactatgtcaccggtggggcttgccccagcaaggccaccatccctgggaagacggtcatcgtgacgggcgccaacacaggcatcgggaagcagaccgccttggaactggccaggagaggaggcaacatcatcctggcctgccgagacatggagaagtgtgaggcggcagcaaaggacatccgcggggagaccctcaatcaccatgtcaacgcccggcacctggacttggcttccctcaagtctatccgagagtttgcagcaaagatcattgaagaggaggagcgagtggacattctaatcaacaacgcgggtgtgatgcggtgcccccactggaccaccgaggacggcttcgagatgcagtttggcgttaaccacctgggtcactttctcttgacaaacttgctgctggacaagctgaaagcctcagccccttcgcggatcatcaacctctcgtccctggcccatgttgctgggcacatagactttgacgacttgaactggcagacgaggaagtataacaccaaagccgcctactgccagagcaagctcgccatcgtcctcttcaccaaggagctgagccggcggctgcaaggctctggtgtgactgtcaacgccctgcaccccggcgtggccaggacagagctgggcagacacacgggcatccatggctccaccttctccagcaccacactcgggcccatcttctggctgctggtcaagagccccgagctggccgcccagcccagcacatacctggccgtggcggaggaactggcggatgtttccggaaagtacttcgatggactcaaacagaaggccccggcccccgaggctgaggatgaggaggtggcccggaggctttgggctgaaagtgcccgcctggtgggcttagaggctccctctgtgagggagcagcccctccccagataacctctggagcagatttgaaagccaggatggcgcctccagaccgaggacagctgtccgccatgcccgcagcttcctggcactacctgagccgggagacccaggactggcggccgccatgcccgcagtaggttctagggggcggtgctggccgcagtggactggcctgcaggtgagcactgccctgggctctggctggttccgtctgctctgctgccagcaggggagaggggccatctgatgcttcccctgggaatctaaactgggaatggccgaggaggaaggggctccgtgcacttgcaggccacgtcaggagagccagcggtgcctgtcggggagggttccaaggtgctccgtgaagagcatgggcaagttgtctgacacttggtggattcttgggtccctgtgggaccttgtgcatgcatggtcctctctgagccttggtttcttcagcagtgagatgctcagaataactgctgtctcccatgatggtgtggtacagcgagctgttgtctggctatggcatggctgtgccgggggtgtttgctgagggcttcctgtgccagagcccagccagagagcaggtgcaggtgtcatcctgagttcaggctctgcacggcatggagtgggaaccccaccagctgctgctacaggacctgggattgcctgggactcccaccttcctatcaattctcatggtagtccaaactgcagactctcaaacttgctcatttaaaagaaaaaaaaaagaagaaaatgtacccgagtcgtagattttatttttcctctgtgcatgggtgaatgcccatgagctgaacaaaggcaactcatggctttattccttttaggaaacaaggcatcagtttatcaccagggcaacaggccatgcaaaagttcagacttggccgggcgcggtggatcacgaggtcaggagatcgagaccatcctggctaacacaatgaaaccctgtttctactaaaaaaatacaaaaaattagctgggcatggtgtgctgggattataggtgtgagccagtgcacccagccctttttgcttttttagagacgaggtcttactgtgttgccaaggctggagtgcagtgccgtcacagctcactacaacctcgacctgtgattctcctgcctcagcctcctgagtatctgggactacaggtgcatgccaccacacttggctaattatttgtagaggtggcaacataacatttgctatgttgcccaggctggtctcaaactcctgggctcaagtgacccttccgccatggcctcccaaattgttgggattacaggcatgagccaccgtacctggccttagttttctttccgatgccacaccaaatggctagagggtgtgtttgggatgacctgagtctggtaggcaacttccagtggaccccacagtgcgaccacctccctttgagtgtgggggagatgtagcgactggcttctagcagtaggagtagggcagaagtg

SEQ ID NO: 371029 - DNA, 2615 bp, Homo sapiens
agccgcgcctgcgcctccgctcgcctgtggctgcgtcgcgcgctcttcctcggagctacccaggcggctggtgtgcagcaagctccgcgccgaccccggacgcctgacgcctgacgcctgtccccggcccggcatgagccgctacctgctgccgctgtcggcgctgggcacggtagcaggcgccgccgtgctgctcaaggactatgtcaccggtggggcttgccccagcaaggccaccatccctgggaagacggtcatcgtgacgggcgccaacacaggcatcgggaagcagaccgccttggaactggccaggagaggaggcaacatcatcctggcctgccgagacatggagaagtgtgaggcggcagcaaaggacatccgcggggagaccctcaatcaccatgtcaacgcccggcacctggacttggcttccctcaagtctatccgagagtttgcagcaaagatcattgaagaggaggagcgagtggacattctaatcaacaacgcgggtgtgatgcggtgcccccactggaccaccgaggacggcttcgagatgcagtttggcgttaaccacctgggtcactttctcttgacaaacttgctgctggacaagctgaaagcctcagccccttcgcggatcatcaacctctcgtccctggcccatgttgctgggcacatagactttgacgacttgaactggcagacgaggaagtataacaccaaagccgcctactgccagagcaagctcgccatcgtcctcttcaccaaggagctgagccggcggctgcaaggctctggtgtgactgtcaacgccctgcaccccggcgtggccaggacagagctgggcagacacacgggcatccatggctccaccttctccagcaccacactcgggcccatcttctggctgctggtcaagagccccgagctggccgcccagcccagcacatacctggccgtggcggaggaactggcggatgtttccggaaagtacttcgatggactcaaacagaaggccccggcccccgaggctgaggatgaggaggtggcccggaggctttgggctgaaagtgcccgcctggtgggcttagaggctccctctgtgagggagcagcccctccccagataacctctggagcagatttgaaagccaggatggcgcctccagaccgaggacagctgtccgccatgcccgcagcttcctggcactacctgagccgggagacccaggactggcggccgccatgcccgcagtaggttctagggggcggtgctggccgcagtggactggcctgcaggtgagcactgccctgggctctggctggttccgtctgctctgctgccagcaggggagaggggccatctgatgcttcccctgggaatctaaactgggaatggccgaggaggaaggggctccgtgcacttgcaggccacgtcaggagagccagcggtgcctgtcggggagggttccaaggtgctccgtgaagagcatgggcaagttgtctgacacttggtggattcttgggtccctgtgggaccttgtgcatgcatggtcctctctgagccttggtttcttcagcagtgagatgctcagaataactgctgtctcccatgatggtgtggtacagcgagctgttgtctggctatggcatggctgtgccgggggtgtttgctgagggcttcctgtgccagagcccagccagagagcaggtgcaggtgtcatcctgagttcaggctctgcacggcatggagtgggaaccccaccagctgctgctacaggacctgggattgcctgggactcccaccttcctatcaattctcatggtagtccaaactgcagactctcaaacttgctcatttaaaagaaaaaaaaaagaagaaaatgtacccgagtcgtagattttatttttcctctgtgcatgggtgaatgcccatgagctgaacaaaggcaactcatggctttattccttttaggaaacaaggcatcagtttatcaccagggcaacaggccatgcaaaagttcagacttggccgggcgcggtggatcacgaggtcaggagatcgagaccatcctggctaacacaatgaaaccctgtttctactaaaaaaatacaaaaaattagctgggcatggtgtgctgggattataggtgtgagccagtgcacccagccctttttgcttttttagagacgaggtcttactgtgttgccaaggctggagtgcagtgccgtcacagctcactacaacctcgacctgtgattctcctgcctcagcctcctgagtatctgggactacaggtgcatgccaccacacttggctaattatttgtagaggtggcaacataacatttgctatgttgcccaggctggtctcaaactcctgggctcaagtgacccttccgccatggcctcccaaattgttgggattacaggcatgagccaccgtacctggccttagttttctttccgatgccacaccaaatggctagagggtgtgtttgggatgacctgagtctggtaggcaacttccagtggaccccacagtgcgaccacctccctttgagtgtgggggagatgtagcgactggcttctagcagtaggagtagggcagaagtg

SEQ ID NO: 371030 - DNA, 2898 bp, Homo sapiens
agccgcgcctgcgcctccgctcgcctgtggctgcgtcgcgcgctcttcctcggagctacccaggcggctggtgtgcagcaagctccgcgccgaccccggacgcctgacgcctgacgcctgtccccggcccggcatgagccgctacctgctgccgctgtcggcgctgggcacggtagcaggcgccgccgtgctgctcaaggactatgtcaccggtggggcttgccccagcaaggccaccatccctgggaagacggtcatcgtgacgggcgccaacacaggcatcgggaagcagaccgccttggaactggccaggagaggaggcaacatcatcctggcctgccgagacatggagaagtgtgaggcggcagcaaaggacatccgcggggagaccctcaatcaccatgtcaacgcccggcacctggacttggcttccctcaagtctatccgagagtttgcagcaaagatcattgaagaggaggagcgagtggacattctaatcaacaacgcgggtgtgatgcggtgcccccactggaccaccgaggacggcttcgagatgcagtttggcgttaaccacctgggtcactttctcttgacaaacttgctgctggacaagctgaaagcctcagccccttcgcggatcatcaacctctcgtccctggcccatgttgctgggcacatagactttgacgacttgaactggcagacgaggaagtataacaccaaagccgcctactgccagagcaagctcgccatcgtcctcttcaccaaggagctgagccggcggctgcaaggctctggtgtgactgtcaacgccctgcaccccggcgtggccaggacagagctgggcagacacacgggcatccatggctccaccttctccagcaccacactcggtgagtcccctcccagcctggggtctccacgtggagccctccacccctgctttctcagcccagggcccaggaccctccctcagagaccgtccctgaggcctcatgcctgctcctcgcctacgtcttctgaggcacagagcacaggtccctttcctccgttgacctggcctgccagcctctaacagccccgggaagcaggcagagccctgctggcggatgagaaaaccgtgtctcagaggaagaggccgtgggagctgacgcctggagtcaggctgtactcaggggcccatcttctggctgctggtcaagagccccgagctggccgcccagcccagcacatacctggccgtggcggaggaactggcggatgtttccggaaagtacttcgatggactcaaacagaaggccccggcccccgaggctgaggatgaggaggtggcccggaggctttgggctgaaagtgcccgcctggtgggcttagaggctccctctgtgagggagcagcccctccccagataacctctggagcagatttgaaagccaggatggcgcctccagaccgaggacagctgtccgccatgcccgcagcttcctggcactacctgagccgggagacccaggactggcggccgccatgcccgcagtaggttctagggggcggtgctggccgcagtggactggcctgcaggtgagcactgccctgggctctggctggttccgtctgctctgctgccagcaggggagaggggccatctgatgcttcccctgggaatctaaactgggaatggccgaggaggaaggggctccgtgcacttgcaggccacgtcaggagagccagcggtgcctgtcggggagggttccaaggtgctccgtgaagagcatgggcaagttgtctgacacttggtggattcttgggtccctgtgggaccttgtgcatgcatggtcctctctgagccttggtttcttcagcagtgagatgctcagaataactgctgtctcccatgatggtgtggtacagcgagctgttgtctggctatggcatggctgtgccgggggtgtttgctgagggcttcctgtgccagagcccagccagagagcaggtgcaggtgtcatcctgagttcaggctctgcacggcatggagtgggaaccccaccagctgctgctacaggacctgggattgcctgggactcccaccttcctatcaattctcatggtagtccaaactgcagactctcaaacttgctcatttaaaagaaaaaaaaaagaagaaaatgtacccgagtcgtagattttatttttcctctgtgcatgggtgaatgcccatgagctgaacaaaggcaactcatggctttattccttttaggaaacaaggcatcagtttatcaccagggcaacaggccatgcaaaagttcagacttggccgggcgcggtggatcacgaggtcaggagatcgagaccatcctggctaacacaatgaaaccctgtttctactaaaaaaatacaaaaaattagctgggcatggtgtgctgggattataggtgtgagccagtgcacccagccctttttgcttttttagagacgaggtcttactgtgttgccaaggctggagtgcagtgccgtcacagctcactacaacctcgacctgtgattctcctgcctcagcctcctgagtatctgggactacaggtgcatgccaccacacttggctaattatttgtagaggtggcaacataacatttgctatgttgcccaggctggtctcaaactcctgggctcaagtgacccttccgccatggcctcccaaattgttgggattacaggcatgagccaccgtacctggccttagttttctttccgatgccacaccaaatggctagagggtgtgtttgggatgacctgagtctggtaggcaacttccagtggaccccacagtgcgaccacctccctttgagtgtgggggagatgtagcgactggcttctagcagtaggagtagggcagaagtg

SEQ ID NO: 371031 - DNA, 2168 bp, Homo sapiens
tctgaaagacggtctgtggaccagcggtgccagccccactgggagctggtcagagttacagtatcttaggtcccaccgccacgcaccgatgcaggctcccggggtaagctcagcgttctgggcttatgaagccctccaggaaagctcggctcccagcagccatgtggcagagccgctccgcaagataagaccacttcactaagattccagagcaagagggacgatggggtttgagtgcaggaagcagcctggtgcccggaagccccacagctgggtgtgggctgccacagcctcccaggtgaggctggacccctccctcagtcttctctttctttcttccccaggctctggtgtgactgtcaacgccctgcaccccggcgtggccaggacagagctgggcagacacacgggcatccatggctccaccttctccagcaccacactcgggcccatcttctggctgctggtcaagagccccgagctggccgcccagcccagcacatacctggccgtggcggaggaactggcggatgtttccggaaagtacttcgatggactcaaacagaaggccccggcccccgaggctgaggatgaggaggtggcccggaggctttgggctgaaagtgcccgcctggtgggcttagaggctccctctgtgagggagcagcccctccccagataacctctggagcagatttgaaagccaggatggcgcctccagaccgaggacagctgtccgccatgcccgcagcttcctggcactacctgagccgggagacccaggactggcggccgccatgcccgcagtaggttctagggggcggtgctggccgcagtggactggcctgcaggtgagcactgccctgggctctggctggttccgtctgctctgctgccagcaggggagaggggccatctgatgcttcccctgggaatctaaactgggaatggccgaggaggaaggggctccgtgcacttgcaggccacgtcaggagagccagcggtgcctgtcggggagggttccaaggtgctccgtgaagagcatgggcaagttgtctgacacttggtggattcttgggtccctgtgggaccttgtgcatgcatggtcctctctgagccttggtttcttcagcagtgagatgctcagaataactgctgtctcccatgatggtgtggtacagcgagctgttgtctggctatggcatggctgtgccgggggtgtttgctgagggcttcctgtgccagagcccagccagagagcaggtgcaggtgtcatcctgagttcaggctctgcacggcatggagtgggaaccccaccagctgctgctacaggacctgggattgcctgggactcccaccttcctatcaattctcatggtagtccaaactgcagactctcaaacttgctcatttaaaagaaaaaaaaaagaagaaaatgtacccgagtcgtagattttatttttcctctgtgcatgggtgaatgcccatgagctgaacaaaggcaactcatggctttattccttttaggaaacaaggcatcagtttatcaccagggcaacaggccatgcaaaagttcagacttggccgggcgcggtggatcacgaggtcaggagatcgagaccatcctggctaacacaatgaaaccctgtttctactaaaaaaatacaaaaaattagctgggcatggtgtgctgggattataggtgtgagccagtgcacccagccctttttgcttttttagagacgaggtcttactgtgttgccaaggctggagtgcagtgccgtcacagctcactacaacctcgacctgtgattctcctgcctcagcctcctgagtatctgggactacaggtgcatgccaccacacttggctaattatttgtagaggtggcaacataacatttgctatgttgcccaggctggtctcaaactcctgggctcaagtgacccttccgccatggcctcccaaattgttgggattacaggcatgagccaccgtacctggccttagttttctttccgatgccacaccaaatggctagagggtgtgtttgggatgacctgagtctggtaggcaacttccagtggaccccacagtgcgaccacctccctttgagtgtgggggagatgtagcgactggcttctagcagtaggagtagggcagaagtg

SEQ ID NO: 371032 - DNA, 2274 bp, Homo sapiens
agccgcgcctgcgcctccgctcgcctgtggctgcgtcgcgcgctcttcctcggagctacccaggcggctggtgtgcagcaagctccgcgccgaccccggacgcctgacgcctgacgcctgtccccggcccggcatgagccgctacctgctgccgctgtcggcgctgggcacggtagcaggcgccgccgtgctgctcaaggactatgtcaccggtggggcttgccccagcaaggccaccatccctgggaagacggtcatcgtgacgggcgccaacacaggcatcgggaagcagaccgccttggaactggccaggagaggaggcaacatcatcctggcctgccgagacatggagaagtgtgaggcggcagcaaaggacatccgcggggagaccctcaatcaccatgtcaacgcccggcacctggacttggcttccctcaagtctatccgagagtttgcagcaaagatcattgaagaggaggagcgagtggacattctaatcaacaacgcgggtgtgatgcggtgcccccactggaccaccgaggacggcttcgagatgcagtttggcgttaaccacctgggtcactttctcttgacaaacttgctgctggacaagctgaaagcctcagccccttcgcggatcatcaacctctcgtccctggcccatgttgctgggcacatagactttgacgacttgaactggcagacgaggaagtataacaccaaagccgcctactgccagagcaagctcgccatcgtcctcttcaccaaggagctgagccggcggctgcaaggctctggtgtgactgtcaacgccctgcaccccggcgtggccaggacagagctgggcagacacacgggcatccatggctccaccttctccagcaccacactcgggcccatcttctggctgctggtcaagagccccgagctggccgcccagcccagcacatacctggccgtggcggaggaactggcggatgtttccggaaagtacttcgatggactcaaacagaaggccccggcccccgaggctgaggatgaggaggtggcccggaggctttgggctgaaagtgcccgcctggtgggcttagaggctccctctgtgagggagcagcccctccccagataacctctggagcagatttgaaagccaggatggcgcctccagaccgaggacagctgtccgccatgcccgcagcttcctggcactacctgagccgggagacccaggactggcggccgccatgcccgcagtaggttctagggggcggtgctggccgcagtggactggcctgcagccagcaaaccccaaacaggaacctatggttggtgatggatgtgcgttcagaaagcagggagggagggggagtcagaggtgagggggtcatcagccatagctgtccgctgcatcaccccctcgctatctccaggaagcgttctgggcttttcctgttgtgcagtgtggaagtgctctatcttcattcatatcaaggaaagtcaaaggacaaactaaagccggcagcgtctttctggcttcctagtcaggctgttcggtagcggagtgtcaccctgatttccagccccgcagcacacacactgagagcctgcctggcgtgattcagaggcaacgtatttcccaaggtggctgtgaaggaaccagggggataaacacagcccgtgaaccgcacgccagaggacaggtccggctgcctgccgcggagtcgtcacggcgtgtcgcgtctgagcgcttctccaaagcacccaagtggcacccggggtgacatttacatcatcttgagtacagttctctcaaggaaaaagcaagcccagcatcttctgccatggcaaccctggcttggagcctccataagagagaaggccctaagaataccattttcttgctctaagttgctcttacgggaaagaagtgataatattcttcctaaacgccatcattcgtgcatccttcccacctacatgtgtcaccggatcattctccgcctgggcggggccgtcctgtgcactgcagaatgctgagcagtgtccttggcttcgaccgaccacatgccaggagcaccccaatttctgccatcgggtgattgacttcactctgtgcctggctgatttttattcttttagttaaggctggttgatattaccttgtgtgtatataccacatgttgtttatccattgttgttgatggacatgtgggtggtttcaccttttggctattgtgaataaagctgctatgaacactgtgtacaaataagtta

SEQ ID NO: 371033 - DNA, 2208 bp, Homo sapiens
gctgaggattgtctgttcatcccaggtggtctagtctgcctggatcagatgtccttccctgctgctgttgggcaggcagctcagccttttggctccagccagctctggtgtgactgtcaacgccctgcaccccggcgtggccaggacagagctgggcagacacacgggcatccatggctccaccttctccagcaccacactcggtgagtcccctcccagcctggggtctccacgtggagccctccacccctgctttctcagcccagggcccaggaccctccctcagagaccgtccctgaggcctcatgcctgctcctcgcctacgtcttctgaggcacagagcacaggtccctttcctccgttgacctggcctgccagcctctaacagccccgggaagcaggcagagccctgctggcggatgagaaaaccgtgtctcagaggaagaggccgtgggagctgacgcctggagtcaggctgtactcaggggcccatcttctggctgctggtcaagagccccgagctggccgcccagcccagcacatacctggccgtggcggaggaactggcggatgtttccggaaagtacttcgatggactcaaacagaaggccccggcccccgaggctgaggatgaggaggtggcccggaggctttgggctgaaagtgcccgcctggtgggcttagaggctccctctgtgagggagcagcccctccccagataacctctggagcagatttgaaagccaggatggcgcctccagaccgaggacagctgtccgccatgcccgcagcttcctggcactacctgagccgggagacccaggactggcggccgccatgcccgcagtaggttctagggggcggtgctggccgcagtggactggcctgcaggtgagcactgccctgggctctggctggttccgtctgctctgctgccagcaggggagaggggccatctgatgcttcccctgggaatctaaactgggaatggccgaggaggaaggggctccgtgcacttgcaggccacgtcaggagagccagcggtgcctgtcggggagggttccaaggtgctccgtgaagagcatgggcaagttgtctgacacttggtggattcttgggtccctgtgggaccttgtgcatgcatggtcctctctgagccttggtttcttcagcagtgagatgctcagaataactgctgtctcccatgatggtgtggtacagcgagctgttgtctggctatggcatggctgtgccgggggtgtttgctgagggcttcctgtgccagagcccagccagagagcaggtgcaggtgtcatcctgagttcaggctctgcacggcatggagtgggaaccccaccagctgctgctacaggacctgggattgcctgggactcccaccttcctatcaattctcatggtagtccaaactgcagactctcaaacttgctcatttaaaagaaaaaaaaaagaagaaaatgtacccgagtcgtagattttatttttcctctgtgcatgggtgaatgcccatgagctgaacaaaggcaactcatggctttattccttttaggaaacaaggcatcagtttatcaccagggcaacaggccatgcaaaagttcagacttggccgggcgcggtggatcacgaggtcaggagatcgagaccatcctggctaacacaatgaaaccctgtttctactaaaaaaatacaaaaaattagctgggcatggtgtgctgggattataggtgtgagccagtgcacccagccctttttgcttttttagagacgaggtcttactgtgttgccaaggctggagtgcagtgccgtcacagctcactacaacctcgacctgtgattctcctgcctcagcctcctgagtatctgggactacaggtgcatgccaccacacttggctaattatttgtagaggtggcaacataacatttgctatgttgcccaggctggtctcaaactcctgggctcaagtgacccttccgccatggcctcccaaattgttgggattacaggcatgagccaccgtacctggccttagttttctttccgatgccacaccaaatggctagagggtgtgtttgggatgacctgagtctggtaggcaacttccagtggaccccacagtgcgaccacctccctttgagtgtgggggagatgtagcgactggcttctagcagtaggagtagggcagaagtg

SEQ ID NO: 371034 - DNA, 2026 bp, Homo sapiens
cttaaagcatttataatggataaaactgccaatactgagtgcctgacataatatttgaaaggtggcaggcattcaaccatgggtcactgaatgagagatgtagggaagatgatggcagggaggtttttagatatcaacaccctgatagttctcattttaaccacgcccggccttatttttatttttgagatgaagtcttgctctgtcgcccaggctggagtacaatggcatgatctccactcactgcaacttccacctcccaggttcaagcgattctcctgtctccaagtagctgggattacagggcccatcttctggctgctggtcaagagccccgagctggccgcccagcccagcacatacctggccgtggcggaggaactggcggatgtttccggaaagtacttcgatggactcaaacagaaggccccggcccccgaggctgaggatgaggaggtggcccggaggctttgggctgaaagtgcccgcctggtgggcttagaggctccctctgtgagggagcagcccctccccagataacctctggagcagatttgaaagccaggatggcgcctccagaccgaggacagctgtccgccatgcccgcagcttcctggcactacctgagccgggagacccaggactggcggccgccatgcccgcagtaggttctagggggcggtgctggccgcagtggactggcctgcaggtgagcactgccctgggctctggctggttccgtctgctctgctgccagcaggggagaggggccatctgatgcttcccctgggaatctaaactgggaatggccgaggaggaaggggctccgtgcacttgcaggccacgtcaggagagccagcggtgcctgtcggggagggttccaaggtgctccgtgaagagcatgggcaagttgtctgacacttggtggattcttgggtccctgtgggaccttgtgcatgcatggtcctctctgagccttggtttcttcagcagtgagatgctcagaataactgctgtctcccatgatggtgtggtacagcgagctgttgtctggctatggcatggctgtgccgggggtgtttgctgagggcttcctgtgccagagcccagccagagagcaggtgcaggtgtcatcctgagttcaggctctgcacggcatggagtgggaaccccaccagctgctgctacaggacctgggattgcctgggactcccaccttcctatcaattctcatggtagtccaaactgcagactctcaaacttgctcatttaaaagaaaaaaaaaagaagaaaatgtacccgagtcgtagattttatttttcctctgtgcatgggtgaatgcccatgagctgaacaaaggcaactcatggctttattccttttaggaaacaaggcatcagtttatcaccagggcaacaggccatgcaaaagttcagacttggccgggcgcggtggatcacgaggtcaggagatcgagaccatcctggctaacacaatgaaaccctgtttctactaaaaaaatacaaaaaattagctgggcatggtgtgctgggattataggtgtgagccagtgcacccagccctttttgcttttttagagacgaggtcttactgtgttgccaaggctggagtgcagtgccgtcacagctcactacaacctcgacctgtgattctcctgcctcagcctcctgagtatctgggactacaggtgcatgccaccacacttggctaattatttgtagaggtggcaacataacatttgctatgttgcccaggctggtctcaaactcctgggctcaagtgacccttccgccatggcctcccaaattgttgggattacaggcatgagccaccgtacctggccttagttttctttccgatgccacaccaaatggctagagggtgtgtttgggatgacctgagtctggtaggcaacttccagtggaccccacagtgcgaccacctccctttgagtgtgggggagatgtagcgactggcttctagcagtaggagtagggcagaagtg

SEQ ID NO: 371035 - DNA, 303 bp, Homo sapiens
cctcccaaagtgctgggattttaggtgtgagtcaaaagtgaccttttcatcatccttaatccaggtcactttctcttgacaaacttgctgctggacaagctgaaagcctcagccccttcgcggatcatcaacctctcgtccctggcccatgttgctgggcacatagactttgacgacttgaactggcagacgaggaagtataacaccaaagccgcctactgccagagcaagctcgccatcgtcctcttcaccaaggagctgagccggcggctgcaaggtacgggggcgctaggctcggcctcc

SEQ ID NO: 371036 - DNA, 355 bp, Homo sapiens
ttatataataatagcttgcaagtctttttaaaaatgtctgatttgtttaaaacctaactatatattttgggcattttctcatgccattaactatcctttggaaacattattttttccaagatacggtttccttttatccttctttttacaaaagaaatgcatcctcattccttaaaacaacaacaaccaaggacaaccagaaggaggatttaaaaaagttactgacaggccaggcgcggaggctcatgcctgtaatcccagcactttgggaggccgaggcgggcagatccctgaggtcaggagttcaagaccagcctggccaacatgctgaaaccctctctttactaaaaataca

SEQ ID NO: 371037 - DNA, 2243 bp, Homo sapiens
gttccggcgcggccagggcccaacttccggcgtccgtcgggcagcagcggggctgtctatcccggctgaggacccgcggccagtgcgggtggctggctttgccattagcgggggcctttcctgaggacggcgtacggagtgtggggaatgaaggatggcagcatgccgtgcattaaaagctgttttggtagatctcagtggcacacttcacattgaagatgcagctgtgccaggcgcacaggaagctcttaaaaggcaagctatcctccaggttcagctgacaaatatgtttgttacgtggtgcttctgtaatcattaggtttgtgaccaatacaaccaaagagagcaagcaagacctgttagaaaggttgagaaaattggaatttgatatctctgaagatgaaatattcacatctctgactgcagccagaagtttactagagcggaaacaagtcagacccatgctgctagttgatgatcgggcactacctgatttcaaaggaatacaaacaagtgatcctaatgctgtggtcatgggattggcaccagaacattttcattatcaaattctgaatcaagcattccggttactcctggatggagcacctctgatagcaatccacaaagccaggtattacaagaggaaagatggcttagccctggggcctggaccatttgtgactgctttagagtatgccacagataccaaagccacagtcgtggggaaaccagagaagacgttctttttggaagcattgcggggcactggctgtgaacctgaggaggctgtcatgataggagatgattgcagggatgatgttggtggggctcaagatgtcggcatgctgggcatcttagtaaagactgggaaatatcgagcatcagatgaagaaaaaattaatccacctccttacttaacttgtgagagtttccctcatgctgtggaccacattctgcagcacctattgtgaagcaatgtgtgcatctgaagcaacttgaaatgcagcttcttattgtctggaatgaatcccttaccaactcagtgccagcatcggtagacaccagtcagtgctgatcgctttttaaccctcttttgttgtgcattaattagaaagaaaggtattgaattgcggctagccagtaagccttgctaatctcttttattttgtaactgaagatgagacccaaagaaagggaaagctgagattttgtgccattccttttaaaatattcatcaggttaggtggggctgtgggggaaaagctactacagggaagagtgttctctgctgtctcttcactggaaaacagggaggggggatttcagactgtgaagaaagttgaatggtggtttttaaattataaagtaatgtattaaaaggtgcattaggctgtagttctaatattgagttcaactgtgaaatccatcagatgtgccaaatggagaagacagaaagcaacaaagtgaattgttctttagcccaagtggtacagtgaatttgctttaacagatgttgaaaactaaattttctactgtattcccagcacgggtgacttctttttctcttcattagccagagatgactaatttaaatttagaaccagattttaatttaaattaatatttccattaataacctattcattgcagatacctattatactgtgtaacagttgttttggaaattttatgtaaaattaaaactatcagtattttacagatgttttaattagacattgttattaacaggaacagtgcagaaactagaatcaagccttataatatcttatagaccatgcatttttgaagttagtgtccactagggtcctattaactgtacatttgcaagatttcattatttttgcctctgacactatgggaaaaattttttagaagctattgggacagattcaagcttttatgcacttggttactacagctgtaaaatgaaatctcgtcttgtagcatggattattcttctcatgttaaacccaccaaaataaaggggactaaataggtaatgattttcctagtgcatttgcatactgtgataatcctgggccttgcaatagttctacagggctcttgggcattgaattattaggatgtaattgtacatcattgtagtgttcaccttattgaagctcactctgatgttaatgagcttcgggttttgatgcttgtttagagatcagcagtcttggatgggagggaacaaagctaaataaatgttagtttggtga

SEQ ID NO: 371038 - DNA, 2213 bp, Homo sapiens
cacgtcccttgcggcggcgggagagaaatcgcttggacttcggggcggcctcggacggccatggcctttaccctgtactcactgctgcaggcagccctgctctgcgtcaacgccatcgcagtgctgcacgaggagcgattcctcaagaacaggaatgaaggatggcagcatgccgtgcattaaaagctgttttggtagatctcagtggcacacttcacattgaagatgcagctgtgccaggcgcacaggaagctcttaaaaggttacgtggtgcttctgtaatcattaggtttgtgaccaatacaaccaaagagagcaagcaagacctgttagaaaggttgagaaaattggaatttgatatctctgaagatgaaatattcacatctctgactgcagccagaagtttactagagcggaaacaagtcagacccatgctgctagttgatgatcgggcactacctgatttcaaaggaatacaaacaagtgatcctaatgctgtggtcatgggattggcaccagaacattttcattatcaaattctgaatcaagcattccggttactcctggatggagcacctctgatagcaatccacaaagccaggtattacaagaggaaagatggcttagccctggggcctggaccatttgtgactgctttagagtatgccacagataccaaagccacagtcgtggggaaaccagagaagacgttctttttggaagcattgcggggcactggctgtgaacctgaggaggctgtcatgataggagatgattgcagggatgatgttggtggggctcaagatgtcggcatgctgggcatcttagtaaagactgggaaatatcgagcatcagatgaagaaaaaattaatccacctccttacttaacttgtgagagtttccctcatgctgtggaccacattctgcagcacctattgtgaagcaatgtgtgcatctgaagcaacttgaaatgcagcttcttattgtctggaatgaatcccttaccaactcagtgccagcatcggtagacaccagtcagtgctgatcgctttttaaccctcttttgttgtgcattaattagaaagaaaggtattgaattgcggctagccagtaagccttgctaatctcttttattttgtaactgaagatgagacccaaagaaagggaaagctgagattttgtgccattccttttaaaatattcatcaggttaggtggggctgtgggggaaaagctactacagggaagagtgttctctgctgtctcttcactggaaaacagggaggggggatttcagactgtgaagaaagttgaatggtggtttttaaattataaagtaatgtattaaaaggtgcattaggctgtagttctaatattgagttcaactgtgaaatccatcagatgtgccaaatggagaagacagaaagcaacaaagtgaattgttctttagcccaagtggtacagtgaatttgctttaacagatgttgaaaactaaattttctactgtattcccagcacgggtgacttctttttctcttcattagccagagatgactaatttaaatttagaaccagattttaatttaaattaatatttccattaataacctattcattgcagatacctattatactgtgtaacagttgttttggaaattttatgtaaaattaaaactatcagtattttacagatgttttaattagacattgttattaacaggaacagtgcagaaactagaatcaagccttataatatcttatagaccatgcatttttgaagttagtgtccactagggtcctattaactgtacatttgcaagatttcattatttttgcctctgacactatgggaaaaattttttagaagctattgggacagattcaagcttttatgcacttggttactacagctgtaaaatgaaatctcgtcttgtagcatggattattcttctcatgttaaacccaccaaaataaaggggactaaataggtaatgattttcctagtgcatttgcatactgtgataatcctgggccttgcaatagttctacagggctcttgggcattgaattattaggatgtaattgtacatcattgtagtgttcaccttattgaagctcactctgatgttaatgagcttcgggttttgatgcttgtttagagatcagcagtcttggatgggagggaacaaagctaaataaatgttagtttggtga

SEQ ID NO: 371039 - DNA, 1801 bp, Homo sapiens
gttccggcgcggccagggcccaacttccggcgtccgtcgggcagcagcggggctgtctatcccggctgaggacccgcggccagtgcgggtggctggctttgccattagcgggggcctttcctgaggacggcgtacggagtgtgggttactcctggatggagcacctctgatagcaatccacaaagccaggtattacaagaggaaagatggcttagccctggggcctggaccatttgtgactgctttagagtatgccacagataccaaagccacagtcgtggggaaaccagagaagacgttctttttggaagcattgcggggcactggctgtgaacctgaggaggctgtcatgataggagatgattgcagggatgatgttggtggggctcaagatgtcggcatgctgggcatcttagtaaagactgggaaatatcgagcatcagatgaagaaaaaattaatccacctccttacttaacttgtgagagtttccctcatgctgtggaccacattctgcagcacctattgtgaagcaatgtgtgcatctgaagcaacttgaaatgcagcttcttattgtctggaatgaatcccttaccaactcagtgccagcatcggtagacaccagtcagtgctgatcgctttttaaccctcttttgttgtgcattaattagaaagaaaggtattgaattgcggctagccagtaagccttgctaatctcttttattttgtaactgaagatgagacccaaagaaagggaaagctgagattttgtgccattccttttaaaatattcatcaggttaggtggggctgtgggggaaaagctactacagggaagagtgttctctgctgtctcttcactggaaaacagggaggggggatttcagactgtgaagaaagttgaatggtggtttttaaattataaagtaatgtattaaaaggtgcattaggctgtagttctaatattgagttcaactgtgaaatccatcagatgtgccaaatggagaagacagaaagcaacaaagtgaattgttctttagcccaagtggtacagtgaatttgctttaacagatgttgaaaactaaattttctactgtattcccagcacgggtgacttctttttctcttcattagccagagatgactaatttaaatttagaaccagattttaatttaaattaatatttccattaataacctattcattgcagatacctattatactgtgtaacagttgttttggaaattttatgtaaaattaaaactatcagtattttacagatgttttaattagacattgttattaacaggaacagtgcagaaactagaatcaagccttataatatcttatagaccatgcatttttgaagttagtgtccactagggtcctattaactgtacatttgcaagatttcattatttttgcctctgacactatgggaaaaattttttagaagctattgggacagattcaagcttttatgcacttggttactacagctgtaaaatgaaatctcgtcttgtagcatggattattcttctcatgttaaacccaccaaaataaaggggactaaataggtaatgattttcctagtgcatttgcatactgtgataatcctgggccttgcaatagttctacagggctcttgggcattgaattattaggatgtaattgtacatcattgtagtgttcaccttattgaagctcactctgatgttaatgagcttcgggttttgatgcttgtttagagatcagcagtcttggatgggagggaacaaagctaaataaatgttagtttggtga

SEQ ID NO: 371040 - DNA, 2206 bp, Homo sapiens
gttccggcgcggccagggcccaacttccggcgtccgtcgggcagcagcggggctgtctatcccggctgaggacccgcggccagtgcgggtggctggctttgccattagcgggggcctttcctgaggacggcgtacggagtgtggggaatgaaggatggcagcatgccgtgcattaaaagctgttttggtagatctcagtggcacacttcacattgaagatgcagctgtgccaggcgcacaggaagctcttaaaaggttacgtggtgcttctgtaatcattaggtttgtgaccaatacaaccaaagagagcaagcaagacctgttagaaaggttgagaaaattggaatttgatatctctgaagatgaaatattcacatctctgactgcagccagaagtttactagagcggaaacaagtcagacccatgctgctagttgatgatcgggcactacctgatttcaaaggaatacaaacaagtgatcctaatgctgtggtcatgggattggcaccagaacattttcattatcaaattctgaatcaagcattccggttactcctggatggagcacctctgatagcaatccacaaagccaggtattacaagaggaaagatggcttagccctggggcctggaccatttgtgactgctttagagtatgccacagataccaaagccacagtcgtggggaaaccagagaagacgttctttttggaagcattgcggggcactggctgtgaacctgaggaggctgtcatgataggagatgattgcagggatgatgttggtggggctcaagatgtcggcatgctgggcatcttagtaaagactgggaaatatcgagcatcagatgaagaaaaaattaatccacctccttacttaacttgtgagagtttccctcatgctgtggaccacattctgcagcacctattgtgaagcaatgtgtgcatctgaagcaacttgaaatgcagcttcttattgtctggaatgaatcccttaccaactcagtgccagcatcggtagacaccagtcagtgctgatcgctttttaaccctcttttgttgtgcattaattagaaagaaaggtattgaattgcggctagccagtaagccttgctaatctcttttattttgtaactgaagatgagacccaaagaaagggaaagctgagattttgtgccattccttttaaaatattcatcaggttaggtggggctgtgggggaaaagctactacagggaagagtgttctctgctgtctcttcactggaaaacagggaggggggatttcagactgtgaagaaagttgaatggtggtttttaaattataaagtaatgtattaaaaggtgcattaggctgtagttctaatattgagttcaactgtgaaatccatcagatgtgccaaatggagaagacagaaagcaacaaagtgaattgttctttagcccaagtggtacagtgaatttgctttaacagatgttgaaaactaaattttctactgtattcccagcacgggtgacttctttttctcttcattagccagagatgactaatttaaatttagaaccagattttaatttaaattaatatttccattaataacctattcattgcagatacctattatactgtgtaacagttgttttggaaattttatgtaaaattaaaactatcagtattttacagatgttttaattagacattgttattaacaggaacagtgcagaaactagaatcaagccttataatatcttatagaccatgcatttttgaagttagtgtccactagggtcctattaactgtacatttgcaagatttcattatttttgcctctgacactatgggaaaaattttttagaagctattgggacagattcaagcttttatgcacttggttactacagctgtaaaatgaaatctcgtcttgtagcatggattattcttctcatgttaaacccaccaaaataaaggggactaaataggtaatgattttcctagtgcatttgcatactgtgataatcctgggccttgcaatagttctacagggctcttgggcattgaattattaggatgtaattgtacatcattgtagtgttcaccttattgaagctcactctgatgttaatgagcttcgggttttgatgcttgtttagagatcagcagtcttggatgggagggaacaaagctaaataaatgttagtttggtga

SEQ ID NO: 371041 - DNA, 1400 bp, Homo sapiens
gttccggcgcggccagggcccaacttccggcgtccgtcgggcagcagcggggctgtctatcccggctgaggacccgcggccagtgcgggtggctggctttgccattagcgggggcctttcctgaggacggcgtacggagtgtggggaatgaaggatggcagcatgccgtgcattaaaagctgttttggtagatctcagtggcacacttcacattgaagatgcagctgtgccaggcgcacaggaagctcttaaaaggcaagctatcctccaggttcagctgacaaatatgtttgttacgtggtgcttctgtaatcattaggtttgtgaccaatacaaccaaagagagcaagcaagacctgttagaaaggttgagaaaattggaatttgatatctctgaagatgaaatattcacatctctgactgcagccagaagtttactagagcggaaacaagtcagacccatgctgctagttgatgatcgggcactacctgatttcaaaggaatacaaacaagtgatcctaatgctgtggtcatgggattggcaccagaacattttcattatcaaattctgaatcaagcattccggttactcctggatggagcacctctgatagcaatccacaaagccaggtattacaagaggaaagatggcttagccctggggcctggaccatttgtgactgctttagagtatgccacagataccaaagccacagtcgtggggaaaccagagaagacgttctttttggaagcattgcggggcactggctgtgaacctgaggaggctgtcatgataggagatgattgcagggatgatgttggtggggctcaagatgtcggcatgctgggcatcttagtaaagactgggaaatatcgagcatcagatgaagaaaaaattaatccacctccttacttaacttgtgagagtttccctcatgctgtggaccacattctgcagcacctattgtgaagcaatgtgtgcatctgaagcaacttgaaatgcagcttcttattgtctggaatgaatcccttaccaactcagtgccagcatcggtagacaccagtcagtgctgatcgctttttaaccctcttttgttgtgcattaattagaaagaaaggtattgaattgcggctagccagtaagccttgctaatctcttttattttgtaactgaagatgagacccaaagaaagggaaagctgagattttgtgccattccttttaaaatattcatcaggttaggtggggctgtgggggaaaagctactacagggaagagtgttctctgctgtctcttcactggaaaacagggaggggggatttcagactgtgaagaaagttgaatggtggtttttaaattataaagtaatgtattaaaaggtgcattaggctgtagttct

SEQ ID NO: 371042 - DNA, 2179 bp, Homo sapiens
gttccggcgcggccagggcccaacttccggcgtccgtcgggcagcagcggggctgtctatcccggctgaggacccgcggccagtgcgggtggctggctttgccattagcgggggcctttcctgaggacggcgtacggagtgtggggaatgaaggatggcagcatgccgtgcattaaaagctgttttggtagatctcagtggcacacttcacattgaagatgcagctgtgccaggcgcacaggaagctcttaaaaggtttgtgaccaatacaaccaaagagagcaagcaagacctgttagaaaggttgagaaaattggaatttgatatctctgaagatgaaatattcacatctctgactgcagccagaagtttactagagcggaaacaagtcagacccatgctgctagttgatgatcgggcactacctgatttcaaaggaatacaaacaagtgatcctaatgctgtggtcatgggattggcaccagaacattttcattatcaaattctgaatcaagcattccggttactcctggatggagcacctctgatagcaatccacaaagccaggtattacaagaggaaagatggcttagccctggggcctggaccatttgtgactgctttagagtatgccacagataccaaagccacagtcgtggggaaaccagagaagacgttctttttggaagcattgcggggcactggctgtgaacctgaggaggctgtcatgataggagatgattgcagggatgatgttggtggggctcaagatgtcggcatgctgggcatcttagtaaagactgggaaatatcgagcatcagatgaagaaaaaattaatccacctccttacttaacttgtgagagtttccctcatgctgtggaccacattctgcagcacctattgtgaagcaatgtgtgcatctgaagcaacttgaaatgcagcttcttattgtctggaatgaatcccttaccaactcagtgccagcatcggtagacaccagtcagtgctgatcgctttttaaccctcttttgttgtgcattaattagaaagaaaggtattgaattgcggctagccagtaagccttgctaatctcttttattttgtaactgaagatgagacccaaagaaagggaaagctgagattttgtgccattccttttaaaatattcatcaggttaggtggggctgtgggggaaaagctactacagggaagagtgttctctgctgtctcttcactggaaaacagggaggggggatttcagactgtgaagaaagttgaatggtggtttttaaattataaagtaatgtattaaaaggtgcattaggctgtagttctaatattgagttcaactgtgaaatccatcagatgtgccaaatggagaagacagaaagcaacaaagtgaattgttctttagcccaagtggtacagtgaatttgctttaacagatgttgaaaactaaattttctactgtattcccagcacgggtgacttctttttctcttcattagccagagatgactaatttaaatttagaaccagattttaatttaaattaatatttccattaataacctattcattgcagatacctattatactgtgtaacagttgttttggaaattttatgtaaaattaaaactatcagtattttacagatgttttaattagacattgttattaacaggaacagtgcagaaactagaatcaagccttataatatcttatagaccatgcatttttgaagttagtgtccactagggtcctattaactgtacatttgcaagatttcattatttttgcctctgacactatgggaaaaattttttagaagctattgggacagattcaagcttttatgcacttggttactacagctgtaaaatgaaatctcgtcttgtagcatggattattcttctcatgttaaacccaccaaaataaaggggactaaataggtaatgattttcctagtgcatttgcatactgtgataatcctgggccttgcaatagttctacagggctcttgggcattgaattattaggatgtaattgtacatcattgtagtgttcaccttattgaagctcactctgatgttaatgagcttcgggttttgatgcttgtttagagatcagcagtcttggatgggagggaacaaagctaaataaatgttagtttggtga

SEQ ID NO: 371043 - DNA, 2183 bp, Homo sapiens
taagcttggtctgtaagaacagaattctggagtaaagaagcaggttcccttttcgctagacacctcgtctgctactggaacacatccattgtatcttcagcctccatttccaaatgtgcagggaatgaaggatggcagcatgccgtgcattaaaagctgttttggtagatctcagtggcacacttcacattgaagatgcagctgtgccaggcgcacaggaagctcttaaaaggttacgtggtgcttctgtaatcattaggtttgtgaccaatacaaccaaagagagcaagcaagacctgttagaaaggttgagaaaattggaatttgatatctctgaagatgaaatattcacatctctgactgcagccagaagtttactagagcggaaacaagtcagacccatgctgctagttgatgatcgggcactacctgatttcaaaggaatacaaacaagtgatcctaatgctgtggtcatgggattggcaccagaacattttcattatcaaattctgaatcaagcattccggttactcctggatggagcacctctgatagcaatccacaaagccaggtattacaagaggaaagatggcttagccctggggcctggaccatttgtgactgctttagagtatgccacagataccaaagccacagtcgtggggaaaccagagaagacgttctttttggaagcattgcggggcactggctgtgaacctgaggaggctgtcatgataggagatgattgcagggatgatgttggtggggctcaagatgtcggcatgctgggcatcttagtaaagactgggaaatatcgagcatcagatgaagaaaaaattaatccacctccttacttaacttgtgagagtttccctcatgctgtggaccacattctgcagcacctattgtgaagcaatgtgtgcatctgaagcaacttgaaatgcagcttcttattgtctggaatgaatcccttaccaactcagtgccagcatcggtagacaccagtcagtgctgatcgctttttaaccctcttttgttgtgcattaattagaaagaaaggtattgaattgcggctagccagtaagccttgctaatctcttttattttgtaactgaagatgagacccaaagaaagggaaagctgagattttgtgccattccttttaaaatattcatcaggttaggtggggctgtgggggaaaagctactacagggaagagtgttctctgctgtctcttcactggaaaacagggaggggggatttcagactgtgaagaaagttgaatggtggtttttaaattataaagtaatgtattaaaaggtgcattaggctgtagttctaatattgagttcaactgtgaaatccatcagatgtgccaaatggagaagacagaaagcaacaaagtgaattgttctttagcccaagtggtacagtgaatttgctttaacagatgttgaaaactaaattttctactgtattcccagcacgggtgacttctttttctcttcattagccagagatgactaatttaaatttagaaccagattttaatttaaattaatatttccattaataacctattcattgcagatacctattatactgtgtaacagttgttttggaaattttatgtaaaattaaaactatcagtattttacagatgttttaattagacattgttattaacaggaacagtgcagaaactagaatcaagccttataatatcttatagaccatgcatttttgaagttagtgtccactagggtcctattaactgtacatttgcaagatttcattatttttgcctctgacactatgggaaaaattttttagaagctattgggacagattcaagcttttatgcacttggttactacagctgtaaaatgaaatctcgtcttgtagcatggattattcttctcatgttaaacccaccaaaataaaggggactaaataggtaatgattttcctagtgcatttgcatactgtgataatcctgggccttgcaatagttctacagggctcttgggcattgaattattaggatgtaattgtacatcattgtagtgttcaccttattgaagctcactctgatgttaatgagcttcgggttttgatgcttgtttagagatcagcagtcttggatgggagggaacaaagctaaataaatgttagtttggtga

SEQ ID NO: 371044 - DNA, 593 bp, Homo sapiens
accctgtggacacagagtgacagctgagtgcaagtgtcagtgaagagacctagattgtggggactttcctggcctggcagagaaccttgtgtctgctcacgggagaaggaaagaacaattcctctgcagaactcccattatggattcatgggtatacttggatggtgtctgaccgagctccacgaaggcagggaagtaccttccgtcttttgtcttcacaaccaagcccagagcccctgcaggcagcctccctcagcacaggcacgtggcggagcactccgtggctcctgatgtccagggcccagctcctgccaggttgtggagggccgtcggcatgtcaccctctcactgatgctgggacctgaggctgggtgctggagaagtctaacgggacacaatttcaaagcactttggcttatttaaaaaatctccaccttcatgtttcaagaaagaattcttgcagcaacaatgaaagaagcacctaccactactgttgactcccactggcttccagtggagtagtgaaccggacccagtaagtccttgcatatttctcgaagtcggtattcaaaccctaattacagaaaaacaaa

SEQ ID NO: 371045 - DNA, 1540 bp, Homo sapiens
tagtgggtggagccagctgtcctcattagataaaggttgtttattcaacccaagtataaatggaaaaaaaagatgcgccctctgtcactgagggttgactgactggagagctcaagtgcagcaaagagaagtgtcagagcatgagcgccaagtccagaaccatagggattattggagctcctttctcaaagggacagccacgaggaggggtggaagaaggccctacagtattgagaaaggctggtctgcttgagaaacttaaagaacaagagtgtgatgtgaaggattatggggacctgccctttgctgacatccctaatgacagtccctttcaaattgtgaagaatccaaggtctgtgggaaaagcaagcgagcagctggctggcaaggtggcagaagtcaagaagaacggaagaatcagcctggtgctgggcggagaccacagtttggcaattggaagcatctctggccatgccagggtccaccctgatcttggagtcatctgggtggatgctcacactgatatcaacactccactgacaaccacaagtggaaacttgcatggacaacctgtatctttcctcctgaaggaactaaaaggaaagattcccgatgtgccaggattctcctgggtgactccctgtatatctgccaaggatattgtgtatattggcttgagagacgtggaccctggggaacactacattttgaaaactctaggcattaaatacttttcaatgactgaagtggacagactaggaattggcaaggtgatggaagaaacactcagctatctactaggaagaaagaaaaggccaattcatctaagttttgatgttgacggactggacccatctttcacaccagctactggcacaccagtcgtgggaggtctgacatacagagaaggtctctacatcacagaagaaatctacaaaacagggctactctcaggattagatataatggaagtgaacccatccctggggaagacaccagaagaagtaactcgaacagtgaacacagcagttgcaataaccttggcttgtttcggacttgctcgggagggtaatcacaagcctattgactaccttaacccacctaagtaaatgtggaaacatccgatataaatctcatagttaatggcataattagaaagctaatcattttcttaagcatagagttatccttctaaagacttgttctttcagaaaaatgtttttccaattagtataaactctacaaattccctcttggtgtaaaattcaagatgtggaaattctaacttttttgaaatttaaaagcttatattttctaacttggcaaaagacttatccttagaaagagaagtgtacattgatttccaattaaaaatttgctggcattaaaaataagcacacttacataagcccccatacatagagtgggactcttggaatcaggagacaaagctaccacatgtggaaaggtactatgtgtccatgtcattcaaaaaatgtgattttttataataaactctttataacaagaaaatattgtg

SEQ ID NO: 371046 - DNA, 755 bp, Homo sapiens
tagtgggtggagccagctgtcctcattagataaaggttgtttattcaacccaagtataaatggaaaaaaaagatgcgccctctgtcactgagggttgactgactggagagctcaagtgcagcaaagagaagtgtcagagcatgagcgccaagtccagaaccatagggattattggagctcctttctcaaagggacagccacgaggaggggtggaagaaggccctacagtattgagaaaggctggtctgcttgagaaacttaaagaacaagagtgtgatgtgaaggattatggggacctgccctttgctgacatccctaatgacagtccctttcaaattgtgaagaatccaaggtctgtgggaaaagcaagcgagcagctggctggcaaggtggcagaagtcaagaagaacggaagaatcagcctggtgctgggcggagaccacagtttggcaattggaagcatctctggccatgccagggtccaccctgatcttggagtcatctgggtggatgctcacactgatatcaacactccactgacaaccacaagtggaaacttgcatggacaacctgtatctttcctcctgaaggaactaaaaggaaagattcccgatgtgccaggattctcctgggtgactccctgtatatctgccaaggatattgtgtatattggcttgagagacgtggaccctggggaacacagactaggaattggcaaggtgatggaagaaacactcagctatctactaggaagg

SEQ ID NO: 371047 - DNA, 592 bp, Homo sapiens
tagtgggtggagccagctgtcctcattagataaaggttgtttattcaacccaagtataaatggaaaaaaaagatgcgccctctgtcactgagggttgactgactggagagctcaagtgcagcaaagagaagtgtcagagcatgagcgccaagtccagaaccatagggattattggagctcctttctcaaagggacaggtaaggaaaaaagtctttctttgaattcctggaatttagttgaaaattttggacttcaaaatttgtaaggtgttattgtctagttagttcagttttctgatacaatctggccaggaaatgcatattttaaagtcctctcaccattttccaacattgtataattatagtcacatatccacttacttttgtggctcgtgatctcagccaaggctaaattcatttgaacctacagaatgttttctcatattttttaggagaaaatatttttctttgaattgaaatggactctttctgcattgtagctactcattgaggtttagttgctcttgttgtttttgatgttactgtgtgtatgtagaggaagagagaattttaagaaatacatttgtttagtt

SEQ ID NO: 371048 - DNA, 583 bp, Homo sapiens
tagtgggtggagccagctgtcctcattagataaaggttgtttattcaacccaagtataaatggaaaaaaaagatgcgccctctgtcactgagggttgactgactggagagctcaagtgcagcaaagagaagtgtcagagcatgagcgccaagtccagaaccatagggattattggagctcctttctcaaagggacagagtgtgatgtgaaggattatggggacctgccctttgctgacatccctaatgacagtccctttcaaattgtgaagaatccaaggtctgtgggaaaagcaagcgagcagctggctggcaaggtggcagaagtcaagaagaacggaagaatcagcctggtgctgggcggagaccacagattcccgatgtgccaggattctcctgggtgactccctgtatatctgccaaggatattgtgtatattggcttgagagacgtggaccctggggaacaacacctacatttgacaaactctaggcattacatactcttcaatgacttgaagtgggcaccacgaccctaaagcggaaacattttggggcgcacacggctcgatggacagaaaccac

SEQ ID NO: 371049 - DNA, 1486 bp, Homo sapiens
tagtgggtggagccagctgtcctcattagataaaggttgtttattcaacccaagtataaatggaaaaaaaagatgcgccctctgtcactgagggttgactgactggagagctcaagtgcagcaaagagaagtgtcagagcatgagcgccaagtccagaaccatagggattattggagctcctttctcaaagggacagccacgaggaggggtggaagaaggccctacagtattgagaaaggctggtctgcttgagaaacttaaagaacaagagtgtgatgtgaaggattatggggacctgccctttgctgacatccctaatgacagtccctttcaaattgtgaagaatccaaggtctgtgggaatcagcctggtgctgggcggagaccacagtttggcaattggaagcatctctggccatgccagggtccaccctgatcttggagtcatctgggtggatgctcacactgatatcaacactccactgacaaccacaagtggaaacttgcatggacaacctgtatctttcctcctgaaggaactaaaaggaaagattcccgatgtgccaggattctcctgggtgactccctgtatatctgccaaggatattgtgtatattggcttgagagacgtggaccctggggaacactacattttgaaaactctaggcattaaatacttttcaatgactgaagtggacagactaggaattggcaaggtgatggaagaaacactcagctatctactaggaagaaagaaaaggccaattcatctaagttttgatgttgacggactggacccatctttcacaccagctactggcacaccagtcgtgggaggtctgacatacagagaaggtctctacatcacagaagaaatctacaaaacagggctactctcaggattagatataatggaagtgaacccatccctggggaagacaccagaagaagtaactcgaacagtgaacacagcagttgcaataaccttggcttgtttcggacttgctcgggagggtaatcacaagcctattgactaccttaacccacctaagtaaatgtggaaacatccgatataaatctcatagttaatggcataattagaaagctaatcattttcttaagcatagagttatccttctaaagacttgttctttcagaaaaatgtttttccaattagtataaactctacaaattccctcttggtgtaaaattcaagatgtggaaattctaacttttttgaaatttaaaagcttatattttctaacttggcaaaagacttatccttagaaagagaagtgtacattgatttccaattaaaaatttgctggcattaaaaataagcacacttacataagcccccatacatagagtgggactcttggaatcaggagacaaagctaccacatgtggaaaggtactatgtgtccatgtcattcaaaaaatgtgattttttataataaactctttataacaagaaaatattgtg

SEQ ID NO: 371050 - DNA, 1467 bp, Homo sapiens
tagtgggtggagccagctgtcctcattagataaaggttgtttattcaacccaagtataaatggaaaaaaaagatgcgccctctgtcactgagggttgactgactggagagctcaagtgcagcaaagagaagtgtcagagcatgagcgccaagtccagaaccatagggattattggagctcctttctcaaagggacagagtgtgatgtgaaggattatggggacctgccctttgctgacatccctaatgacagtccctttcaaattgtgaagaatccaaggtctgtgggaaaagcaagcgagcagctggctggcaaggtggcagaagtcaagaagaacggaagaatcagcctggtgctgggcggagaccacagtttggcaattggaagcatctctggccatgccagggtccaccctgatcttggagtcatctgggtggatgctcacactgatatcaacactccactgacaaccacaagtggaaacttgcatggacaacctgtatctttcctcctgaaggaactaaaaggaaagattcccgatgtgccaggattctcctgggtgactccctgtatatctgccaaggatattgtgtatattggcttgagagacgtggaccctggggaacactacattttgaaaactctaggcattaaatacttttcaatgactgaagtggacagactaggaattggcaaggtgatggaagaaacactcagctatctactaggaagaaagaaaaggccaattcatctaagttttgatgttgacggactggacccatctttcacaccagctactggcacaccagtcgtgggaggtctgacatacagagaaggtctctacatcacagaagaaatctacaaaacagggctactctcaggattagatataatggaagtgaacccatccctggggaagacaccagaagaagtaactcgaacagtgaacacagcagttgcaataaccttggcttgtttcggacttgctcgggagggtaatcacaagcctattgactaccttaacccacctaagtaaatgtggaaacatccgatataaatctcatagttaatggcataattagaaagctaatcattttcttaagcatagagttatccttctaaagacttgttctttcagaaaaatgtttttccaattagtataaactctacaaattccctcttggtgtaaaattcaagatgtggaaattctaacttttttgaaatttaaaagcttatattttctaacttggcaaaagacttatccttagaaagagaagtgtacattgatttccaattaaaaatttgctggcattaaaaataagcacacttacataagcccccatacatagagtgggactcttggaatcaggagacaaagctaccacatgtggaaaggtactatgtgtccatgtcattcaaaaaatgtgattttttataataaactctttataacaagaaaatattgtg

SEQ ID NO: 371051 - DNA, 1571 bp, Homo sapiens
ccctattaagcccaaaccagaagattatcactgttacattttggtgtctagtttaactggatggattcaagaagtgttcactgagagcccagtatacagccgcaccagtgtgtgatactggtaacatgacgtcaagcaaaagcagacatgggtctaccttcccaagatttacagacctttcaggtttttcctttgcttatacttgtgaatatatgcctattttatacaattgagatcatcctacacagactgatttataatctactttttaatttagtaactcaaaactttttaattttagagtgtgatgtgaaggattatggggacctgccctttgctgacatccctaatgacagtccctttcaaattgtgaagaatccaaggtctgtgggaaaagcaagcgagcagctggctggcaaggtggcagaagtcaagaagaacggaagaatcagcctggtgctgggcggagaccacagtttggcaattggaagcatctctggccatgccagggtccaccctgatcttggagtcatctgggtggatgctcacactgatatcaacactccactgacaaccacaagtggaaacttgcatggacaacctgtatctttcctcctgaaggaactaaaaggaaagattcccgatgtgccaggattctcctgggtgactccctgtatatctgccaaggatattgtgtatattggcttgagagacgtggaccctggggaacactacattttgaaaactctaggcattaaatacttttcaatgactgaagtggacagactaggaattggcaaggtgatggaagaaacactcagctatctactaggaagaaagaaaaggccaattcatctaagttttgatgttgacggactggacccatctttcacaccagctactggcacaccagtcgtgggaggtctgacatacagagaaggtctctacatcacagaagaaatctacaaaacagggctactctcaggattagatataatggaagtgaacccatccctggggaagacaccagaagaagtaactcgaacagtgaacacagcagttgcaataaccttggcttgtttcggacttgctcgggagggtaatcacaagcctattgactaccttaacccacctaagtaaatgtggaaacatccgatataaatctcatagttaatggcataattagaaagctaatcattttcttaagcatagagttatccttctaaagacttgttctttcagaaaaatgtttttccaattagtataaactctacaaattccctcttggtgtaaaattcaagatgtggaaattctaacttttttgaaatttaaaagcttatattttctaacttggcaaaagacttatccttagaaagagaagtgtacattgatttccaattaaaaatttgctggcattaaaaataagcacacttacataagcccccatacatagagtgggactcttggaatcaggagacaaagctaccacatgtggaaaggtactatgtgtccatgtcattcaaaaaatgtgattttttataataaactctttataacaagaaaatattgtg

SEQ ID NO: 371052 - DNA, 1489 bp, Homo sapiens
tagtgggtggagccagctgtcctcattagataaaggttgtttattcaacccaagtataaatggaaaaaaaagatgcgccctctgtcactgagggttgactgactggagagctcaagtgcagcaaagagaagtgtcagagcatgagcgccaagtccagaaccatagggattattggagctcctttctcaaagggacagccacgaggaggggtggaagaaggccctacagtattgagaaaggctggtctgcttgagaaacttaaagaacaagagtgtgatgtgaaggattatggggacctgccctttgctgacatccctaatgacagtccctttcaaattgtgaagaatccaaggtctgtgggaaaagcaagcgagcagctggctggcaaggtggcagaagtcaagaagaacggaagaatcagcctggtgctgggcggagaccacagtttggcaattggaagcatctctggccatgccagggtccaccctgatcttggagtcatctgggtggatgctcacactgatatcaacactccactgacaaccacaagtggaaacttgcatggacaacctgtatctttcctcctgaaggaactaaaaggaaagattcccgatgtgccaggattctcctgggtgactccctgtatatctgccaaggatattgtgtatattggcttgagagacgtggaccctggggaacacagactaggaattggcaaggtgatggaagaaacactcagctatctactaggaagaaagaaaaggccaattcatctaagttttgatgttgacggactggacccatctttcacaccagctactggcacaccagtcgtgggaggtctgacatacagagaaggtctctacatcacagaagaaatctacaaaacagggctactctcaggattagatataatggaagtgaacccatccctggggaagacaccagaagaagtaactcgaacagtgaacacagcagttgcaataaccttggcttgtttcggacttgctcgggagggtaatcacaagcctattgactaccttaacccacctaagtaaatgtggaaacatccgatataaatctcatagttaatggcataattagaaagctaatcattttcttaagcatagagttatccttctaaagacttgttctttcagaaaaatgtttttccaattagtataaactctacaaattccctcttggtgtaaaattcaagatgtggaaattctaacttttttgaaatttaaaagcttatattttctaacttggcaaaagacttatccttagaaagagaagtgtacattgatttccaattaaaaatttgctggcattaaaaataagcacacttacataagcccccatacatagagtgggactcttggaatcaggagacaaagctaccacatgtggaaaggtactatgtgtccatgtcattcaaaaaatgtgattttttataataaactctttataacaagaaaatattgtg

SEQ ID NO: 371053 - DNA, 1483 bp, Homo sapiens
tagtgggtggagccagctgtcctcattagataaaggttgtttattcaacccaagtataaatggaaaaaaaagatgcgccctctgtcactgagggttgactgactggagagctcaagtgcagcaaagagaagtgtcagagcatgagcgccaagtccagaaccatagggattattggagctcctttctcaaagggacagccacgaggaggggtggaagaaggccctacagtattgagaaaggctggtctgcttgagaaacttaaagaacaagagtgtgatgtgaaggattatggggacctgccctttgctgacatccctaatgacagtccctttcaaattgtgaagaatccaaggtctgtgggaaaagcaagcgagcagctggctggcaaggtggcagaagtcaagaagaacggaagaatcagcctggtgctgggcggagaccacagtttggcaattggaagcatctctggccatgccagggtccaccctgatcttggagtcatctgggtggatgctcacactgatatcaacactccactgacaaccacaagtggaaacttgcatggacaacctgtatctttcctcctgaaggaactaaaaggaaagattcccgatgtgccaggattctcctgggtgactccctgtatatctgccaaggatattgtgtatattggcttgagagacgtggaccctggggaacactacattttgaaaactctaggcattaaatacttttcaatgactgaagtggacagactaggaattggcaaggtgatggaagaaacactcagctatctactaggaagaccagctactggcacaccagtcgtgggaggtctgacatacagagaaggtctctacatcacagaagaaatctacaaaacagggctactctcaggattagatataatggaagtgaacccatccctggggaagacaccagaagaagtaactcgaacagtgaacacagcagttgcaataaccttggcttgtttcggacttgctcgggagggtaatcacaagcctattgactaccttaacccacctaagtaaatgtggaaacatccgatataaatctcatagttaatggcataattagaaagctaatcattttcttaagcatagagttatccttctaaagacttgttctttcagaaaaatgtttttccaattagtataaactctacaaattccctcttggtgtaaaattcaagatgtggaaattctaacttttttgaaatttaaaagcttatattttctaacttggcaaaagacttatccttagaaagagaagtgtacattgatttccaattaaaaatttgctggcattaaaaataagcacacttacataagcccccatacatagagtgggactcttggaatcaggagacaaagctaccacatgtggaaaggtactatgtgtccatgtcattcaaaaaatgtgattttttataataaactctttataacaagaaaatattgtg

SEQ ID NO: 371054 - DNA, 1429 bp, Homo sapiens
tagtgggtggagccagctgtcctcattagataaaggttgtttattcaacccaagtataaatggaaaaaaaagatgcgccctctgtcactgagggttgactgactggagagctcaagtgcagcaaagagaagtgtcagagcatgagcgccaagtccagaaccatagggattattggagctcctttctcaaagggacagccacgaggaggggtggaagaaggccctacagtattgagaaaggctggtctgcttgagaaacttaaagaacaagagtgtgatgtgaaggattatggggacctgccctttgctgacatccctaatgacagtccctttcaaattgtgaagaatccaaggtctgtgggaatcagcctggtgctgggcggagaccacagtttggcaattggaagcatctctggccatgccagggtccaccctgatcttggagtcatctgggtggatgctcacactgatatcaacactccactgacaaccacaagtggaaacttgcatggacaacctgtatctttcctcctgaaggaactaaaaggaaagattcccgatgtgccaggattctcctgggtgactccctgtatatctgccaaggatattgtgtatattggcttgagagacgtggaccctggggaacactacattttgaaaactctaggcattaaatacttttcaatgactgaagtggacagactaggaattggcaaggtgatggaagaaacactcagctatctactaggaagaccagctactggcacaccagtcgtgggaggtctgacatacagagaaggtctctacatcacagaagaaatctacaaaacagggctactctcaggattagatataatggaagtgaacccatccctggggaagacaccagaagaagtaactcgaacagtgaacacagcagttgcaataaccttggcttgtttcggacttgctcgggagggtaatcacaagcctattgactaccttaacccacctaagtaaatgtggaaacatccgatataaatctcatagttaatggcataattagaaagctaatcattttcttaagcatagagttatccttctaaagacttgttctttcagaaaaatgtttttccaattagtataaactctacaaattccctcttggtgtaaaattcaagatgtggaaattctaacttttttgaaatttaaaagcttatattttctaacttggcaaaagacttatccttagaaagagaagtgtacattgatttccaattaaaaatttgctggcattaaaaataagcacacttacataagcccccatacatagagtgggactcttggaatcaggagacaaagctaccacatgtggaaaggtactatgtgtccatgtcattcaaaaaatgtgattttttataataaactctttataacaagaaaatattgtg

SEQ ID NO: 371055 - DNA, 1497 bp, Homo sapiens
tagtgggtggagccagctgtcctcattagataaaggttgtttattcaacccaagtataaatggaaaaaaaagatgcgccctctgtcactgagggttgactgactggagagctcaagtgcagcaaagagaagtgtcagagcatgagcgccaagtccagaaccatagggattattggagctcctttctcaaagggacagccacgaggaggggtggaagaaggccctacagtattgagaaaggctggtctgcttgagaaacttaaagaacaagagtgtgatgtgaaggattatggggacctgccctttgctgacatccctaatgacagtccctttcaaattgtgaagaatccaaggtctgtgggaaaagcaagcgagcagctggctggcaaggtggcagaagtcaagaagaacggaagaatcagcctggtgctgggcggagaccacagtttggcaattggaagcatctctggccatgccagggtccaccctgatcttggagtcatctgggtggatgctcacactgatatcaacactccactgacaaccacaagtggaaacttgcatggacaacctgtatctttcctcctgaaggaactaaaaggaaagctgccaaggatattgtgtatattggcttgagagacgtggaccctggggaacactacattttgaaaactctaggcattaaatacttttcaatgactgaagtggacagactaggaattggcaaggtgatggaagaaacactcagctatctactaggaagaaagaaaaggccaattcatctaagttttgatgttgacggactggacccatctttcacaccagctactggcacaccagtcgtgggaggtctgacatacagagaaggtctctacatcacagaagaaatctacaaaacagggctactctcaggattagatataatggaagtgaacccatccctggggaagacaccagaagaagtaactcgaacagtgaacacagcagttgcaataaccttggcttgtttcggacttgctcgggagggtaatcacaagcctattgactaccttaacccacctaagtaaatgtggaaacatccgatataaatctcatagttaatggcataattagaaagctaatcattttcttaagcatagagttatccttctaaagacttgttctttcagaaaaatgtttttccaattagtataaactctacaaattccctcttggtgtaaaattcaagatgtggaaattctaacttttttgaaatttaaaagcttatattttctaacttggcaaaagacttatccttagaaagagaagtgtacattgatttccaattaaaaatttgctggcattaaaaataagcacacttacataagcccccatacatagagtgggactcttggaatcaggagacaaagctaccacatgtggaaaggtactatgtgtccatgtcattcaaaaaatgtgattttttataataaactctttataacaagaaaatattgtg

SEQ ID NO: 371056 - DNA, 1604 bp, Homo sapiens
ggacttactgagaaagggaagtaaagaaggaagctaccaaagtaatgggagcacaatcgtttctttatagaggagccctgggaaagaagggcccagcaggactggggcacaaagtaggtaaatgccaactggttcaaggcaaagtcaaagcaatcaaggggaggcacacatcctcttcttaattgtgtattatttttacatgatttcttctgtatttatattctaaatataagatatacgcaatccaatatgtgtctttacctttgaatgtaggatttgttcaagagaatcatacataaccaagtgaaaacattgtaattttagattcccgatgtgccaggattctcctgggtgactccctgtatatctgccaaggatattgtgtatattggcttgagagacgtggaccctggggaacaagtaagcttattccttgatgtgatttgcctccatttttgtccctttgtgtgctagatatgctttactgaccaactctatgagagaaaattaaacatcaagacacacacacacacacatgcccacacacatatatttatatacatgtacatacatatgtatgtatccaggcaattaaatctcaattgacttgctgttaaaaataaatacaaataaaactatattgagttaggttcatagaacctaaatgttttatatattttactatatttatatttcccttaaaaggagacaggcgggcacagtcagccttattaattataattatcttaatttctcttttatagctacattttgaaaactctaggcattaaatacttttcaatgactgaagtggacagactaggaattggcaaggtgatggaagaaacactcagctatctactaggaagaaagaaaaggccaattcatctaagttttgatgttgacggactggacccatctttcacaccagctactggcacaccagtcgtgggaggtctgacatacagagaaggtctctacatcacagaagaaatctacaaaacagggctactctcaggattagatataatggaagtgaacccatccctggggaagacaccagaagaagtaactcgaacagtgaacacagcagttgcaataaccttggcttgtttcggacttgctcgggagggtaatcacaagcctattgactaccttaacccacctaagtaaatgtggaaacatccgatataaatctcatagttaatggcataattagaaagctaatcattttcttaagcatagagttatccttctaaagacttgttctttcagaaaaatgtttttccaattagtataaactctacaaattccctcttggtgtaaaattcaagatgtggaaattctaacttttttgaaatttaaaagcttatattttctaacttggcaaaagacttatccttagaaagagaagtgtacattgatttccaattaaaaatttgctggcattaaaaataagcacacttacataagcccccatacatagagtgggactcttggaatcaggagacaaagctaccacatgtggaaaggtactatgtgtccatgtcattcaaaaaatgtgattttttataataaactctttataacaagaaaatattgtg

SEQ ID NO: 371057 - DNA, 967 bp, Homo sapiens
tagtgggtggagccagctgtcctcattagataaaggttgtttattcaacccaagtataaatggaaaaaaaagatgcgccctctgtcactgagggttgactgactggagagctcaagtgcagcaaagagaagtgtcagagcatgagcgccaagtccagaaccatagggattattggagctcctttctcaaagggacagccacgaggaggggtggaagaaggccctacagtattgagaaaggctggtctgcttgagaaacttaaagaacaagagtgtgatgtgaaggattatggggacctgccctttgctgacatccctaatgacagtccctttcaaattgtgaagaatccaaggtctgtgggaaaagcaagcgagcagctggctggcaaggtggcagaagtcaagaagaacggaagaatcagcctggtgctgggcggagaccacaggtcttgttgaataactgtgtctatgggaatctggcacaaaggaagtaaccaaggccataagaagagagaaaatttagaaatatagacagaaaagcattgacctatattttatatcaaattttctgcctttaaaaaaattttataggttacttttattatagaaacagacttcgctcaatttgaagtcttacaatatctgtattttgacctagtacagcagaaaatgtatgaaatatgaatggatttcatctaaatattcatcacaagcttacatttctaaataagtatgtgaggcaattcatagcttatttgttcttaattgccgataatatatacaactcatataggtcaacaatttcaaagcatgtgtttttcattataaaagtaatgatcataacatttttgaaagcatcagacacacacacacaagaaaaaaaatgtggtaattgtacttctctagcaaccatttcaaccagaattgaaaatctggcacatttctttcatggcatcttttttttcctt

SEQ ID NO: 371058 - DNA, 1168 bp, Homo sapiens
  misc_feature (886)..(886): n is a, c, g, or t
  misc_feature (888)..(888): n is a, c, g, or t
  misc_feature (910)..(910): n is a, c, g, or t
  misc_feature (1026)..(1026): n is a, c, g, or t
tagtgggtggagccagctgtcctcattagataaaggttgtttattcaacccaagtataaatggaaaaaaaagatgcgccctctgtcactgagggttgactgactggagagctcaagtgcagcaaagagaagtgtcagagcatgagcgccaagtccagaaccatagggattattggagctcctttctcaaagggacagccacgaggaggggtggaagaaggccctacagtattgagaaaggctggtctgcttgagaaacttaaagaacaagagtgtgatgtgaaggattatggggacctgccctttgctgacatccctaatgacagtccctttcaaattgtgaagaatccaaggtctgtgggaaaagcaagcgagcagctggctggcaaggtggcagaagtcaagaagaacggaagaatcagcctggtgctgggcggagaccacaggtcttgttgaataactgtgtctatgggaatctggcacaaaggaagtaaccaaggccataagaagagagaaaatttagaaatatagacagaaaagcattgacctatattttatatcaaattttctgcctttaaaaaaattttataggttacttttattatagaaacagacttcgctcaatttgaagtcttacaatatctgtattttgacctagtacagcagaaaatgtatgaaatatgaatggatttcatctaaatattcatcacaagcttacatttctaaataagtatgtgaggcaattcatagcttatttgttcttaattgccgataatatatacaactcatataggtcaacaatttcaaagcatgtgtttttcattataaaagtaatgatcataacatttttgaaagcatcagacacacacacacacacacacactttntntctctctctctctctctccagnggctggtaagttctgaaggactggggactgctagacataattgaaagtaaggtaacaggctaaggagaagctcagtttgaacattgcaatggtaaagtcctcaaagccttggactnttcaagtattttctggtggcattaattggattttcctgcttagctgggttcagacataggatttgcatttcttggagctttcatccaacaggctacatttttagtctggaagagtctaataagccttatttgacatctgagg

SEQ ID NO: 371059 - DNA, 913 bp, Homo sapiens
tagtgggtggagccagctgtcctcattagataaaggttgtttattcaacccaagtataaatggaaaaaaaagatgcgccctctgtcactgagggttgactgactggagagctcaagtgcagcaaagagaagtgtcagagcatgagcgccaagtccagaaccatagggattattggagctcctttctcaaagggacagccacgaggaggggtggaagaaggccctacagtattgagaaaggctggtctgcttgagaaacttaaagaacaagagtgtgatgtgaaggattatggggacctgccctttgctgacatccctaatgacagtccctttcaaattgtgaagaatccaaggtctgtgggaaaagcaagcgagcagctggctggcaaggtggcagaagtcaagaagaacggaagaatcagcctggtgctgggcggagaccacaggtcttgttgaataactgtgtctatgggaatctggcacaaaggaagtaaccaaggccataagaagagagaaaatttagaaatatagacagaaaagcattgacctatattttatatcaaattttctgcctttaaaaaaattttataggttacttttattatagaaacagacttcgctcaatttgaagtcttacaatatctgtattttgacctagtacagcatttctaaataagtatgtgaggcaattcatagcttatttgttcttaattgccgataatatatacaactcatataggtcaacaatttcaaagcatgtgtttttcattataaaagtaatgatcataacatttttgaaagcatcagacacacacacacaagaaaaaaaatgtggtaattgtacttctctagcaaccatttcaaccagaattgaaaatctggcacatttctttcatggcatcttttttttcctt

SEQ ID NO: 371060 - DNA, 894 bp, Homo sapiens
tagtgggtggagccagctgtcctcattagataaaggttgtttattcaacccaagtataaatggaaaaaaaagatgcgccctctgtcactgagggttgactgactggagagctcaagtgcagcaaagagaagtgtcagagcatgagcgccaagtccagaaccatagggattattggagctcctttctcaaagggacagagtgtgatgtgaaggattatggggacctgccctttgctgacatccctaatgacagtccctttcaaattgtgaagaatccaaggtctgtgggaaaagcaagcgagcagctggctggcaaggtggcagaagtcaagaagaacggaagaatcagcctggtgctgggcggagaccacaggtcttgttgaataactgtgtctatgggaatctggcacaaaggaagtaaccaaggccataagaagagagaaaatttagaaatatagacagaaaagcattgacctatattttatatcaaattttctgcctttaaaaaaattttataggttacttttattatagaaacagacttcgctcaatttgaagtcttacaatatctgtattttgacctagtacagcagaaaatgtatgaaatatgaatggatttcatctaaatattcatcacaagcttacatttctaaataagtatgtgaggcaattcatagcttatttgttcttaattgccgataatatatacaactcatataggtcaacaatttcaaagcatgtgtttttcattataaaagtaatgatcataacatttttgaaagcatcagacacacacacacaagaaaaaaaatgtggtaattgtacttctctagcaaccatttcaaccagaattgaaaatctggcacatttctttcatggcatcttttttttcctt

SEQ ID NO: 371061 - DNA, 799 bp, Homo sapiens
ctgaagtactttattttttaattgttcagccacgaggaggggtggaagaaggccctacagtattgagaaaggctggtctgcttgagaaacttaaagaacaagagtgtgatgtgaaggattatggggacctgccctttgctgacatccctaatgacagtccctttcaaattgtgaagaatccaaggtctgtgggaaaagcaagcgagcagctggctggcaaggtggcagaagtcaagaagaacggaagaatcagcctggtgctgggcggagaccacaggtcttgttgaataactgtgtctatgggaatctggcacaaaggaagtaaccaaggccataagaagagagaaaatttagaaatatagacagaaaagcattgacctatattttatatcaaattttctgcctttaaaaaaattttataggttacttttattatagaaacagacttcgctcaatttgaagtcttacaatatctgtattttgacctagtacagcagaaaatgtatgaaatatgaatggatttcatctaaatattcatcacaagcttacatttctaaataagtatgtgaggcaattcatagcttatttgttcttaattgccgataatatatacaactcatataggtcaacaatttcaaagcatgtgtttttcattataaaagtaatgatcataacatttttgaaagcatcagacacacacacacaagaaaaaaaatgtggtaattgtacttctctagcaaccatttcaaccagaattgaaaatctggcacatttctttcatggcatcttttttttcctt

SEQ ID NO: 371062 - DNA, 1097 bp, Homo sapiens
tagtgggtggagccagctgtcctcattagataaaggttgtttattcaacccaagtataaatggaaaaaaaagatgcgccctctgtcactgagggttgactgactggagagctcaagtgcagcaaagagaagtgtcagagcatgagcgccaagtccagaaccatagggattattggagctcctttctcaaagggacagccacgaggaggggtggaagaaggccctacagtattgagaaaggctggtctgcttgagaaacttaaagaacaagagtgtgatgtgaaggattatggggacctgccctttgctgacatccctaatgacagtccctttcaaattgtgaagaatccaaggtctgtgggaaaagcaagcgagcagctggctggcaaggtggcagaagtcaagaagaacggaagaatcagcctggtgctgggcggagaccacagtttggcaattggaagcatctctggccatgccagggtccaccctgatcttggagtcatctgggtggatgctcacactgatatcaacactccactgacaaccacaagtggaaacttgcatggacaacctgtatctttcctcctgaaggaactaaaaggaaagattcccgatgtgccaggattctcctgggtgactccctgtatatctgccaaggatattgtgtatattggcttgagagacgtggaccctggggaacaactaacatttttgaaaactctagggcctttaaattacttttcaaatgacctgacagttggaccagactcaggacttgggccagggtgactgggcagaaaacactccaggtaatcttaccttaagggaacgaacacggaagaaaggcccaatttcactgctaaagggttttcggaatggctttgacccggcacctgtggaagccccacttctgtttccaaacagccccagcgtacgttgtggccaccacccacaggtgtcgtggcggaaaaggcgtcttgacaccattacacacgtacgccataggctcctccttcgcctatcaccagcgcatcgcgaaatttctttcgacaccaacacccgcgcggtacctccccccatcgggacgaccgaacttct

SEQ ID NO: 371063 - DNA, 913 bp, Homo sapiens
tagtgggtggagccagctgtcctcattagataaaggttgtttattcaacccaagtataaatggaaaaaaaagatgcgccctctgtcactgagggttgactgactggagagctcaagtgcagcaaagagaagtgtcagagcatgagcgccaagtccagaaccatagggattattggagctcctttctcaaagggacagccacgaggaggggtggaagaaggccctacagtattgagaaaggctggtctgcttgagaaacttaaagaacaagagtgtgatgtgaaggattatggggacctgccctttgctgacatccctaatgacagtccctttcaaattgtgaagaatccaaggtctgtgggaatcagcctggtgctgggcggagaccacaggtcttgttgaataactgtgtctatgggaatctggcacaaaggaagtaaccaaggccataagaagagagaaaatttagaaatatagacagaaaagcattgacctatattttatatcaaattttctgcctttaaaaaaattttataggttacttttattatagaaacagacttcgctcaatttgaagtcttacaatatctgtattttgacctagtacagcagaaaatgtatgaaatatgaatggatttcatctaaatattcatcacaagcttacatttctaaataagtatgtgaggcaattcatagcttatttgttcttaattgccgataatatatacaactcatataggtcaacaatttcaaagcatgtgtttttcattataaaagtaatgatcataacatttttgaaagcatcagacacacacacacaagaaaaaaaatgtggtaattgtacttctctagcaaccatttcaaccagaattgaaaatctggcacatttctttcatggcatcttttttttcctt

SEQ ID NO: 371064 - DNA, 497 bp, Homo sapiens
gagtagtccttctatatcatagaggcttttcaaaaaagaaattttaaaatttcagatataatggtttatgaactaatgtatttactgggagaagcacctatctaaatcataagagaaagaactatctccctgctccctagaaactccttttctaaaagatggaaaataaaatggcagattaagatttaatattacagcttataactttgttgatatgccatagtttgttgatatgccatagtatatcaataaaaagtttttattgatacaattataatatttggtccttatgatgatacaagaggttaaaacctccttatgttaaatgctcagaaataatgtcttttgaactaatgaccaagggatgggtttataaacttgcaaagtatctgcctagtacatgggaaaaactaaacgtcctggaggacaaagcagatatcatcatattatcacattaagaataaccaaaggacaggccacaaatttccctcagctgc

SEQ ID NO: 371065 - DNA, 643 bp, Homo sapiens
cactcagctatctactaggaagggtaggattcttttgtgtgtgcacacatgtgtgtgcaacagaaaaggttgctactgacaaccaaagttattaataaagtctttacatgaaataatgggttgctactttttataaaacaagttaacagattattatctatgaaatgtgaagccatcaaccttaaactgaaatcctttcccacttcttaaaagaaagaaaaggccaattcatctaagttttgatgttgacggactggacccatctttcacaccagctactggcacaccagtcgtgggaggtctgacatacagagaaggtctctacatcacagaagaaatctacaaaacaggtagttaacaatctgaggtaatagagaagcaagtgtacacttgactaatatatatttatacctccttgacctgaaaccaagtcccagctgacactttcagaatgtccatcagtcacatgatgcaataactaaagtgttttccatcggttactacctttttctgttagtggataatctttcaagtctgtctgtactactttcaaaatgtcaactattttataaattacattattacaatttgttgttgtagggctactctcaggattagatataatggaagtgaacccatccct

SEQ ID NO: 371066 - DNA, 1286 bp, Homo sapiens
tagtgggtggagccagctgtcctcattagataaaggttgtttattcaacccaagtataaatggaaaaaaaagatgcgccctctgtcactgagggttgactgactggagagctcaagtgcagcaaagagaagtgtcagagcatgagcgccaagtccagaaccatagggattattggagctcctttctcaaagggacagccacgaggaggggtggaagaaggccctacagtattgagaaaggctggtctgcttgagaaacttaaagaacaagagtgtgatgtgaaggattatggggacctgccctttgctgacatccctaatgacagtccctttcaaattgtgaagaatccaaggtctgtgggaaaagcaagcgagcagctggctggcaaggtggcagaagtcaagaagaacggaagaatcagcctggtgctgggcggagaccacagtttggcaattggaagcatctctggccatgccagggtccaccctgatcttggagtcatctgggtggatgctcacactgatatcaacactccactgacaaccacaagtggaaacttgcatggacaacctgtatctttcctcctgaaggaactaaaaggaaagattcccgatgtgccaggattctcctgggtgactccctgtatatctgccaaggatattgtgtatattggcttgagagacgtggaccctggggaacactacattttgaaaactctaggcattaaatacttttcaatgactgaagtggataactcgaacagtgaacacagcagttgcaataaccttggcttgtttcggacttgctcgggagggtaatcacaagcctattgactaccttaacccacctaagtaaatgtggaaacatccgatataaatctcatagttaatggcataattagaaagctaatcattttcttaagcatagagttatccttctaaagacttgttctttcagaaaaatgtttttccaattagtataaactctacaaattccctcttggtgtaaaattcaagatgtggaaattctaacttttttgaaatttaaaagcttatattttctaacttggcaaaagacttatccttagaaagagaagtgtacattgatttccaattaaaaatttgctggcattaaaaataagcacacttacataagcccccatacatagagtgggactcttggaatcaggagacaaagctaccacatgtggaaaggtactatgtgtccatgtcattcaaaaaatgtgattttttataataaactctttataacaagaaaatattgtg

SEQ ID NO: 371067 - DNA, 449 bp, Homo sapiens
tagtgggtggagccagctgtcctcattagataaaggttgtttattcaacccaagtataaatggaaaaaaaagatgcgccctctgtcactgagggttgactgactggagagctcaagtgcagcaaagagaagtgtcagagcatgagcgccaagtccagaaccatagggattattggagctcctttctcaaagggacagccacgaggaggggtggaagaaggccctacagtattgagaaaggctggtctgcttgagaaacttaaagaacaagagtgtgatgtgaaggattatggggacctgccctttgctgacatccctaatgacagtccctttcaaattgtgaagaatccaaggtctgtgggaaaagcaagcgagcagctggctggcaaggtggcaagcccattttttggcattgcaaggtgccaccttgaccttgaagcttcgggtggg

SEQ ID NO: 371068 - DNA, 1395 bp, Homo sapiens
  misc_feature (48)..(48): n is a, c, g, or t
gtgcttatacaacccatatttttcgtccaaggcacggccctagcgcgnaccaccacgaggaggggtggaagaaggccctacagtattgagaaaggctggtctgcttgagaaacttaaagaacaagagtgtgatgtgaaggattatggggacctgccctttgctgacatccctaatgacagtccctttcaaattgtgaagaatccaaggtctgtgggaaaagcaagcgagcagctggctggcaaggtggcagaagtcaagaagaacggaagaatcagcctggtgctgggcggagaccacagtttggcaattggaagcatctctggccatgccagggtccaccctgatcttggagtcatctgggtggatgctcacactgatatcaacactccactgacaaccacaagtggaaacttgcatggacaacctgtatctttcctcctgaaggaactaaaaggaaagattcccgatgtgccaggattctcctgggtgactccctgtatatctgccaaggatattgtgtatattggcttgagagacgtggaccctggggaacactacattttgaaaactctaggcattaaatacttttcaatgactgaagtggacagactaggaattggcaaggtgatggaagaaacactcagctatctactaggaagaaagaaaaggccaattcatctaagttttgatgttgacggactggacccatctttcacaccagctactggcacaccagtcgtgggaggtctgacatacagagaaggtctctacatcacagaagaaatctacaaaacagggctactctcaggattagatataatggaagtgaacccatccctggggaagacaccagaagaagtaactcgaacagtgaacacagcagttgcaataaccttggcttgtttcggacttgctcgggagggtaatcacaagcctattgactaccttaacccacctaagtaaatgtggaaacatccgatataaatctcatagttaatggcataattagaaagctaatcattttcttaagcatagagttatccttctaaagacttgttctttcagaaaaatgtttttccaattagtataaactctacaaattccctcttggtgtaaaattcaagatgtggaaattctaacttttttgaaatttaaaagcttatattttctaacttggcaaaagacttatccttagaaagagaagtgtacattgatttccaattaaaaatttgctggcattaaaaataagcacacttacataagcccccatacatagagtgggactcttggaatcaggagacaaagctaccacatgtggaaaggtactatgtgtccatgtcattcaaaaaatgtgattttttataataaactctttataacaagaaaatattgtg

SEQ ID NO: 371069 - DNA, 1386 bp, Homo sapiens
tcttactctgttgtccaggctagagtacagtggcacgatcatggctcactacagccttaacctcccaagttcaggtgatcctcttgcctcagcctcccgagtagctgggactacagagtgtgatgtgaaggattatggggacctgccctttgctgacatccctaatgacagtccctttcaaattgtgaagaatccaaggtctgtgggaaaagcaagcgagcagctggctggcaaggtggcagaagtcaagaagaacggaagaatcagcctggtgctgggcggagaccacagtttggcaattggaagcatctctggccatgccagggtccaccctgatcttggagtcatctgggtggatgctcacactgatatcaacactccactgacaaccacaagtggaaacttgcatggacaacctgtatctttcctcctgaaggaactaaaaggaaagattcccgatgtgccaggattctcctgggtgactccctgtatatctgccaaggatattgtgtatattggcttgagagacgtggaccctggggaacactacattttgaaaactctaggcattaaatacttttcaatgactgaagtggacagactaggaattggcaaggtgatggaagaaacactcagctatctactaggaagaaagaaaaggccaattcatctaagttttgatgttgacggactggacccatctttcacaccagctactggcacaccagtcgtgggaggtctgacatacagagaaggtctctacatcacagaagaaatctacaaaacagggctactctcaggattagatataatggaagtgaacccatccctggggaagacaccagaagaagtaactcgaacagtgaacacagcagttgcaataaccttggcttgtttcggacttgctcgggagggtaatcacaagcctattgactaccttaacccacctaagtaaatgtggaaacatccgatataaatctcatagttaatggcataattagaaagctaatcattttcttaagcatagagttatccttctaaagacttgttctttcagaaaaatgtttttccaattagtataaactctacaaattccctcttggtgtaaaattcaagatgtggaaattctaacttttttgaaatttaaaagcttatattttctaacttggcaaaagacttatccttagaaagagaagtgtacattgatttccaattaaaaatttgctggcattaaaaataagcacacttacataagcccccatacatagagtgggactcttggaatcaggagacaaagctaccacatgtggaaaggtactatgtgtccatgtcattcaaaaaatgtgattttttataataaactctttataacaagaaaatattgtg

SEQ ID NO: 371070 - DNA, 1443 bp, Homo sapiens
tagtgggtggagccagctgtcctcattagataaaggttgtttattcaacccaagtataaatggaaaaaaaagatgcgccctctgtcactgagggttgactgactggagagctcaagtgcagcaaagagaagtgtcagagcatgagcgccaagtccagaaccatagggattattggagctcctttctcaaagggacagccacgaggaggggtggaagaaggccctacagtattgagaaaggctggtctgcttgagaaacttaaagaacaagagtgtgatgtgaaggattatggggacctgccctttgctgacatccctaatgacagtccctttcaaattgtgaagaatccaaggtctgtgggaatcagcctggtgctgggcggagaccacagtttggcaattggaagcatctctggccatgccagggtccaccctgatcttggagtcatctgggtggatgctcacactgatatcaacactccactgacaaccacaagtggaaacttgcatggacaacctgtatctttcctcctgaaggaactaaaaggaaagctgccaaggatattgtgtatattggcttgagagacgtggaccctggggaacactacattttgaaaactctaggcattaaatacttttcaatgactgaagtggacagactaggaattggcaaggtgatggaagaaacactcagctatctactaggaagaaagaaaaggccaattcatctaagttttgatgttgacggactggacccatctttcacaccagctactggcacaccagtcgtgggaggtctgacatacagagaaggtctctacatcacagaagaaatctacaaaacagggctactctcaggattagatataatggaagtgaacccatccctggggaagacaccagaagaagtaactcgaacagtgaacacagcagttgcaataaccttggcttgtttcggacttgctcgggagggtaatcacaagcctattgactaccttaacccacctaagtaaatgtggaaacatccgatataaatctcatagttaatggcataattagaaagctaatcattttcttaagcatagagttatccttctaaagacttgttctttcagaaaaatgtttttccaattagtataaactctacaaattccctcttggtgtaaaattcaagatgtggaaattctaacttttttgaaatttaaaagcttatattttctaacttggcaaaagacttatccttagaaagagaagtgtacattgatttccaattaaaaatttgctggcattaaaaataagcacacttacataagcccccatacatagagtgggactcttggaatcaggagacaaagctaccacatgtggaaaggtactatgtgtccatgtcattcaaaaaatgtgattttttataataaactctttataacaagaaaatattgtg

SEQ ID NO: 371071 - DNA, 1831 bp, Homo sapiens
tagtgggtggagccagctgtcctcattagataaaggttgtttattcaacccaagtataaatggaaaaaaaagatgcgccctctgtcactgagggttgactgactggagagctcaagtgcagcaaagagaagtgtcagagcatgagcgccaagtccagaaccatagggattattggagctcctttctcaaagggacagccacgaggaggggtggaagaaggccctacagtattgagaaaggctggtctgcttgagaaacttaaagaacaagagtgtgatgtgaaggattatggggacctgccctttgctgacatccctaatgacagtccctttcaaattgtgaagaatccaaggtctgtgggaatcagcctggtgctgggcggagaccacagtttggcaattggaagcatctctggccatgccagggtccaccctgatcttggagtcatctgggtggatgctcacactgatatcaacactccactgacaaccacaagtggaaacttgcatggacaacctgtatctttcctcctgaaggaactaaaaggaaagattcccgatgtgccaggattctcctgggtgactccctgtatatctgccaaggatattgtgtatattggcttgagagacgtggaccctggggaacaagtaagcttattccttgatgtgatttgcctccatttttgtccctttgtgtgctagatatgctttactgaccaactctatgagagaaaattaaacatcaagacacacacacacacacatgcccacacacatatatttatatacatgtacatacatatgtatgtatccaggcaattaaatctcaattgacttgctgttaaaaataaatacaaataaaactatattgagttaggttcatagaacctaaatgttttatatattttactatatttatatttcccttaaaaggagacaggcgggcacagtcagccttattaattataattatcttaatttctcttttatagctacattttgaaaactctaggcattaaatacttttcaatgactgaagtggacagactaggaattggcaaggtgatggaagaaacactcagctatctactaggaagaaagaaaaggccaattcatctaagttttgatgttgacggactggacccatctttcacaccagctactggcacaccagtcgtgggaggtctgacatacagagaaggtctctacatcacagaagaaatctacaaaacagggctactctcaggattagatataatggaagtgaacccatccctggggaagacaccagaagaagtaactcgaacagtgaacacagcagttgcaataaccttggcttgtttcggacttgctcgggagggtaatcacaagcctattgactaccttaacccacctaagtaaatgtggaaacatccgatataaatctcatagttaatggcataattagaaagctaatcattttcttaagcatagagttatccttctaaagacttgttctttcagaaaaatgtttttccaattagtataaactctacaaattccctcttggtgtaaaattcaagatgtggaaattctaacttttttgaaatttaaaagcttatattttctaacttggcaaaagacttatccttagaaagagaagtgtacattgatttccaattaaaaatttgctggcattaaaaataagcacacttacataagcccccatacatagagtgggactcttggaatcaggagacaaagctaccacatgtggaaaggtactatgtgtccatgtcattcaaaaaatgtgattttttataataaactctttataacaagaaaatattgtg

SEQ ID NO: 371072 - DNA, 1181 bp, Homo sapiens
tagtgggtggagccagctgtcctcattagataaaggttgtttattcaacccaagtataaatggaaaaaaaagatgcgccctctgtcactgagggttgactgactggagagctcaagtgcagcaaagagaagtgtcagagcatgagcgccaagtccagaaccatagggattattggagctcctttctcaaagggacagccacgaggaggggtggaagaaggccctacagtattgagaaaggctggtctgcttgagaaacttaaagaacaagtgggtgactccctgtatatctgccaaggatattgtgtatattggcttgagagacgtggaccctggggaacactacattttgaaaactctaggcattaaatacttttcaatgactgaagtggacagactaggaattggcaaggtgatggaagaaacactcagctatctactaggaagaaagaaaaggccaattcatctaagttttgatgttgacggactggacccatctttcacaccagctactggcacaccagtcgtgggaggtctgacatacagagaaggtctctacatcacagaagaaatctacaaaacagggctactctcaggattagatataatggaagtgaacccatccctggggaagacaccagaagaagtaactcgaacagtgaacacagcagttgcaataaccttggcttgtttcggacttgctcgggagggtaatcacaagcctattgactaccttaacccacctaagtaaatgtggaaacatccgatataaatctcatagttaatggcataattagaaagctaatcattttcttaagcatagagttatccttctaaagacttgttctttcagaaaaatgtttttccaattagtataaactctacaaattccctcttggtgtaaaattcaagatgtggaaattctaacttttttgaaatttaaaagcttatattttctaacttggcaaaagacttatccttagaaagagaagtgtacattgatttccaattaaaaatttgctggcattaaaaataagcacacttacataagcccccatacatagagtgggactcttggaatcaggagacaaagctaccacatgtggaaaggtactatgtgtccatgtcattcaaaaaatgtgattttttataataaactctttataacaagaaaatattgtg

SEQ ID NO: 371073 - DNA, 1371 bp, Homo sapiens
tagtgggtggagccagctgtcctcattagataaaggttgtttattcaacccaagtataaatggaaaaaaaagatgcgccctctgtcactgagggttgactgactggagagctcaagtgcagcaaagagaagtgtcagagcatgagcgccaagtccagaaccatagggattattggagctcctttctcaaagggacagccacgaggaggggtggaagaaggccctacagtattgagaaaggctggtctgcttgagaaacttaaagaacaagagtgtgatgtgaaggattatggggacctgccctttgctgacatccctaatgacagtccctttcaaattgtgaagaatccaaggtctgtgggaaaagcaagcgagcagctggctggcaaggtggcagaagtcaagaagaacggaagaatcagcctggtgctgggcggagaccacagtttggcaattggaagcatctctggccatgccagggtccaccctgatcttggagtcatctgggtggatgctcacactgatatcaacactacattttgaaaactctaggcattaaatacttttcaatgactgaagtggacagactaggaattggcaaggtgatggaagaaacactcagctatctactaggaagaaagaaaaggccaattcatctaagttttgatgttgacggactggacccatctttcacaccagctactggcacaccagtcgtgggaggtctgacatacagagaaggtctctacatcacagaagaaatctacaaaacagggctactctcaggattagatataatggaagtgaacccatccctggggaagacaccagaagaagtaactcgaacagtgaacacagcagttgcaataaccttggcttgtttcggacttgctcgggagggtaatcacaagcctattgactaccttaacccacctaagtaaatgtggaaacatccgatataaatctcatagttaatggcataattagaaagctaatcattttcttaagcatagagttatccttctaaagacttgttctttcagaaaaatgtttttccaattagtataaactctacaaattccctcttggtgtaaaattcaagatgtggaaattctaacttttttgaaatttaaaagcttatattttctaacttggcaaaagacttatccttagaaagagaagtgtacattgatttccaattaaaaatttgctggcattaaaaataagcacacttacataagcccccatacatagagtgggactcttggaatcaggagacaaagctaccacatgtggaaaggtactatgtgtccatgtcattcaaaaaatgtgattttttataataaactctttataacaagaaaatattgtg

SEQ ID NO: 371074 - DNA, 1148 bp, Homo sapiens
  misc_feature (1092)..(1092): n is a, c, g, or t
  misc_feature (1139)..(1139): n is a, c, g, or t
tagtgggtggagccagctgtcctcattagataaaggttgtttattcaacccaagtataaatggaaaaaaaagatgcgccctctgtcactgagggttgactgactggagagctcaagtgcagcaaagagaagtgtcagagcatgagcgccaagtccagaaccatagggattattggagctcctttctcaaagggacagccacgaggaggggtggaagaaggccctacagtattgagaaaggctggtctgcttgagaaacttaaagaacaagagtgtgatgtgaaggattatggggacctgccctttgctgacatccctaatgacagtccctttcaaattgtgaagaatccaaggtctgtgggaaaagcaagcgagcagctggctggcaaggtggcagaagtcaagaagaacggaagaatcagcctggtgctgggcggagaccacagtttggcaattggaagcatctctggccatgccagggtccaccctgatcttggagtcatctgggtggatgctcacactgatatcaacactccactgacaaccacaagtggaaacttgcatggacaacctgtatctttcctcctgaaggaactaaaaggaaagattcccgatgtgccaggattctcctgggtgactccctgtatatctgccaaggatattgtgtatattggcttgagagacgtggaccctggggaacactacattttgaaaactctaggcattaaatacttttcaatgactgaagtggacagactaggaattggcaaggtgatggaagaaacactcagctatctactaggaagaccagctactggcacaccagtcgtgggaggtctgacatacagagaaggtctctacatcacagaagaaatctacaaaacagggctactctcaggattagatataatggaagtgaacccatccctggggaagacaccagaagaagtaactcgaacagtgaacacagcagttgcaataaccttggcttgtttcggacttgctcgggagggtaatcacaagcctattgactaccttaacccacctaagtaaatgtggaaacatccgatataaatctcatagttaatgctantagaagtatcattctaagctaagatctctaagactgctcagaatgtntcatagtaa

SEQ ID NO: 371075 - DNA, 1411 bp, Homo sapiens
tagtgggtggagccagctgtcctcattagataaaggttgtttattcaacccaagtataaatggaaaaaaaagatgcgccctctgtcactgagggttgactgactggagagctcaagtgcagcaaagagaagtgtcagagcatgagcgccaagtccagaaccatagggattattggagctcctttctcaaagggacagccacgaggaggggtggaagaaggccctacagtattgagaaaggctggtctgcttgagaaacttaaagaacaagagtgtgatgtgaaggattatggggacctgccctttgctgacatccctaatgacagtccctttcaaattgtgaagaatccaaggtctgtgggaatcagcctggtgctgggcggagaccacagtttggcaattggaagcatctctggccatgccagggtccaccctgatcttggagtcatctgggtggatgctcacactgatatcaacactccactgacaaccacaagtggaaacttgcatggacaacctgtatctttcctcctgaaggaactaaaaggaaagggtaaaagactggttggtactctagtgcaatagaatactttttagtagacattcaggaggtggaagggaaatgagaaactccatgttatcttattcttggtgtaatctcaaatcattttctctgcagccaataagcaaagggttggttgataaaaggcagtgaggctctctatctctgccttgcaaactgacttaatatatattttctctgctaattcttaaactatccttttagtaggtggggcagagagtaatcatttataaacaggtcagtggaggttcagaggttaaccaacttgcccaagatatatgccaagcctatagtgaagcaagggctagcaccaggtctcctcattccttcctctttccactacatgccacacagttctgcattcttactgagtagtccttctatatcatagaggcttttcaaaaaagaaattttaaaatttcagatataatggtttatgaactaatgtatttactgggagaagcacctatctaaatcataagagaaagaactatctccctgctccctagaaactccttttctaaaagatggaaaataaaatggcagattaagatttaatattacagcttataactttgttgatatgccatagtttgttgatatgccatagtatatcaataaaaagtttttattgatacaattataatatttggtccttatgatgatacaagaggttaggatgggtttataaacttgcaaagtatctgcctagtacatgggaaaaactaaacgtcctggaggacaaagcagatatcatcatattatcacattaagaataaccaaaggacaggccacaaatttccctcagctgctctaggccatcctctgg

SEQ ID NO: 371076 - DNA, 911 bp, Homo sapiens
tagtgggtggagccagctgtcctcattagataaaggttgtttattcaacccaagtataaatggaaaaaaaagatgcgccctctgtcactgagggttgactgactggagagctcaagtgcagcaaagagaagtgtcagagcatgagcgccaagtccagaaccatagggattattggagctcctttctcaaagggacagccacgaggaggggtggaagaaggccctacagtattgagaaaggctggtctgcttgagaaacttaaagaacaagagtgtgatgtgaaggattatggggacctgccctttgctgacatccctaatgacagtccctttcaaattgtgaagaatccaaggtctgtgggaaaagcaagcgagcagctggctggcaaggtggcagaagtcaagaagaacggaagaatcagcctggtgctgggcggagaccacaggtcttgttgaataactgtgtctatgggaatctggcacaaaggaagtaaccaaggccataagaagagagaaaatttagaaatatagacagaaaagcattgacctatattttatatcaaattttctgcctttcttacaatatctgtattttgacctagtacagcagaaaatgtatgaaatatgaatggatttcatctaaatattcatcacaagcttacatttctaaataagtatgtgaggcaattcatagcttatttgttcttaattgccgataatatatacaactcatataggtcaacaatttcaaagcatgtgtttttcattataaaagtaatgatcataacatttttgaaagcatcagacacacacacacaagaaaaaaaatgtggtaattgtacttctctagcaaccatttcaaccagaattgaaaatctggcacatttctttcatggcatcttttttttcctt

SEQ ID NO: 371077 - DNA, 118 bp, Homo sapiens
gctggatgcaataaaagcaatgcttcaaaggaaatatattgccttaaatcatttaatgttgaggctttctcctttgagtttcaattctaatattagagaaagttcaacatagaaatcc

SEQ ID NO: 371078 - DNA, 379 bp, Homo sapiens
tctgagaagtgaggagaccctccgcctggcaaccgccccgtctgagaaactttccccttctcttgaggtggtgcctgggtatacagggatgttgaaggggtccacatggcatcatgagagtggagtgaagcaggacatagtaaagaatttaaccttgctcaaagagagacatggcttttgtccttggcccctggaaggtaatctctaagcccttggaatgcttgcctggtaagagtgcctttgtttacctgggggcattggtccataacagatagtctaacaaggggagccacggcagggcttttgttcacatcatatcagcttaatctctgaagatgctgaagactgagcccagccacatgggcagccaaccagattg

SEQ ID NO: 371079 - DNA, 647 bp, Homo sapiens
agtgaatctgttaaatccaaacagttttcaccatccggttatctttcagatacagaggaaagtaatatgatttgtcaaacaatgaaatgtcagcgttatcaaactccatacctgtcagaagaaaccacgtatttggagccaggaaagatcagtgtgaattgtggacacccatctcgtcataaggctgatagattaaagtcagatttcaaaaaactgagcagtacattaccatcttcagtgtgtcagcagccttcaagaaaattaattgttccgctatctagccaacaagatagtggctttgatagcccatttgttaatctagactaattatggtacagtatttaagaagaatcattaatatattaacaaaaatggaagggaagacctcatactgaaaaaaattgtgagccctgcctcttttgagatgttttaataacatctgttatataagtaaagcattcttctaaaattgcttgagatatttatgttgccttaatattccaaaggcctgatggtgtatgtataatctgcttttgtgtggtgcttatttttggtttctaaaccatctatttttatacttataaattgactcactctgcagtgttaacttatttaaataaacttgcatatggtctgtaaaaaaaaaa

SEQ ID NO: 371080 - DNA, 9492 bp, Homo sapiens
gttccactcacagatttcttcttattgcccaggcttgagtgcaatgacctgttctcagcttactcaacctctgcctcttgggtttcagtgatttttctgcctcggcctcctgagtagctaagggaggagtcttgagattatcatccacggagggtggaagaggagagggtggaaggggaataagaagacattcgggaggtgtcttgaggctcagggagttatcagttatagaatgttgttgagttggaggaagtggctggcggcccatcctgttttttaaagtttcacctgtgaagtagggccagtagggcaatcctgaagaatgacgatgctccgctgccgccattctgacctgtaaggccgaaagaaagggaatgttttcacacatattcatttgatggacaaaattaccgccaccaacacggtctgcaccttctgttgctggtgataaatttttgcacctttccatcctccaggtttcaaaatagcagtatcagtgtcataatatcacccttccactgagtactgccgacagctggggagtaaaaaaaagtcattgggacatcaccctacagcagttcaggctgtgtggttcgcaagaagcatacactggctttttgattcttgctagttcccagctcacagtttgggaggatccaacaccaacctttacgtgaagtggaggcccaaggacagtgaggagctgggtggtcccagcctggagctgtgccagcctgacatggaaatggagaaatggaggcaaacgaccattttaactttactggccttccccctgcacctgctgcctcaggactgaaaccctctccttcctcaggggagggcctctacactaacgggtctcccatgaacttcccccagcaagggaaaagtttgaatggggatgtgaatgttaatggcttatctactgtatctcacactactacttcagggattttgaactctgctccccactcctccagcacctcacacctccatcaccccagcgtggcctacgactgtctctggaactactcacagtacccatctgccaatcctggcagcaacctcaaggacccaccccttctctcccagttctcggggggacaatacccactcaacggcatccttgggggcagccggcaaccttcatccccaagtcataacactaaccttcgggctgggagccaagagttctgggccaacggtacccagagtcccatggggcttaactttgattcacaagaactgtatgattcctttcctgaccagaattttgaggaggtaggcagtggtatccatcctgatgaggcagcagaaaaggagatgacttcagttgtggcagagaatggcactggcttggtaggcagcttggagctggaagaagagcagccagaactgaagatgtgtggctacaatggctctgtcccttctgtggaatcgttacaccaagaggtctcagtcctggtccctgaccccacagtgagctgtttagatgatccttcacatcttcctgatcaactggaagacactccaatcctcagtgaagactctctggagcccttcaactctctggcaccagagccagtgagtggaggactatatggtattgatgacacggagctgatgggtgcagaggacaagctgcctcttgaggacagccctgtgatttctgcccttgattgcccttccctcaataatgctactgccttcagtctcctggcagatgatagtcaaacatcaacctctatctttgccagtcccacctctccacctgtcctaggggagtctgtcctgcaagataacagctttgacctgaataatggtagtgacgctgaacaggaagaaatggaaactcaatcttcagacttcccaccatccctgacccagccagctcctgatcagtcatccactattcagctacatccagcaacctcaccagcagtctcgccaacaacctccccagcagtctccctagtggtttctccagcagcctccccagaaatctctccagaagtttgtcccgcagcttctacagttgtctctccagcagtcttctcagtggtctctccagcttcctcagcagtcctcccagcagtctccttagaagtcccgttgacggcttcagtgacatccccaaaagcctctcccgtaacttccccagcagctgcctttccaacagcctccccagcaaataaggatgtcagcagctttctagaaaccactgctgacgtggaagagatcactggagaaggactcactgcttctggtagtggtgatgtcatgaggagacgtattgctaccccagaagaagttcgtcttcccctccaacatgggtggcggagagaggtgcgcatcaagaagggcagccaccgatggcagggggagacctggtattatggcccctgtgggaagaggatgaagcaatttccagaagtgatcaagtacctgagccgcaacgtggtacacagtgtccgccgagagcacttcagcttcagtccccgtatgcctgttggagatttctttgaagaaagagacacgccagagggcttgcagtgggtgcagctctcagcagaggagatcccgtcgaggattcaggcaattactggcaaacggggtcgacctcgaaacactgagaaggctaagactaaggaagtccccaaggtgaaacggggtcgaggtcggccacctaaggtcaaaatcactgagctattgaacaagacagacaaccgccccctaaagaaactggaggcccaagaaacattgaatgaggaggataaagcaaagattgctaaaagcaagaagaagatgaggcagaaggttcaacggggagagtgtcagactactatccaagggcaggccagaaataagcggaaacaagagaccaagagcttaaagcagaaggaagctaagaagaaatccaaggctgagaaagaaaaaggaaagacaaagcaggaaaaactgaaggaaaaagtcaagagggaaaagaaggagaaggtaaaaatgaaggaaaaggaggaggtgaccaaagccaagccagcctgtaaagcagataagaccctggccacacagaggcgcttggaggaacggcagaggcagcagatgatcttggaggaaatgaagaagccgacagaggatatgtgtctgactgaccaccagcccctgcctgacttctcacgagtccctggtctgacattgcccagtggagccttctcagactgcttgaccattgtggagttcctgcatagctttggcaaggtgctgggctttgatcctgccaaagatgtgcctagcctgggggtcctgcaggagggactcctgtgtcaaggtgacagcttgggtgaggtgcaagacctgctggtcaggctgctgaaggctgcactccatgatcctggctttccctcctactgtcagtccctaaagatcttgggggagaaggtgtctgagatcccactgacaagagacaatgtgtcagagatcctgcgctgcttccttatggcatatggagtagagccagccctctgtgaccgcctgcgcacccagccttttcaggcccagccaccccagcagaaggctgctgtcctggccttccttgtgcatgagctcaatggctccaccctcatcatcaatgagattgacaagactctggagagtatgtccagctacaggaaaaacaagtggattgttgaaggccggctccggaggctgaaaactgttctggccaagcgaactgggcggtctgaagtagagatggaagggccagaggaatgcctgggacggaggcgcagttctcggatcatggaggagaccagtggcatggaagaagaggaagaagaggagtctatagcagctgtccctggccgcaggggtcgaagagatggagaggttgatgccacagcatctagcatcccagagctagagcgccagatagaaaaactcagcaagcgtcagcttttctttcgcaaaaagctgcttcactcatcccagatgcttcgggcggtctccctgggtcaggaccgctacagacgtcgctactgggtattgccgtatttggctggtatctttgtagaaggaacagaggggaacttagttcctgaggaggtgataaagaaggaaactgactccttaaaagtggcagcccatgcgtcactcaaccctgccctcttctctatgaagatggagttagctggctccaacaccactgccagttctcctgcccgggcccgaggccgacctcgaaaaactaagcccgggtctatgcaacctaggcatcttaagtcccctgtcaggggtcaggattcagaacagccccaggcccagcttcagcctgaggctcagcttcatgctcctgcccagccccagcctcagcttcagcttcagcttcagtcccataaggggttcctggagcaagaaggctcccctttgtcactgggtcagagccagcatgacctcagccagtcagccttcctgtcttggctgagccagactcagagccatagctccctgttgagcagctcagtcctcacacctgatagcagtccgggaaaactagacccagctccatcacaacccccggaggagccagagcctgatgaggcagaatccagccctgatcctcaagcactctggtttaacatctcagcccagatgccctgcaatgctgcccccacaccgccccctgcagtttctgaggaccaacccactccctcccctcagcagcttgcctcctccaagccaatgaatagacctagtgctgccaacccttgttctccagtgcagttctcttccacgcccttggctgggttggcccctaagaggcgagcaggagaccctggagaaatgccacagagtcccacagggctgggacagcccaaacggagagggagacctcccagtaagttcttcaaacagatggaacagcgttacctaacccagctgacagcccagcctgtcccacctgagatgtgctcaggctggtggtggatacgagatcctgagatgttggatgccatgctcaaggccctacacccccgaggtatccgggagaaggcacttcacaaacaccttaacaagcacagggacttcttgcaggaagtctgcctgcggccctcagctgaccccatctttgagcccaggcaactacctgcctttcaagaagggattatgagctggtcccccaaagagaagacatacgagacagacctagcagtgcttcaatgggtagaggagctggagcagcgggttatcatgtctgatctgcagattcggggctggacatgtcctagcccagactctacccgtgaagacttggcctactgtgagcacctctccgactcccaggaggatatcacctggcgaggtcggggcagggagggactggcacctcagcgtaaaactaccaaccctttggacctggctgtgatgcggctggctgccctggaacagaatgtagaacggcggtacctgcgggagcccctctggccaactcatgaggttgtgctggagaaggccctgcttagcacacctaatggtgcccctgagggcaccactacagagatatcatatgagatcacccctcgcattcgtgtctggcgccagaccctcgagcggtgccggagcgcagcccaggtgtgcttgtgcctgggccagctggagaggtccattgcctgggagaagtctgtcaacaaagtgacatgtctagtctgccggaagggtgacaatgatgagtttcttctgctttgtgatgggtgtgaccgtggctgccacatttactgccatcgtcccaagatggaggctgtcccagaaggagattggttctgtactgtctgtttggctcagcaggtggagggagaattcactcagaagcctggtttcccaaagcgtggccagaagcggaaaagtggttattcgctgaacttctcagagggtgatggccgccgacgccgggtactgttgaggggccgagaaagcccagcagcagggcctcggtactcggaagaagggctctccccctccaagcggcggcgactctctatgcggaaccaccacagtgatctcacattttgcgagattatcctgatggagatggagtcccatgatgcagcctggcctttcctagagcctgtgaacccacgtttggtgagtgggtaccggcgcatcatcaaaaatcctatggatttttccaccatgcgggagcggctgctcaggggagggtacaccagctcagaggagtttgcggctgatgccctcctggtatttgacaactgccagactttcaacgaggatgactctgaagtaggcaaggctgggcacatcatgcgccgcttcttcgagagccgctgggaggagttttatcagggaaaacaggccaatctgtgaggcaagggaggtggggagtcaccttgtggcatctccccccaccttccaaacaaaaacctgccattttcacctgctgatgctgccctgggtccagactcaagtcagatacaaccctgatttttgaccttgcccttggcagtgccccacatcctcttattcctacatccctttctcccttccctcctcttgctcctcaagtaagaggtgcagagatgaggtccttctggactaaaagccaaaaaaagaaagaaaaaaataatttttcttttctgttttatttgctaattaaaaatggggagggggaaagtcgtccctacttcctcctccctgcttcctctcctcccctgtacgtgccccagcattctggggttatttaacaatagcaatagttctagtgaatgtgtgaaaccaagaaacactctgtactgtgtgcggacccgcagtgacggccagtaaagtggacttaactcccaagtgtgtcgcgccggacaccgggccctggacatgctgcttccatgttcagtcccttccctgcttctcgctgtctttcttttcccacctcccaccccccagttttcagattttctctcatccaataatgtaaaactatcgtgtacgggttcctccctccttttctcttctcccaaatcttttcccttcaaaggaaaaaaaaatgttcagaggtccctgtcttctgtccccatcttcctgccgatagctatcccctgtatgatgttggatgctcctcacatgctgagtttccagccttttctgaaactcagtagctggggagagggcagggaggcttcctgggccttccagcctccttccccacctccttcccaaaccctcttgggaactcctcagggacaactactgctgagtttgggtgcaccctaagatggaggccaggtagcaatggggccggcctcagagagagcgctgtgtgtgtgtgtgtgtgtgtgtgtgtgtgtgtgtgtgtcggcctcagagcgcgctgtgtgtgtgtgtgtgtgtgtcagcctcagagcgcgcgctgtgtgtgtgtgtgtgtgtgtgtgtgtgtgcgtgctgtgtgaccctgtattgtttgataggatccattcagtttccccaagtacctgttttcattcccatttttcccattgtttaaaaccatcacttttttgtctttgggaaaccacaggaacaatttctctggagacaaggctgtgtctctctcctggtcatttttgttccagcctcttcagactgtgcaatctttcagcaggaactccctctcttctcggtagctttgaatcttaagcttctacgggagagtggtagaactggatcatttcctaatcccatttagttgtgcttttcttcatttacttcataccccaggaccccttccccagcagcagagaccctggagcacaggagagtagggaggaggggttctgggtccatcactgccctacatgtgactatgtccaagttaagcccccaacacgagaggaaagctgctgactcccagctatagccatgggcacttggccccctgcttttcctgctcagcagagcccctcccttcagagattacgggtacttgcactggggaggtggctgctggctggcccaagcagagagctgaggcatccaagaaatgttccattggggggtgggggtgccaggtgaggtggagcattccttgtattctggcagcactgaagagccactgaagggggtaggggcagtgtaggtcctggggcagcccctttattcctttatgccccttctccctcatagcctatttctaaagtcgccttttctgtcagataaacctcaaaacttttaattttatttgagatttttttttgcttttaagaggtggattgaagaatatttgaattgactttatattatgcataaatatttatattttatctaaataactgcgctgtaacaaactttgtgttagacagttgaaactgttagagttgggggctctgctttttccccctggcaattttcccctggtataagatgtgctagattaatttcattgtgaggtggatgggggagtgaaattgtgaggtggatgggggagtgaaatctccatggttcctgctttgtgttcctctcccagctccatctctttccctagggaccaggcactcatatggcggggtggggtcctagcctcagtttgaagaagtgggggctggagcggggttgggggtggtagggatagggcatgatcaaaggggccatttcttgcttttctttcctcatcttcactgcccccttgagctaggtggattttctcttcatgacaagagtatttggtagggaaagcaggtttaaaataaaaagacaacccaccccctgcccttttgcttccctcccatcagtctggttgacaggaagaaaccacaccatcaacaccaacaagtttctgtgttccttttacagcaaaagggactttttatataaccaaatgtggtgttttagtgactttttgataatgtacagttttttgtgaatttaaatttatttctttctatatttttaggaccaatctcatttttaataaggttaaaaagaaaaaaaaagtctagcgaaaaaactcctgtttttgccatgtgatgttccacaagtgcagctgtagaaaagtgcttgtcagttgttgaataaaaaaaccacatttgatagagattcaaaagactctgtgtattcatcttcccttctacacacctgagggggagacggcgttgggataggtatgactggcttaagagaccacaggcaagggaacaacaggggctcctgttccataccctctgtgtggatggaaagggtcattagtgctcctgcctaaatgtctggctgagttgctggagcaaagggggattcagtgcatccaggtcctgccttgtgagatgtggccccagcttcctaagctgccacctctgtgttcctgtcatagcaaatatgggaccatcaccagcttaccacttcccactcacggataagacaccaagacgtagacttttgtgttttatttaaaaaaaaaaagtgtgaagtaagacaaaatggacctctaccaagttgtagggaaggacaaggaaaaga

SEQ ID NO: 371081 - DNA, 806 bp, Homo sapiens
tgcggctccggtgctgtgctgcgggtgttcagatccggacaagtgggtattgccgtatttggctggtatctttgtagaaggaacagaggggaacttagttcctgaggaggtgataaagaaggaaactgactccttaaaagtggcagcccatgcgtcactcaaccctgccctcttctctatgaagatggagttagctggctccaacaccactgccagttctcctgcccgggcccgaggccgacctcgaaaaactaagcccgggtctatgcaacctaggcatcttaagtcccctgtcaggggtcaggattcagaacagccccaggcccagcttcagcctgaggctcagcttcatgctcctgcccagccccagcctcagcttcagcttcagcttcagtcccataaggggttcctggagcaagaaggctcccctttgtcactgggtcagagccagcatgacctcagccagtcagccttcctgtcttggctgagccagactcagagccatagctccctgttgagcagctcagtcctcacacctgatagcagtccgggaaaactagacccagctccatcacaacccccggaggagccagagcctgatgaggcagaatccagccctgatcctcaagcactctggtttaacatctcagcccagatgccctgcaatgctgcccccacaccgccctgcgttctggggacaaccatcctccctcagagtgcttctcagccatgattgactggtgtgcaacctgtctcagtgggttcttccgctggtggtgccctaagggggactggaagccattcag

SEQ ID NO: 371082 - DNA, 350 bp, Homo sapiens
ctagtcagtgctattactttgagtttgttttggtaaagttgcttgcctacatatctgtaactgaccttttctttctttctctgccaggtttgaatggggatgtgaatgttaatggcttatctactgtatctcacactactacttcagggattttgaactctgctccccactcctccagcacctcacacctccatcaccccagcgtggcctacgactgtctctggaactactcacagtacccatctgccaatcctggcagcaacctcaaggacccaccccttctctcccagttctcggggggacaatacccactcaacggccactgacaacgcctgggatcctctagacct

SEQ ID NO: 371083 - DNA, 8502 bp, Homo sapiens
gttctggcgcccggagcgcggccatgtgaaccgcttgtaccccggggagagacgagccccgagcccggctggacgccgctgcctcaggaaatggaggcaaacgaccattttaactttactggccttccccctgcacctgctgcctcaggactgaaaccctctccttcctcaggggagggcctctacactaacgggtctcccatgaacttcccccagcaagggaaaagtttgaatggggatgtgaatgttaatggcttatctactgtatctcacactactacttcagggattttgaactctgctccccactcctccagcacctcacacctccatcaccccagcgtggcctacgactgtctctggaactactcacagtacccatctgccaatcctggcagcaacctcaaggacccaccccttctctcccagttctcggggggacaatacccactcaacggcatccttgggggcagccggcaaccttcatccccaagtcataacactaaccttcgggctgggagccaagagttctgggccaacggtacccagagtcccatggggcttaactttgattcacaagaactgtatgattcctttcctgaccagaattttgaggtgatgcccaatggaccccctagttttttcacctccccacagacttctcctatgttgggatctagcattcaaacctttgcaccctcccaggaggtaggcagtggtatccatcctgatgaggcagcagaaaaggagatgacttcagttgtggcagagaatggcactggcttggtaggcagcttggagctggaagaagagcagccagaactgaagatgtgtggctacaatggctctgtcccttctgtggaatcgttacaccaagaggtctcagtcctggtccctgaccccacagtgagctgtttagatgatccttcacatcttcctgatcaactggaagacactccaatcctcagtgaagactctctggagcccttcaactctctggcaccagagccagtgagtggaggactatatggtattgatgacacggagctgatgggtgcagaggacaagctgcctcttgaggacagccctgtgatttctgcccttgattgcccttccctcaataatgctactgccttcagtctcctggcagatgatagtcaaacatcaacctctatctttgccagtcccacctctccacctgtcctaggggagtctgtcctgcaagataacagctttgacctgaataatggtagtgacgctgaacaggaagaaatggaaactcaatcttcagacttcccaccatccctgacccagccagctcctgatcagtcatccactattcagctacatccagcaacctcaccagcagtctcgccaacaacctccccagcagtctccctagtggtttctccagcagcctccccagaaatctctccagaagtttgtcccgcagcttctacagttgtctctccagcagtcttctcagtggtctctccagcttcctcagcagtcctcccagcagtctccttagaagtcccgttgacggcttcagtgacatccccaaaagcctctcccgtaacttccccagcagctgcctttccaacagcctccccagcaaataaggatgtcagcagctttctagaaaccactgctgacgtggaagagatcactggagaaggactcactgcttctggtagtggtgatgtcatgaggagacgtattgctaccccagaagaagttcgtcttcccctccaacatgggtggcggagagaggtgcgcatcaagaagggcagccaccgatggcagggggagacctggtattatggcccctgtgggaagaggatgaagcaatttccagaagtgatcaagtacctgagccgcaacgtggtacacagtgtccgccgagagcacttcagcttcagtccccgtatgcctgttggagatttctttgaagaaagagacacgccagagggcttgcagtgggtgcagctctcagcagaggagatcccgtcgaggattcaggcaattactggcaaacggggtcgacctcgaaacactgagaaggctaagactaaggaagtccccaaggtgaaacggggtcgaggtcggccacctaaggtcaaaatcactgagctattgaacaagacagacaaccgccccctaaagaaactggaggcccaagaaacattgaatgaggaggataaagcaaagattgctaaaagcaagaagaagatgaggcagaaggttcaacggggagagtgtcagactactatccaagggcaggccagaaataagcggaaacaagagaccaagagcttaaagcagaaggaagctaagaagaaatccaaggctgagaaagaaaaaggaaagacaaagcaggaaaaactgaaggaaaaagtcaagagggaaaagaaggagaaggtaaaaatgaaggaaaaggaggaggtgaccaaagccaagccagcctgtaaagcagataagaccctggccacacagaggcgcttggaggaacggcagaggcagcagatgatcttggaggaaatgaagaagccgacagaggatatgtgtctgactgaccaccagcccctgcctgacttctcacgagtccctggtctgacattgcccagtggagccttctcagactgcttgaccattgtggagttcctgcatagctttggcaaggtgctgggctttgatcctgccaaagatgtgcctagcctgggggtcctgcaggagggactcctgtgtcaaggtgacagcttgggtgaggtgcaagacctgctggtcaggctgctgaaggctgcactccatgatcctggctttccctcctactgtcagtccctaaagatcttgggggagaaggtgtctgagatcccactgacaagagacaatgtgtcagagatcctgcgctgcttccttatggcatatggagtagagccagccctctgtgaccgcctgcgcacccagccttttcaggcccagccaccccagcagaaggctgctgtcctggccttccttgtgcatgagctcaatggctccaccctcatcatcaatgagattgacaagactctggagagtatgtccagctacaggaaaaacaagtggattgttgaaggccggctccggaggctgaaaactgttctggccaagcgaactgggcggtctgaagtagagatggaagggccagaggaatgcctgggacggaggcgcagttctcggatcatggaggagaccagtggcatggaagaagaggaagaagaggagtctatagcagctgtccctggccgcaggggtcgaagagatggagaggttgatgccacagcatctagcatcccagagctagagcgccagatagaaaaactcagcaagcgtcagcttttctttcgcaaaaagctgcttcactcatcccagatgcttcgggcggtctccctgggtcaggaccgctacagacgtcgctactgggtattgccgtatttggctggtatctttgtagaaggaacagaggggaacttagttcctgaggaggtgataaagaaggaaactgactccttaaaagtggcagcccatgcgtcactcaaccctgccctcttctctatgaagatggagttagctggctccaacaccactgccagttctcctgcccgggcccgaggccgacctcgaaaaactaagcccgggtctatgcaacctaggcatcttaagtcccctgtcaggggtcaggattcagaacagccccaggcccagcttcagcctgaggctcagcttcatgctcctgcccagccccagcctcagcttcagcttcagcttcagtcccataaggggttcctggagcaagaaggctcccctttgtcactgggtcagagccagcatgacctcagccagtcagccttcctgtcttggctgagccagactcagagccatagctccctgttgagcagctcagtcctcacacctgatagcagtccgggaaaactagacccagctccatcacaacccccggaggagccagagcctgatgaggcagaatccagccctgatcctcaagcactctggtttaacatctcagcccagatgccctgcaatgctgcccccacaccgccccctgcagtttctgaggaccaacccactccctcccctcagcagcttgcctcctccaagccaatgaatagacctagtgctgccaacccttgttctccagtgcagttctcttccacgcccttggctgggttggcccctaagaggcgagcaggagaccctggagaaatgccacagagtcccacagggctgggacagcccaaacggagagggagacctcccagtaagttcttcaaacagatggaacagcgttacctaacccagctgacagcccagcctgtcccacctgagatgtgctcaggctggtggtggatacgagatcctgagatgttggatgccatgctcaaggccctacacccccgaggtatccgggagaaggcacttcacaaacaccttaacaagcacagggacttcttgcaggaagtctgcctgcggccctcagctgaccccatctttgagcccaggcaactacctgcctttcaagaagggattatgagctggtcccccaaagagaagacatacgagacagacctagcagtgcttcaatgggtagaggagctggagcagcgggttatcatgtctgatctgcagattcggggctggacatgtcctagcccagactctacccgtgaagacttggcctactgtgagcacctctccgactcccaggaggatatcacctggcgaggtcggggcagggagggactggcacctcagcgtaaaactaccaaccctttggacctggctgtgatgcggctggctgccctggaacagaatgtagaacggcggtacctgcgggagcccctctggccaactcatgaggttgtgctggagaaggccctgcttagcacacctaatggtgcccctgagggcaccactacagagatatcatatgagatcacccctcgcattcgtgtctggcgccagaccctcgagcggtgccggagcgcagcccaggtgtgcttgtgcctgggccagctggagaggtccattgcctgggagaagtctgtcaacaaagtgacatgtctagtctgccggaagggtgacaatgatgagtttcttctgctttgtgatgggtgtgaccgtggctgccacatttactgccatcgtcccaagatggaggctgtcccagaaggagattggttctgtactgtctgtttggctcagcaggtggagggagaattcactcagaagcctggtttcccaaagcgtggccagaagcggaaaagtggttattcgctgaacttctcagagggtgatggccgccgacgccgggtactgttgaggggccgagaaagcccagcagcagggcctcggtactcggaagaagggctctccccctccaagcggcggcgactctctatgcggaaccaccacagtgatctcacattttgcgagattatcctgatggagatggagtcccatgatgcagcctggcctttcctagagcctgtgaacccacgtttggtgagtgggtaccggcgcatcatcaaaaatcctatggatttttccaccatgcgggagcggctgctcaggggagggtacaccagctcagaggagtttgcggctgatgccctcctggtatttgacaactgccagactttcaacgaggatgactctgaagtaggcaaggctgggcacatcatgcgccgcttcttcgagagccgctgggaggagttttatcagggaaaacaggccaatctgtgaggcaagggaggtggggagtcaccttgtggcatctccccccaccttccaaacaaaaacctgccattttcacctgctgatgctgccctgggtccagactcaagtcagatacaaccctgatttttgaccttgcccttggcagtgccccacatcctcttattcctacatccctttctcccttccctcctcttgctcctcaagtaagaggtgcagagatgaggtccttctggactaaaagccaaaaaaagaaagaaaaaaataatttttcttttctgttttatttgctaattaaaaatggggagggggaaagtcgtccctacttcctcctccctgcttcctctcctcccctgtacgtgccccagcattctggggttatttaacaatagcaatagttctagtgaatgtgtgaaaccaagaaacactctgtactgtgtgcggacccgcagtgacggccagtaaagtggacttaactcccaagtgtgtcgcgccggacaccgggccctggacatgctgcttccatgttcagtcccttccctgcttctcgctgtctttcttttcccacctcccaccccccagttttcagattttctctcatccaataatgtaaaactatcgtgtacgggttcctccctccttttctcttctcccaaatcttttcccttcaaaggaaaaaaaaatgttcagaggtccctgtcttctgtccccatcttcctgccgatagctatcccctgtatgatgttggatgctcctcacatgctgagtttccagccttttctgaaactcagtagctggggagagggcagggaggcttcctgggccttccagcctccttccccacctccttcccaaaccctcttgggaactcctcagggacaactactgctgagtttgggtgcaccctaagatggaggccaggtagcaatggggccggcctcagagagagcgctgtgtgtgtgtgtgtgtgtgtgtgtgtgtgtgtgtgtgtcggcctcagagcgcgctgtgtgtgtgtgtgtgtgtgtcagcctcagagcgcgcgctgtgtgtgtgtgtgtgtgtgtgtgtgtgtgcgtgctgtgtgaccctgtattgtttgataggatccattcagtttccccaagtacctgttttcattcccatttttcccattgtttaaaaccatcacttttttgtctttgggaaaccacaggaacaatttctctggagacaaggctgtgtctctctcctggtcatttttgttccagcctcttcagactgtgcaatctttcagcaggaactccctctcttctcggtagctttgaatcttaagcttctacgggagagtggtagaactggatcatttcctaatcccatttagttgtgcttttcttcatttacttcataccccaggaccccttccccagcagcagagaccctggagcacaggagagtagggaggaggggttctgggtccatcactgccctacatgtgactatgtccaagttaagcccccaacacgagaggaaagctgctgactcccagctatagccatgggcacttggccccctgcttttcctgctcagcagagcccctcccttcagagattacgggtacttgcactggggaggtggctgctggctggcccaagcagagagctgaggcatccaagaaatgttccattggggggtgggggtgccaggtgaggtggagcattccttgtattctggcagcactgaagagccactgaagggggtaggggcagtgtaggtcctggggcagcccctttattcctttatgccccttctccctcatagcctatttctaaagtcgccttttctgtcagataaacctcaaaacttttaattttatttgagatttttttttgcttttaagaggtggattgaagaatatttgaattgactttatattatgcataaatatttatattttatctaaataactgcgctgtaacaaactttgtgttagacagttgaaactgttagagttgggggctctgctttttccccctggcaattttcccctggtataagatgtgctagattaatttcattgtgaggtggatgggggagtgaaattgtgaggtggatgggggagtgaaatctccatggttcctgctttgtgttcctctcccagctccatctctttccctagggaccaggcactcatatggcggggtggggtcctagcctcagtttgaagaagtgggggctggagcggggttgggggtggtagggatagggcatgatcaaaggggccatttcttgcttttctttcctcatcttcactgcccccttgagctaggtggattttctcttcatgacaagagtatttggtagggaaagcaggtttaaaataaaaagacaacccaccccctgcccttttgcttccctcccatcagtctggttgacaggaagaaaccacaccatcaacaccaacaagtttctgtgttccttttacagcaaaagggactttttatataaccaaatgtggtgttttagtgactttttgataatgtacagttttttgtgaatttaaatttatttctttctatatttttaggaccaatctcatttttaataaggttaaaaagaaaaaaaaagtctagcgaaaaaactcctgtttttgccatgtgatgttccacaagtgcagctgtagaaaagtgcttgtcagttgttgaataaaaaaaccacatttgatagaga

SEQ ID NO: 371084 - DNA, 9255 bp, Homo sapiens
gttccactcacagatttcttcttattgcccaggcttgagtgcaatgacctgttctcagcttactcaacctctgcctcttgggtttcagtgatttttctgcctcggcctcctgagtagctaagggaggagtcttgagattatcatccacggagggtggaagaggagagggtggaaggggaataagaagacattcgggaggtgtcttgaggctcagggagttatcagttatagaatgttgttgagttggaggaagtggctggcggcccatcctgttttttaaagtttcacctgtgaagtagggccagtagggcaatcctgaagaatgacgatgctccgctgccgccattctgacctgtaaggccgaaagaaagggaatgttttcacacatattcatttgatggacaaaattaccgccaccaacacggtctgcaccttctgttgctggtgataaatttttgcacctttccatcctccaggtttcaaaatagcagtatcagtgtcataatatcacccttccactgagtactgccgacagctggggagtaaaaaaaagtcattgggacatcaccctacagcagttcaggctgtgtggttcgcaagaagcatacactggctttttgattcttgctagttcccagctcacagtttgggaggatccaacaccaacctttacgtgaagtggaggcccaaggacagtgaggagctgggtggtcccagcctggagctgtgccagcctgacatggaaatggagaatctttcctttccggtgaccagggccctgcagatgtcgccaggaaagtggtgatccaggcaggaccaggctgcactgaagggacagaggaaatggaggcaaacgaccattttaactttactggccttccccctgcacctgctgcctcaggactgaaaccctctccttcctcaggggagggcctctacactaacgggtctcccatgaacttcccccagcaagggaaaagtttgaatggggatgtgaatgttaatggcttatctactgtatctcacactactacttcagggattttgaactctgctccccactcctccagcacctcacacctccatcaccccagcgtggcctacgactgtctctggaactactcacagtacccatctgccaatcctggcagcaacctcaaggacccaccccttctctcccagttctcggggggacaatacccactcaacggcatccttgggggcagccggcaaccttcatccccaagtcataacactaaccttcgggctgggagccaagagttctgggccaacggtacccagagtcccatggggcttaactttgattcacaagaactgtatgattcctttcctgaccagaattttgaggtgatgcccaatggaccccctagttttttcacctccccacagacttctcctatgttgggatctagcattcaaacctttgcaccctcccaggaggtaggcagtggtatccatcctgatgaggcagcagaaaaggagatgacttcagttgtggcagagaatggcactggcttggtaggcagcttggagctggaagaagagcagccagaactgaagatgtgtggctacaatggctctgtcccttctgtggaatcgttacaccaagaggtctcagtcctggtccctgaccccacagtgagctgtttagatgatccttcacatcttcctgatcaactggaagacactccaatcctcagtgaagactctctggagcccttcaactctctggcaccagagccagtgagtggaggactatatggtattgatgacacggagctgatgggtgcagaggacaagctgcctcttgaggacagccctgtgatttctgcccttgattgcccttccctcaataatgctactgccttcagtctcctggcagatgatagtcaaacatcaacctctatctttgccagtcccacctctccacctgtcctaggggagtctgtcctgcaagataacagctttgacctgaataatggtagtgacgctgaacaggaagaaatggaaactcaatcttcagacttcccaccatccctgacccagccagctcctgatcagtcatccactattcagctacatccagcaacctcaccagcagtctcgccaacaacctccccagcagtctccctagtggtttctccagcagcctccccagaaatctctccagaagtttgtcccgcagcttctacagttgtctctccagcagtcttctcagtggtctctccagcttcctcagcagtcctcccagcagtctccttagaagtcccgttgacggcttcagtgacatccccaaaagcctctcccgtaacttccccagcagctgcctttccaacagcctccccagcaaataaggatgtcagcagctttctagaaaccactgctgacgtggaagagatcactggagaaggactcactgcttctggtagtggtgatgtcatgaggagacgtattgctaccccagaagaagttcgtcttcccctccaacatgggtggcggagagaggtgcgcatcaagaagggcagccaccgatggcagggggagacctggtattatggcccctgtgggaagaggatgaagcaatttccagaagtgatcaagtacctgagccgcaacgtggtacacagtgtccgccgagagcacttcagcttcagtccccgtatgcctgttggagatttctttgaagaaagagacacgccagagggcttgcagtgggtgcagctctcagcagaggagatcccgtcgaggattcaggcaattactggcaaacggggtcgacctcgaaacactgagaaggctaagactaaggaagtccccaaggtgaaacggggtcgaggtcggccacctaaggtcaaaatcactgagctattgaacaagacagacaaccgccccctaaagaaactggaggcccaagaaacattgaatgaggaggataaagcaaagattgctaaaagcaagaagaagatgaggcagaaggttcaacggggagagtgtcagactactatccaagggcaggccagaaataagcggaaacaagagaccaagagcttaaagcagaaggaagctaagaagaaatccaaggctgagaaagaaaaaggaaagacaaagcaggaaaaactgaaggaaaaagtcaagagggaaaagaaggagaaggtaaaaatgaaggaaaaggaggaggtgaccaaagccaagccagcctgtaaagcagataagaccctggccacacagaggcgcttggaggaacggcagaggcagcagatgatcttggaggaaatgaagaagccgacagaggatatgtgtctgactgaccaccagcccctgcctgacttctcacgagtccctggtctgacattgcccagtggagccttctcagactgcttgaccattgtggagttcctgcatagctttggcaaggtgctgggctttgatcctgccaaagatgtgcctagcctgggggtcctgcaggagggactcctgtgtcaaggtgacagcttgggtgaggtgcaagacctgctggtcaggctgctgaaggctgcactccatgatcctggctttccctcctactgtcagtccctaaagatcttgggggagaaggtgtctgagatcccactgacaagagacaatgtgtcagagatcctgcgctgcttccttatggcatatggagtagagccagccctctgtgaccgcctgcgcacccagccttttcaggcccagccaccccagcagaaggctgctgtcctggccttccttgtgcatgagctcaatggctccaccctcatcatcaatgagattgacaagactctggagagtatgtccagctacaggaaaaacaagtggattgttgaaggccggctccggaggctgaaaactgttctggccaagcgaactgggcggtctgaagtagagatggaagggccagaggaatgcctgggacggaggcgcagttctcggatcatggaggagaccagtggcatggaagaagaggaagaagaggagtctatagcagctgtccctggccgcaggggtcgaagagatggagaggttgatgccacagcatctagcatcccagagctagagcgccagatagaaaaactcagcaagcgtcagcttttctttcgcaaaaagctgcttcactcatcccagatgcttcgggcggtctccctgggtcaggaccgctacagacgtcgctactgggtattgccgtatttggctggtatctttgtagaaggaacagaggggaacttagttcctgaggaggtgataaagaaggaaactgactccttaaaagtggcagcccatgcgtcactcaaccctgccctcttctctatgaagatggagttagctggctccaacaccactgccagttctcctgcccgggcccgaggccgacctcgaaaaactaagcccgggtctatgcaacctaggcatcttaagtcccctgtcaggggtcaggattcagaacagccccaggcccagcttcagcctgaggctcagcttcatgctcctgcccagccccagcctcagcttcagcttcagcttcagtcccataaggggttcctggagcaagaaggctcccctttgtcactgggtcagagccagcatgacctcagccagtcagccttcctgtcttggctgagccagactcagagccatagctccctgttgagcagctcagtcctcacacctgatagcagtccgggaaaactagacccagctccatcacaacccccggaggagccagagcctgatgaggcagaatccagccctgatcctcaagcactctggtttaacatctcagcccagatgccctgcaatgctgcccccacaccgccccctgcagtttctgaggaccaacccactccctcccctcagcagcttgcctcctccaagccaatgaatagacctagtgctgccaacccttgttctccagtgcagttctcttccacgcccttggctgggttggcccctaagaggcgagcaggagaccctggagaaatgccacagagtcccacagggctgggacagcccaaacggagagggagacctcccagtaagttcttcaaacagatggaacagcgttacctaacccagctgacagcccagcctgtcccacctgagatgtgctcaggctggtggtggatacgagatcctgagatgttggatgccatgctcaaggccctacacccccgaggtatccgggagaaggcacttcacaaacaccttaacaagcacagggacttcttgcaggaagtctgcctgcggccctcagctgaccccatctttgagcccaggcaactacctgcctttcaagaagggattatgagctggtcccccaaagagaagacatacgagacagacctagcagtgcttcaatgggtagaggagctggagcagcgggttatcatgtctgatctgcagattcggggctggacatgtcctagcccagactctacccgtgaagacttggcctactgtgagcacctctccgactcccaggaggatatcacctggcgaggtcggggcagggagggactggcacctcagcgtaaaactaccaaccctttggacctggctgtgatgcggctggctgccctggaacagaatgtagaacggcggtacctgcgggagcccctctggccaactcatgaggttgtgctggagaaggccctgcttagcacacctaatggtgcccctgagggcaccactacagagatatcatatgagatcacccctcgcattcgtgtctggcgccagaccctcgagcggtgccggagcgcagcccaggtgtgcttgtgcctgggccagctggagaggtccattgcctgggagaagtctgtcaacaaagtgacatgtctagtctgccggaagggtgacaatgatgagtttcttctgctttgtgatgggtgtgaccgtggctgccacatttactgccatcgtcccaagatggaggctgtcccagaaggagattggttctgtactgtctgtttggctcagcaggtggagggagaattcactcagaagcctggtttcccaaagcgtggccagaagcggaaaagtggttattcgctgaacttctcagagggtgatggccgccgacgccgggtactgttgaggggccgagaaagcccagcagcagggcctcggtactcggaagaagggctctccccctccaagcggcggcgactctctatgcggaaccaccacagtgatctcacattttgcgagattatcctgatggagatggagtcccatgatgcagcctggcctttcctagagcctgtgaacccacgtttggtgagtgggtaccggcgcatcatcaaaaatcctatggatttttccaccatgcgggagcggctgctcaggggagggtacaccagctcagaggagtttgcggctgatgccctcctggtatttgacaactgccagactttcaacgaggatgactctgaagtaggcaaggctgggcacatcatgcgccgcttcttcgagagccgctgggaggagttttatcagggaaaacaggccaatctgtgaggcaagggaggtggggagtcaccttgtggcatctccccccaccttccaaacaaaaacctgccattttcacctgctgatgctgccctgggtccagactcaagtcagatacaaccctgatttttgaccttgcccttggcagtgccccacatcctcttattcctacatccctttctcccttccctcctcttgctcctcaagtaagaggtgcagagatgaggtccttctggactaaaagccaaaaaaagaaagaaaaaaataatttttcttttctgttttatttgctaattaaaaatggggagggggaaagtcgtccctacttcctcctccctgcttcctctcctcccctgtacgtgccccagcattctggggttatttaacaatagcaatagttctagtgaatgtgtgaaaccaagaaacactctgtactgtgtgcggacccgcagtgacggccagtaaagtggacttaactcccaagtgtgtcgcgccggacaccgggccctggacatgctgcttccatgttcagtcccttccctgcttctcgctgtctttcttttcccacctcccaccccccagttttcagattttctctcatccaataatgtaaaactatcgtgtacgggttcctccctccttttctcttctcccaaatcttttcccttcaaaggaaaaaaaaatgttcagaggtccctgtcttctgtccccatcttcctgccgatagctatcccctgtatgatgttggatgctcctcacatgctgagtttccagccttttctgaaactcagtagctggggagagggcagggaggcttcctgggccttccagcctccttccccacctccttcccaaaccctcttgggaactcctcagggacaactactgctgagtttgggtgcaccctaagatggaggccaggtagcaatggggccggcctcagagagagcgctgtgtgtgtgtgtgtgtgtgtgtgtgtgtgtgtgtgtgtcggcctcagagcgcgctgtgtgtgtgtgtgtgtgtgtcagcctcagagcgcgcgctgtgtgtgtgtgtgtgtgtgtgtgtgtgtgcgtgctgtgtgaccctgtattgtttgataggatccattcagtttccccaagtacctgttttcattcccatttttcccattgtttaaaaccatcacttttttgtctttgggaaaccacaggaacaatttctctggagacaaggctgtgtctctctcctggtcatttttgttccagcctcttcagactgtgcaatctttcagcaggaactccctctcttctcggtagctttgaatcttaagcttctacgggagagtggtagaactggatcatttcctaatcccatttagttgtgcttttcttcatttacttcataccccaggaccccttccccagcagcagagaccctggagcacaggagagtagggaggaggggttctgggtccatcactgccctacatgtgactatgtccaagttaagcccccaacacgagaggaaagctgctgactcccagctatagccatgggcacttggccccctgcttttcctgctcagcagagcccctcccttcagagattacgggtacttgcactggggaggtggctgctggctggcccaagcagagagctgaggcatccaagaaatgttccattggggggtgggggtgccaggtgaggtggagcattccttgtattctggcagcactgaagagccactgaagggggtaggggcagtgtaggtcctggggcagcccctttattcctttatgccccttctccctcatagcctatttctaaagtcgccttttctgtcagataaacctcaaaacttttaattttatttgagatttttttttgcttttaagaggtggattgaagaatatttgaattgactttatattatgcataaatatttatattttatctaaataactgcgctgtaacaaactttgtgttagacagttgaaactgttagagttgggggctctgctttttccccctggcaattttcccctggtataagatgtgctagattaatttcattgtgaggtggatgggggagtgaaattgtgaggtggatgggggagtgaaatctccatggttcctgctttgtgttcctctcccagctccatctctttccctagggaccaggcactcatatggcggggtggggtcctagcctcagtttgaagaagtgggggctggagcggggttgggggtggtagggatagggcatgatcaaaggggccatttcttgcttttctttcctcatcttcactgcccccttgagctaggtggattttctcttcatgacaagagtatttggtagggaaagcaggtttaaaataaaaagacaacccaccccctgcccttttgcttccctcccatcagtctggttgacaggaagaaaccacaccatcaacaccaacaagtttctgtgttccttttacagcaaaagggactttttatataaccaaatgtggtgttttagtgactttttgataatgtacagttttttgtgaatttaaatttatttctttctatatttttaggaccaatctcatttttaataaggttaaaaagaaaaaaaaagtctagcgaaaaaactcctgtttttgccatgtgatgttccacaagtgcagctgtagaaaagtgcttgtcagttgttgaataaaaaaaccacatttgatagaga

SEQ ID NO: 371085 - DNA, 8412 bp, Homo sapiens
gttctggcgcccggagcgcggccatgtgaaccgcttgtaccccggggagagacgagccccgagcccggctggacgccgctgcctcaggaaatggaggcaaacgaccattttaactttactggccttccccctgcacctgctgcctcaggactgaaaccctctccttcctcaggggagggcctctacactaacgggtctcccatgaacttcccccagcaagggaaaagtttgaatggggatgtgaatgttaatggcttatctactgtatctcacactactacttcagggattttgaactctgctccccactcctccagcacctcacacctccatcaccccagcgtggcctacgactgtctctggaactactcacagtacccatctgccaatcctggcagcaacctcaaggacccaccccttctctcccagttctcggggggacaatacccactcaacggcatccttgggggcagccggcaaccttcatccccaagtcataacactaaccttcgggctgggagccaagagttctgggccaacggtacccagagtcccatggggcttaactttgattcacaagaactgtatgattcctttcctgaccagaattttgaggtgatgcccaatggaccccctagttttttcacctccccacagacttctcctatgttgggatctagcattcaaacctttgcaccctcccaggaggtaggcagtggtatccatcctgatgaggcagcagaaaaggagatgacttcagttgtggcagagaatggcactggcttggtaggcagcttggagctggaagaagagcagccagaactgaagatgtgtggctacaatggctctgtcccttctgtggaatcgttacaccaagaggtctcagtcctggtccctgaccccacagtgagctgtttagatgatccttcacatcttcctgatcaactggaagacactccaatcctcagtgaagactctctggagcccttcaactctctggcaccagagccagtgagtggaggactatatggtattgatgacacggagctgatgggtgcagaggacaagctgcctcttgaggacagccctgtgatttctgcccttgattgcccttccctcaataatgctactgccttcagtctcctggcagatgatagtcaaacatcaacctctatctttgccagtcccacctctccacctgtcctaggggagtctgtcctgcaagataacagctttgacctgaataatggtagtgacgctgaacaggaagaaatggaaactcaatcttcagacttcccaccatccctgacccagccagctcctgatcagtcatccactattcagctacatccagcaacctcaccagcagtctcgccaacaacctccccagcagtctccctagtggtttctccagcagcctccccagaaatcttctccttagaagtcccgttgacggcttcagtgacatccccaaaagcctctcccgtaacttccccagcagctgcctttccaacagcctccccagcaaataaggatgtcagcagctttctagaaaccactgctgacgtggaagagatcactggagaaggactcactgcttctggtagtggtgatgtcatgaggagacgtattgctaccccagaagaagttcgtcttcccctccaacatgggtggcggagagaggtgcgcatcaagaagggcagccaccgatggcagggggagacctggtattatggcccctgtgggaagaggatgaagcaatttccagaagtgatcaagtacctgagccgcaacgtggtacacagtgtccgccgagagcacttcagcttcagtccccgtatgcctgttggagatttctttgaagaaagagacacgccagagggcttgcagtgggtgcagctctcagcagaggagatcccgtcgaggattcaggcaattactggcaaacggggtcgacctcgaaacactgagaaggctaagactaaggaagtccccaaggtgaaacggggtcgaggtcggccacctaaggtcaaaatcactgagctattgaacaagacagacaaccgccccctaaagaaactggaggcccaagaaacattgaatgaggaggataaagcaaagattgctaaaagcaagaagaagatgaggcagaaggttcaacggggagagtgtcagactactatccaagggcaggccagaaataagcggaaacaagagaccaagagcttaaagcagaaggaagctaagaagaaatccaaggctgagaaagaaaaaggaaagacaaagcaggaaaaactgaaggaaaaagtcaagagggaaaagaaggagaaggtaaaaatgaaggaaaaggaggaggtgaccaaagccaagccagcctgtaaagcagataagaccctggccacacagaggcgcttggaggaacggcagaggcagcagatgatcttggaggaaatgaagaagccgacagaggatatgtgtctgactgaccaccagcccctgcctgacttctcacgagtccctggtctgacattgcccagtggagccttctcagactgcttgaccattgtggagttcctgcatagctttggcaaggtgctgggctttgatcctgccaaagatgtgcctagcctgggggtcctgcaggagggactcctgtgtcaaggtgacagcttgggtgaggtgcaagacctgctggtcaggctgctgaaggctgcactccatgatcctggctttccctcctactgtcagtccctaaagatcttgggggagaaggtgtctgagatcccactgacaagagacaatgtgtcagagatcctgcgctgcttccttatggcatatggagtagagccagccctctgtgaccgcctgcgcacccagccttttcaggcccagccaccccagcagaaggctgctgtcctggccttccttgtgcatgagctcaatggctccaccctcatcatcaatgagattgacaagactctggagagtatgtccagctacaggaaaaacaagtggattgttgaaggccggctccggaggctgaaaactgttctggccaagcgaactgggcggtctgaagtagagatggaagggccagaggaatgcctgggacggaggcgcagttctcggatcatggaggagaccagtggcatggaagaagaggaagaagaggagtctatagcagctgtccctggccgcaggggtcgaagagatggagaggttgatgccacagcatctagcatcccagagctagagcgccagatagaaaaactcagcaagcgtcagcttttctttcgcaaaaagctgcttcactcatcccagatgcttcgggcggtctccctgggtcaggaccgctacagacgtcgctactgggtattgccgtatttggctggtatctttgtagaaggaacagaggggaacttagttcctgaggaggtgataaagaaggaaactgactccttaaaagtggcagcccatgcgtcactcaaccctgccctcttctctatgaagatggagttagctggctccaacaccactgccagttctcctgcccgggcccgaggccgacctcgaaaaactaagcccgggtctatgcaacctaggcatcttaagtcccctgtcaggggtcaggattcagaacagccccaggcccagcttcagcctgaggctcagcttcatgctcctgcccagccccagcctcagcttcagcttcagcttcagtcccataaggggttcctggagcaagaaggctcccctttgtcactgggtcagagccagcatgacctcagccagtcagccttcctgtcttggctgagccagactcagagccatagctccctgttgagcagctcagtcctcacacctgatagcagtccgggaaaactagacccagctccatcacaacccccggaggagccagagcctgatgaggcagaatccagccctgatcctcaagcactctggtttaacatctcagcccagatgccctgcaatgctgcccccacaccgccccctgcagtttctgaggaccaacccactccctcccctcagcagcttgcctcctccaagccaatgaatagacctagtgctgccaacccttgttctccagtgcagttctcttccacgcccttggctgggttggcccctaagaggcgagcaggagaccctggagaaatgccacagagtcccacagggctgggacagcccaaacggagagggagacctcccagtaagttcttcaaacagatggaacagcgttacctaacccagctgacagcccagcctgtcccacctgagatgtgctcaggctggtggtggatacgagatcctgagatgttggatgccatgctcaaggccctacacccccgaggtatccgggagaaggcacttcacaaacaccttaacaagcacagggacttcttgcaggaagtctgcctgcggccctcagctgaccccatctttgagcccaggcaactacctgcctttcaagaagggattatgagctggtcccccaaagagaagacatacgagacagacctagcagtgcttcaatgggtagaggagctggagcagcgggttatcatgtctgatctgcagattcggggctggacatgtcctagcccagactctacccgtgaagacttggcctactgtgagcacctctccgactcccaggaggatatcacctggcgaggtcggggcagggagggactggcacctcagcgtaaaactaccaaccctttggacctggctgtgatgcggctggctgccctggaacagaatgtagaacggcggtacctgcgggagcccctctggccaactcatgaggttgtgctggagaaggccctgcttagcacacctaatggtgcccctgagggcaccactacagagatatcatatgagatcacccctcgcattcgtgtctggcgccagaccctcgagcggtgccggagcgcagcccaggtgtgcttgtgcctgggccagctggagaggtccattgcctgggagaagtctgtcaacaaagtgacatgtctagtctgccggaagggtgacaatgatgagtttcttctgctttgtgatgggtgtgaccgtggctgccacatttactgccatcgtcccaagatggaggctgtcccagaaggagattggttctgtactgtctgtttggctcagcaggtggagggagaattcactcagaagcctggtttcccaaagcgtggccagaagcggaaaagtggttattcgctgaacttctcagagggtgatggccgccgacgccgggtactgttgaggggccgagaaagcccagcagcagggcctcggtactcggaagaagggctctccccctccaagcggcggcgactctctatgcggaaccaccacagtgatctcacattttgcgagattatcctgatggagatggagtcccatgatgcagcctggcctttcctagagcctgtgaacccacgtttggtgagtgggtaccggcgcatcatcaaaaatcctatggatttttccaccatgcgggagcggctgctcaggggagggtacaccagctcagaggagtttgcggctgatgccctcctggtatttgacaactgccagactttcaacgaggatgactctgaagtaggcaaggctgggcacatcatgcgccgcttcttcgagagccgctgggaggagttttatcagggaaaacaggccaatctgtgaggcaagggaggtggggagtcaccttgtggcatctccccccaccttccaaacaaaaacctgccattttcacctgctgatgctgccctgggtccagactcaagtcagatacaaccctgatttttgaccttgcccttggcagtgccccacatcctcttattcctacatccctttctcccttccctcctcttgctcctcaagtaagaggtgcagagatgaggtccttctggactaaaagccaaaaaaagaaagaaaaaaataatttttcttttctgttttatttgctaattaaaaatggggagggggaaagtcgtccctacttcctcctccctgcttcctctcctcccctgtacgtgccccagcattctggggttatttaacaatagcaatagttctagtgaatgtgtgaaaccaagaaacactctgtactgtgtgcggacccgcagtgacggccagtaaagtggacttaactcccaagtgtgtcgcgccggacaccgggccctggacatgctgcttccatgttcagtcccttccctgcttctcgctgtctttcttttcccacctcccaccccccagttttcagattttctctcatccaataatgtaaaactatcgtgtacgggttcctccctccttttctcttctcccaaatcttttcccttcaaaggaaaaaaaaatgttcagaggtccctgtcttctgtccccatcttcctgccgatagctatcccctgtatgatgttggatgctcctcacatgctgagtttccagccttttctgaaactcagtagctggggagagggcagggaggcttcctgggccttccagcctccttccccacctccttcccaaaccctcttgggaactcctcagggacaactactgctgagtttgggtgcaccctaagatggaggccaggtagcaatggggccggcctcagagagagcgctgtgtgtgtgtgtgtgtgtgtgtgtgtgtgtgtgtgtgtcggcctcagagcgcgctgtgtgtgtgtgtgtgtgtgtcagcctcagagcgcgcgctgtgtgtgtgtgtgtgtgtgtgtgtgtgtgcgtgctgtgtgaccctgtattgtttgataggatccattcagtttccccaagtacctgttttcattcccatttttcccattgtttaaaaccatcacttttttgtctttgggaaaccacaggaacaatttctctggagacaaggctgtgtctctctcctggtcatttttgttccagcctcttcagactgtgcaatctttcagcaggaactccctctcttctcggtagctttgaatcttaagcttctacgggagagtggtagaactggatcatttcctaatcccatttagttgtgcttttcttcatttacttcataccccaggaccccttccccagcagcagagaccctggagcacaggagagtagggaggaggggttctgggtccatcactgccctacatgtgactatgtccaagttaagcccccaacacgagaggaaagctgctgactcccagctatagccatgggcacttggccccctgcttttcctgctcagcagagcccctcccttcagagattacgggtacttgcactggggaggtggctgctggctggcccaagcagagagctgaggcatccaagaaatgttccattggggggtgggggtgccaggtgaggtggagcattccttgtattctggcagcactgaagagccactgaagggggtaggggcagtgtaggtcctggggcagcccctttattcctttatgccccttctccctcatagcctatttctaaagtcgccttttctgtcagataaacctcaaaacttttaattttatttgagatttttttttgcttttaagaggtggattgaagaatatttgaattgactttatattatgcataaatatttatattttatctaaataactgcgctgtaacaaactttgtgttagacagttgaaactgttagagttgggggctctgctttttccccctggcaattttcccctggtataagatgtgctagattaatttcattgtgaggtggatgggggagtgaaattgtgaggtggatgggggagtgaaatctccatggttcctgctttgtgttcctctcccagctccatctctttccctagggaccaggcactcatatggcggggtggggtcctagcctcagtttgaagaagtgggggctggagcggggttgggggtggtagggatagggcatgatcaaaggggccatttcttgcttttctttcctcatcttcactgcccccttgagctaggtggattttctcttcatgacaagagtatttggtagggaaagcaggtttaaaataaaaagacaacccaccccctgcccttttgcttccctcccatcagtctggttgacaggaagaaaccacaccatcaacaccaacaagtttctgtgttccttttacagcaaaagggactttttatataaccaaatgtggtgttttagtgactttttgataatgtacagttttttgtgaatttaaatttatttctttctatatttttaggaccaatctcatttttaataaggttaaaaagaaaaaaaaagtctagcgaaaaaactcctgtttttgccatgtgatgttccacaagtgcagctgtagaaaagtgcttgtcagttgttgaataaaaaaaccacatttgatagaga

SEQ ID NO: 371086 - DNA, 8150 bp, Homo sapiens
gttctggcgcccggagcgcggccatgtgaaccgcttgtaccccggggagagacgagccccgagcccggctggacgccgctgcctcaggaaatggaggcaaacgaccattttaactttactggccttccccctgcacctgctgcctcaggactgaaaccctctccttcctcaggggagggcctctacactaacgggtctcccatgaacttcccccagcaagggaaaagtttgaatggggatgtgaatgttaatggcttatctactgtatctcacactactacttcagggattttgaactctgctccccactcctccagcacctcacacctccatcaccccagcgtggcctacgactgtctctggaactactcacagtacccatctgccaatcctggcagcaacctcaaggacccaccccttctctcccagttctcggggggacaatacccactcaacggcatccttgggggcagccggcaaccttcatccccaagtcataacactaaccttcgggctgggagccaagagttctgggccaacggtacccagagtcccatggggcttaactttgattcacaagaactgtatgattcctttcctgaccagaattttgaggtgatgcccaatggaccccctagttttttcacctccccacagacttctcctatgttgggatctagcattcaaacctttgcaccctcccaggaggtaggcagtggtatccatcctgatgaggcagcagaaaaggagatgacttcagttgtggcagagaatggcactggcttggtaggcagcttggagctggaagaagagcagccagaactgaagatgtgtggctacaatggctctgtcccttctgtggaatcgttacaccaagaggtctcagtcctggtccctgaccccacagtgagctgtttagatgatccttcacatcttcctgatcaactggaagacactccaatcctcagtgaagactctctggagcccttcaactctctggcaccagagccagtgagtggaggactatatggtattgatgacacggagctgatgggtgcagaggacaagctgcctcttgaggacagccctgtgatttctgcccttgattgcccttccctcaataatgctactgccttcagtctcctggcagatgatagtcaaacatcaacctctatctttgccagtcccacctctccacctgtcctaggggagtctgtcctgcaagataacagctttgacctgaataatggtagtgacgctgaacaggaagaaatggaaactcaatcttcagacttcccaccatccctgacccagccagctcctgatcagtcatccactattcagctacatccagcaacctcaccagcagtctcgccaacaacctccccagcagtctccctagtggtttctccagcagcctccccagaaatctctccagaagtttgtcccgcagcttctacagttgtctctccagcagtcttctcagtggtctctccagcttcctcagcagtcctcccagcagtctccttagaagtcccgttgacggcttcagtgacatccccaaaagcctctcccgtaacttccccagcagctgcctttccaacagcctccccagcaaataaggatgtcagcagctttctagaaaccactgctgacgtggaagagatcactggagaaggactcactgcttctggtagtggtgatgtcatgaggagacgtattgctaccccagaagaagttcgtcttcccctccaacatgggtggcggagagaggtgcgcatcaagaagggcagccaccgatggcagggggagacctggtattatggcccctgtgggaagaggatgaagcaatttccagaagtgatcaagtacctgagccgcaacgtggtacacagtgtccgccgagagcacttcagcttcagtccccgtatgcctgttggagatttctttgaagaaagagacacgccagagggcttgcagtgggtgcagctctcagcagaggagatcccgtcgaggattcaggcaattactggcaaacggggtcgacctcgaaacactgagaaggctaagactaaggaagtccccaaggtgaaacggggtcgaggtcggccacctaaggtcaaaatcactgagctattgaacaagacagacaaccgccccctaaagaaactggaggcccaagaaacattgaatgaggaggataaagcaaagattgctaaaagcaagaagaagatgaggcagaaggttcaacggggagagtgtcagactactatccaagggcaggccagaaataagcggaaacaagagaccaagagcttaaagcagaaggaagctaagaagaaatccaaggctgagaaagaaaaaggaaagacaaagcaggaaaaactgaaggaaaaagtcaagagggaaaagaaggagaaggtaaaaatgaaggaaaaggaggaggtgaccaaagccaagccagcctgtaaagcagataagaccctggccacacagaggcgcttggaggaacggcagaggcagcagatgatcttggaggaaatgaagaagccgacagaggatatgtgtctgactgaccaccagcccctgcctgacttctcacgagtccctggtctgacattgcccagtggagccttctcagactgcttgaccattgtggagttcctgcatagctttggcaaggtgctgggctttgatcctgccaaagatgtgcctagcctgggggtcctgcaggagggactcctgtgtcaaggtgacagcttgggtgaggtgcaagacctgctggtcaggctgctgaaggctgcactccatgatcctggctttccctcctactgtcagtccctaaagatcttgggggagaaggtgtctgagatcccactgacaagagacaatgtgtcagagatcctgcgctgcttccttatggcatatggagtagagccagccctctgtgaccgcctgcgcacccagccttttcaggcccagccaccccagcagaaggctgctgtcctggccttccttgtgcatgagctcaatggctccaccctcatcatcaatgagattgacaagactctggagagtatgtccagctacaggaaaaacaagtggattgttgaaggccggctccggaggctgaaaactgttctggccaagcgaactgggcggtctgaagtagagatggaagggccagaggaatgcctgggacggaggcgcagttctcggatcatggaggagaccagtggcatggaagaagaggaagaagaggagtctatagcagctgtccctggccgcaggggtcgaagagatggagaggttgatgccacagcatctagcatcccagagctagagcgccagatagaaaaactcagcaagcgtcagcttttctttcgcaaaaagctgcttcactcatcccagatgcttcgggcggtctccctgggtcaggaccgctacagacgtcgctactgggtattgccgtatttggctggtatctttgtagaaggaacagaggggaacttagttcctgaggaggtgataaagaaggaaactgactccttaaaagtggcagcccatgcgtcactcaaccctgccctcttctctatgaagatggagttagctggctccaacaccactgccagttctcctgcccgggcccgaggccgacctcgaaaaactaagcccgggtctatgcaacctaggcatcttaagtcccctgtcaggggtcaggattcagaacagccccaggcccagcttcagcctgaggctcagcttcatgctcctgcccagccccagcctcagcttcagcttcagcttcagtcccataaggggttcctggagcaagaaggctcccctttgtcactgggtcagagccagcatgacctcagccagtcagccttcctgtcttggctgagccagactcagagccatagctccctgttgagcagctcagtcctcacacctgatagcagtccgggaaaactagacccagctccatcacaacccccggaggagccagagcctgatgaggcagaatccagccctgatcctcaagcactctggtttaacatctcagcccagatgccctgcaatgctgcccccacaccgccccctgcagtttctgaggaccaacccactccctcccctcagcagcttgcctcctccaagccaatgaatagacctagtgctgccaacccttgttctccagtgcagttctcttccacgcccttggctgggttggcccctaagaggcgagcaggagaccctggagaaatgccacagagtcccacagggctgggacagcccaaacggagagggagacctcccagtaagttcttcaaacagatggaacagcgttacctaacccagctgacagcccagcctgtcccacctgagatgtgctcaggctggtggtggatacgagatcctgagatgttggatgccatgctcaaggccctacacccccgaggtatccgggagaaggcacttcacaaacaccttaacaagcacagggacttcttgcaggaagtctgcctgcggccctcagctgaccccatctttgagcccaggcaactacctgcctttcaagaagggattatgagctggtcccccaaagagaagacatacgagacagacctagcagtgcttcaatgggtagaggagctggagcagcgggttatcatgtctgatctgcagattcggggctggacatgtcctagcccagactctacccgtgaagacttggcctactgtgagcacctctccgactcccaggaggatatcacctggcgaggtcggggcagggagggactggcacctcagcgtaaaactaccaaccctttggacctggctgtgatgcggctggctgccctggaacagaatgtagaacggcggtacctgcgggagcccctctggccaactcatgaggttgtgctggagaaggccctgcttagcacacctaatggtgcccctgagggcaccactacagagatatcatatgagatcacccctcgcattcgtgtctggcgccagaccctcgagcggtgccggagcgcagcccaggtgtgcttgtgcctgggccagctggagaggtccattgcctgggagaagtctgtcaacaaagtgacatgtctagtctgccggaagggtgacaatgatgagtttcttctgctttgtgatgggtgtgaccgtggctgccacatttactgccatcgtcccaagatggaggctgtcccagaaggagattggttctgtactgtctgtttggctcagcaggtggagggagaattcactcagaagcctggtttcccaaagcgtggccagaagcggaaaagtggttattcgctgaacttctcagagggtgatggccgccgacgccgggtactgttgaggggccgagaaagcccagcagcagggcctcggtactcggaagaagggctctccccctccaagcggcggcgactctctatgcggaaccaccacagtgatctcacattttgcgagattatcctgatggagatggagtcccatgatgcagcctggcctttcctagagcctgtgaacccacgtttggtgagtgggtaccggcgcatcatcaaaaatcctatggatttttccaccatgcgggagcggctgctcaggggagggtacaccagctcagaggagtttgcggctgatgccctcctggtatttgacaactgccagactttcaacgaggatgactctgaagtaggcaaggctgggcacatcatgcgccgcttcttcgagagccgctgggaggagttttatcagggaaaacaggccaatctgtgaggcaagggaggtggggagtcaccttgtggcatctccccccaccttccaaacaaaaacctgccattttcacctgctgatgctgccctgggtccagactcaagtcagatacaaccctgatttttgaccttgcccttggcagtgccccacatcctcttattcctacatccctttctcccttccctcctcttgctcctcaagtaagaggtgcagagatgaggtccttctggactaaaagccaaaaaaagaaagaaaaaaataatttttcttttctgttttatttgctaattaaaaatggggagggggaaagtcgtccctacttcctcctccctgcttcctctcctcccctgtacgtgccccagcattctggggttatttaacaatagcaatagttctagtgaatgtgtgaaaccaagaaacactctgtactgtgtgcggacccgcagtgacggccagtaaagtggacttaactcccaagtgtgtcgcgccggacaccgggccctggacatgctgcttccatgttcagtcccttccctgcttctcgctgtctttcttttcccacctcccaccccccagttttcagattttctctcatccaataatgtaaaactatcgtgtacgggttcctccctccttttctcttctcccaaatcttttcccttcaaaggaaaaaaaaatgttcagaggtccctgtcttctgtccccatcttcctgccgatagctatcccctgtatgatgttggatgctcctcacatgctgagtttccagccttttctgaaactcagtagctggggagagggcagggaggcttcctgggccttccagcctccttccccacctccttcccaaaccctcttgggaactcctcagggacaactactgctgagtttgggtgcaccctaagatggaggccaggtagcaatggggccggcctcagagagagcgctgtgtgtgtgtgtgtgtgtgtgtgtgtgtgtgtgtgtgtcggcctcagagcgcgctgtgtgtgtgtgtgtgtgtgtcagcctcagagcgcgcgctgtgtgtgtgtgtgtgtgtgtgtgtgtgtgcgtgctgtgtgaccctgtattgtttgataggatccattcagtttccccaagtacctgttttcattcccatttttcccattgtttaaaaccatcacttttttgtctttgggaaaccacaggaacaatttctctggagacaaggctgtgtctctctcctggtcatttttgttccagcctcttcagactgtgcaatctttcagcaggaactccctctcttctcggtagctttgaatcttaagcttctacgggagagtggtagaactggatcatttcctaatcccatttagttgtgcttttcttcatttacttcataccccaggaccccttccccagcagcagagaccctggagcacaggagagtagggaggaggggttctgggtccatcactgccctacatgtgactatgtccaagttaagcccccaacacgagaggaaagctgctgactcccagctatagccatgggcacttggccccctgcttttcctgctcagcagagcccctcccttcagagattacgggtacttgcactggggaggtggctgctggctggcccaagcagagagctgaggcatccaagaaatgttccattggggggtgggggtgccaggtgaggtggagcattccttgtattctggcagcactgaagagccactgaagggggtaggggcagtgtaggtcctggggcagcccctttattcctttatgccccttctccctcatagcctatttctaaagtcgccttttctgtcagataaacctcaaaacttttaattttatttgagatttttttttgcttttaagaggtggattgaagaatatttgaattgactttatattatgcataaatatttatattttatctaaataactgcgctgtaacaaactttgtgttagacagttgaaactgttagagttgggggctctgctttttccccctggcaattttcccctgcccttttgcttccctcccatcagtctggttgacaggaagaaaccacaccatcaacaccaacaagtttctgtgttccttttacagcaaaagggactttttatataaccaaatgtggtgttttagtgactttttgataatgtacagttttttgtgaatttaaatttatttctttctatatttttaggaccaatctcatttttaataaggttaaaaagaaaaaaaaagtctagcgaaaaaactcctgtttttgccatgtgatgttccacaagtgcagctgtagaaaagtgcttgtcagttgttgaataaaaaaaccacatttgatagaga

SEQ ID NO: 371087 - DNA, 7400 bp, Homo sapiens
gaagtcgagcctgtacccacgatatcggtcatgaagtcaccctagccatcttctactatcaacattactaataagtggctcctttaacctctccacctgtcctaggggagtctgtcctgcaggataacagctttgacctgaataatggtagtgacgctgaacaggaagaaatggaaactcaatcttcagacttcccaccatccctgacccagccagctcctgatcagtcatccactattcagctacatccagcaacctcaccagcagtctcgccaacaacctccccagcagtctccctagtggtttctccagcagcctccccagaaatctctccagaagtttgtcccgcagcttctacagttgtctctccagcagtcttctcagtggtctctccagcttcctcagcagtcctcccagcagtctccttagaagtcccgttgacggcttcagtgacatccccaaaagcctctcccgtaacttccccagcagctgcctttccaacagcctccccagcaaataaggatgtcagcagctttctagaaaccactgctgacgtggaagagatcactggagaaggactcactgcttctggtagtggtgatgtcatgaggagacgtattgctaccccagaagaagttcgtcttcccctccaacatgggtggcggagagaggtgcgcatcaagaagggcagccaccgatggcagggggagacctggtattatggcccctgtgggaagaggatgaagcaatttccagaagtgatcaagtacctgagccgcaacgtggtacacagtgtccgccgagagcacttcagcttcagtccccgtatgcctgttggagatttctttgaagaaagagacacgccagagggcttgcagtgggtgcagctctcagcagaggagatcccgtcgaggattcaggcaattactggcaaacggggtcgacctcgaaacactgagaaggctaagactaaggaagtccccaaggtgaaacggggtcgaggtcggccacctaaggtcaaaatcactgagctattgaacaagacagacaaccgccccctaaagaaactggaggcccaagaaacattgaatgaggaggataaagcaaagattgctaaaagcaagaagaagatgaggcagaaggttcaacggggagagtgtcagactactatccaagggcaggccagaaataagcggaaacaagagaccaagagcttaaagcagaaggaagctaagaagaaatccaaggctgagaaagaaaaaggaaagacaaagcaggaaaaactgaaggaaaaagtcaagagggaaaagaaggagaaggtaaaaatgaaggaaaaggaggaggtgaccaaagccaagccagcctgtaaagcagataagaccctggccacacagaggcgcttggaggaacggcagaggcagcagatgatcttggaggaaatgaagaagccgacagaggatatgtgtctgactgaccaccagcccctgcctgacttctcacgagtccctggtctgacattgcccagtggagccttctcagactgcttgaccattgtggagttcctgcatagctttggcaaggtgctgggctttgatcctgccaaagatgtgcctagcctgggggtcctgcaggagggactcctgtgtcaaggtgacagcttgggtgaggtgcaagacctgctggtcaggctgctgaaggctgcactccatgatcctggctttccctcctactgtcagtccctaaagatcttgggggagaaggtgtctgagatcccactgacaagagacaatgtgtcagagatcctgcgctgcttccttatggcatatggagtagagccagccctctgtgaccgcctgcgcacccagccttttcaggcccagccaccccagcagaaggctgctgtcctggccttccttgtgcatgagctcaatggctccaccctcatcatcaatgagattgacaagactctggagagtatgtccagctacaggaaaaacaagtggattgttgaaggccggctccggaggctgaaaactgttctggccaagcgaactgggcggtctgaagtagagatggaagggccagaggaatgcctgggacggaggcgcagttctcggatcatggaggagaccagtggcatggaagaagaggaagaagaggagtctatagcagctgtccctggccgcaggggtcgaagagatggagaggttgatgccacagcatctagcatcccagagctagagcgccagatagaaaaactcagcaagcgtcagcttttctttcgcaaaaagctgcttcactcatcccagatgcttcgggcggtctccctgggtcaggaccgctacagacgtcgctactgggtattgccgtatttggctggtatctttgtagaaggaacagaggggaacttagttcctgaggaggtgataaagaaggaaactgactccttaaaagtggcagcccatgcgtcactcaaccctgccctcttctctatgaagatggagttagctggctccaacaccactgccagttctcctgcccgggcccgaggccgacctcgaaaaactaagcccgggtctatgcaacctaggcatcttaagtcccctgtcaggggtcaggattcagaacagccccaggcccagcttcagcctgaggctcagcttcatgctcctgcccagccccagcctcagcttcagcttcagcttcagtcccataaggggttcctggagcaagaaggctcccctttgtcactgggtcagagccagcatgacctcagccagtcagccttcctgtcttggctgagccagactcagagccatagctccctgttgagcagctcagtcctcacacctgatagcagtccgggaaaactagacccagctccatcacaacccccggaggagccagagcctgatgaggcagaatccagccctgatcctcaagcactctggtttaacatctcagcccagatgccctgcaatgctgcccccacaccgccccctgcagtttctgaggaccaacccactccctcccctcagcagcttgcctcctccaagccaatgaatagacctagtgctgccaacccttgttctccagtgcagttctcttccacgcccttggctgggttggcccctaagaggcgagcaggagaccctggagaaatgccacagagtcccacagggctgggacagcccaaacggagagggagacctcccagtaagttcttcaaacagatggaacagcgttacctaacccagctgacagcccagcctgtcccacctgagatgtgctcaggctggtggtggatacgagatcctgagatgttggatgccatgctcaaggccctacacccccgaggtatccgggagaaggcacttcacaaacaccttaacaagcacagggacttcttgcaggaagtctgcctgcggccctcagctgaccccatctttgagcccaggcaactacctgcctttcaagaagggattatgagctggtcccccaaagagaagacatacgagacagacctagcagtgcttcaatgggtagaggagctggagcagcgggttatcatgtctgatctgcagattcggggctggacatgtcctagcccagactctacccgtgaagacttggcctactgtgagcacctctccgactcccaggaggatatcacctggcgaggtcggggcagggagggactggcacctcagcgtaaaactaccaaccctttggacctggctgtgatgcggctggctgccctggaacagaatgtagaacggcggtacctgcgggagcccctctggccaactcatgaggttgtgctggagaaggccctgcttagcacacctaatggtgcccctgagggcaccactacagagatatcatatgagatcacccctcgcattcgtgtctggcgccagaccctcgagcggtgccggagcgcagcccaggtgtgcttgtgcctgggccagctggagaggtccattgcctgggagaagtctgtcaacaaagtgacatgtctagtctgccggaagggtgacaatgatgagtttcttctgctttgtgatgggtgtgaccgtggctgccacatttactgccatcgtcccaagatggaggctgtcccagaaggagattggttctgtactgtctgtttggctcagcaggtggagggagaattcactcagaagcctggtttcccaaagcgtggccagaagcggaaaagtggttattcgctgaacttctcagagggtgatggccgccgacgccgggtactgttgaggggccgagaaagcccagcagcagggcctcggtactcggaagaagggctctccccctccaagcggcggcgactctctatgcggaaccaccacagtgatctcacattttgcgagattatcctgatggagatggagtcccatgatgcagcctggcctttcctagagcctgtgaacccacgtttggtgagtgggtaccggcgcatcatcaaaaatcctatggatttttccaccatgcgggagcggctgctcaggggagggtacaccagctcagaggagtttgcggctgatgccctcctggtatttgacaactgccagactttcaacgaggatgactctgaagtaggcaaggctgggcacatcatgcgccgcttcttcgagagccgctgggaggagttttatcagggaaaacaggccaatctgtgaggcaagggaggtggggagtcaccttgtggcatctccccccaccttccaaacaaaaacctgccattttcacctgctgatgctgccctgggtccagactcaagtcagatacaaccctgatttttgaccttgcccttggcagtgccccacatcctcttattcctacatccctttctcccttccctcctcttgctcctcaagtaagaggtgcagagatgaggtccttctggactaaaagccaaaaaaagaaagaaaaaaataatttttcttttctgttttatttgctaattaaaaatggggagggggaaagtcgtccctacttcctcctccctgcttcctctcctcccctgtacgtgccccagcattctggggttatttaacaatagcaatagttctagtgaatgtgtgaaaccaagaaacactctgtactgtgtgcggacccgcagtgacggccagtaaagtggacttaactcccaagtgtgtcgcgccggacaccgggccctggacatgctgcttccatgttcagtcccttccctgcttctcgctgtctttcttttcccacctcccaccccccagttttcagattttctctcatccaataatgtaaaactatcgtgtacgggttcctccctccttttctcttctcccaaatcttttcccttcaaaggaaaaaaaaatgttcagaggtccctgtcttctgtccccatcttcctgccgatagctatcccctgtatgatgttggatgctcctcacatgctgagtttccagccttttctgaaactcagtagctggggagagggcagggaggcttcctgggccttccagcctccttccccacctccttcccaaaccctcttgggaactcctcagggacaactactgctgagtttgggtgcaccctaagatggaggccaggtagcaatggggccggcctcagagagagcgctgtgtgtgtgtgtgtgtgtgtgtgtgtgtgtgtgtgtgtcggcctcagagcgcgctgtgtgtgtgtgtgtgtgtgtcagcctcagagcgcgcgctgtgtgtgtgtgtgtgtgtgtgtgtgtgtgcgtgctgtgtgaccctgtattgtttgataggatccattcagtttccccaagtacctgttttcattcccatttttcccattgtttaaaaccatcacttttttgtctttgggaaaccacaggaacaatttctctggagacaaggctgtgtctctctcctggtcatttttgttccagcctcttcagactgtgcaatctttcagcaggaactccctctcttctcggtagctttgaatcttaagcttctacgggagagtggtagaactggatcatttcctaatcccatttagttgtgcttttcttcatttacttcataccccaggaccccttccccagcagcagagaccctggagcacaggagagtagggaggaggggttctgggtccatcactgccctacatgtgactatgtccaagttaagcccccaacacgagaggaaagctgctgactcccagctatagccatgggcacttggccccctgcttttcctgctcagcagagcccctcccttcagagattacgggtacttgcactggggaggtggctgctggctggcccaagcagagagctgaggcatccaagaaatgttccattggggggtgggggtgccaggtgaggtggagcattccttgtattctggcagcactgaagagccactgaagggggtaggggcagtgtaggtcctggggcagcccctttattcctttatgccccttctccctcatagcctatttctaaagtcgccttttctgtcagataaacctcaaaacttttaattttatttgagatttttttttgcttttaagaggtggattgaagaatatttgaattgactttatattatgcataaatatttatattttatctaaataactgcgctgtaacaaactttgtgttagacagttgaaactgttagagttgggggctctgctttttccccctggcaattttcccctggtataagatgtgctagattaatttcattgtgaggtggatgggggagtgaaattgtgaggtggatgggggagtgaaatctccatggttcctgctttgtgttcctctcccagctccatctctttccctagggaccaggcactcatatggcggggtggggtcctagcctcagtttgaagaagtgggggctggagcggggttgggggtggtagggatagggcatgatcaaaggggccatttcttgcttttctttcctcatcttcactgcccccttgagctaggtggattttctcttcatgacaagagtatttggtagggaaagcaggtttaaaataaaaagacaacccaccccctgcccttttgcttccctcccatcagtctggttgacaggaagaaaccacaccatcaacaccaacaagtttctgtgttccttttacagcaaaagggactttttatataaccaaatgtggtgttttagtgactttttgataatgtacagttttttgtgaatttaaatttatttctttctatatttttaggaccaatctcatttttaataaggttaaaaagaaaaaaaaagtctagcgaaaaaactcctgtttttgccatgtgatgttccacaagtgcagctgtagaaaagtgcttgtcagttgttgaataaaaaaaccacatttgatagaga

SEQ ID NO: 371088 - DNA, 6592 bp, Homo sapiens
attttatcttctccttcttttccctctgactttttccttcagtttcctgcttgtctttcctttttctttctcagccttggatttcttcttagcttccttctgctttaagctcgtggtctcttgtttccgcttatttctggcctgcccttggatagtagtctgacactctctccccaaggtgaaacggggtcgaggtcggccacctaaggtcaaaatcactgagctattgaacaagacagacaaccgccccctaaagaaactggaggcccaagaaacattgaatgaggaggataaagcaaagattgctaaaagcaagaagaagatgaggcagaaggttcaacggggagagtgtcagactactatccaagggcaggccagaaataagcggaaacaagagaccaagagcttaaagcagaaggaagctaagaagaaatccaaggctgagaaagaaaaaggaaagacaaagcaggaaaaactgaaggaaaaagtcaagagggaaaagaaggagaaggtaaaaatgaaggaaaaggaggaggtgaccaaagccaagccagcctgtaaagcagataagaccctggccacacagaggcgcttggaggaacggcagaggcagcagatgatcttggaggaaatgaagaagccgacagaggatatgtgtctgactgaccaccagcccctgcctgacttctcacgagtccctggtctgacattgcccagtggagccttctcagactgcttgaccattgtggagttcctgcatagctttggcaaggtgctgggctttgatcctgccaaagatgtgcctagcctgggggtcctgcaggagggactcctgtgtcaaggtgacagcttgggtgaggtgcaagacctgctggtcaggctgctgaaggctgcactccatgatcctggctttccctcctactgtcagtccctaaagatcttgggggagaaggtgtctgagatcccactgacaagagacaatgtgtcagagatcctgcgctgcttccttatggcatatggagtagagccagccctctgtgaccgcctgcgcacccagccttttcaggcccagccaccccagcagaaggctgctgtcctggccttccttgtgcatgagctcaatggctccaccctcatcatcaatgagattgacaagactctggagagtatgtccagctacaggaaaaacaagtggattgttgaaggccggctccggaggctgaaaactgttctggccaagcgaactgggcggtctgaagtagagatggaagggccagaggaatgcctgggacggaggcgcagttctcggatcatggaggagaccagtggcatggaagaagaggaagaagaggagtctatagcagctgtccctggccgcaggggtcgaagagatggagaggttgatgccacagcatctagcatcccagagctagagcgccagatagaaaaactcagcaagcgtcagcttttctttcgcaaaaagctgcttcactcatcccagatgcttcgggcggtctccctgggtcaggaccgctacagacgtcgctactgggtattgccgtatttggctggtatctttgtagaaggaacagaggggaacttagttcctgaggaggtgataaagaaggaaactgactccttaaaagtggcagcccatgcgtcactcaaccctgccctcttctctatgaagatggagttagctggctccaacaccactgccagttctcctgcccgggcccgaggccgacctcgaaaaactaagcccgggtctatgcaacctaggcatcttaagtcccctgtcaggggtcaggattcagaacagccccaggcccagcttcagcctgaggctcagcttcatgctcctgcccagccccagcctcagcttcagcttcagcttcagtcccataaggggttcctggagcaagaaggctcccctttgtcactgggtcagagccagcatgacctcagccagtcagccttcctgtcttggctgagccagactcagagccatagctccctgttgagcagctcagtcctcacacctgatagcagtccgggaaaactagacccagctccatcacaacccccggaggagccagagcctgatgaggcagaatccagccctgatcctcaagcactctggtttaacatctcagcccagatgccctgcaatgctgcccccacaccgccccctgcagtttctgaggaccaacccactccctcccctcagcagcttgcctcctccaagccaatgaatagacctagtgctgccaacccttgttctccagtgcagttctcttccacgcccttggctgggttggcccctaagaggcgagcaggagaccctggagaaatgccacagagtcccacagggctgggacagcccaaacggagagggagacctcccagtaagttcttcaaacagatggaacagcgttacctaacccagctgacagcccagcctgtcccacctgagatgtgctcaggctggtggtggatacgagatcctgagatgttggatgccatgctcaaggccctacacccccgaggtatccgggagaaggcacttcacaaacaccttaacaagcacagggacttcttgcaggaagtctgcctgcggccctcagctgaccccatctttgagcccaggcaactacctgcctttcaagaagggattatgagctggtcccccaaagagaagacatacgagacagacctagcagtgcttcaatgggtagaggagctggagcagcgggttatcatgtctgatctgcagattcggggctggacatgtcctagcccagactctacccgtgaagacttggcctactgtgagcacctctccgactcccaggaggatatcacctggcgaggtcggggcagggagggactggcacctcagcgtaaaactaccaaccctttggacctggctgtgatgcggctggctgccctggaacagaatgtagaacggcggtacctgcgggagcccctctggccaactcatgaggttgtgctggagaaggccctgcttagcacacctaatggtgcccctgagggcaccactacagagatatcatatgagatcacccctcgcattcgtgtctggcgccagaccctcgagcggtgccggagcgcagcccaggtgtgcttgtgcctgggccagctggagaggtccattgcctgggagaagtctgtcaacaaagtgacatgtctagtctgccggaagggtgacaatgatgagtttcttctgctttgtgatgggtgtgaccgtggctgccacatttactgccatcgtcccaagatggaggctgtcccagaaggagattggttctgtactgtctgtttggctcagcaggtggagggagaattcactcagaagcctggtttcccaaagcgtggccagaagcggaaaagtggttattcgctgaacttctcagagggtgatggccgccgacgccgggtactgttgaggggccgagaaagcccagcagcagggcctcggtactcggaagaagggctctccccctccaagcggcggcgactctctatgcggaaccaccacagtgatctcacattttgcgagattatcctgatggagatggagtcccatgatgcagcctggcctttcctagagcctgtgaacccacgtttggtgagtgggtaccggcgcatcatcaaaaatcctatggatttttccaccatgcgggagcggctgctcaggggagggtacaccagctcagaggagtttgcggctgatgccctcctggtatttgacaactgccagactttcaacgaggatgactctgaagtaggcaaggctgggcacatcatgcgccgcttcttcgagagccgctgggaggagttttatcagggaaaacaggccaatctgtgaggcaagggaggtggggagtcaccttgtggcatctccccccaccttccaaacaaaaacctgccattttcacctgctgatgctgccctgggtccagactcaagtcagatacaaccctgatttttgaccttgcccttggcagtgccccacatcctcttattcctacatccctttctcccttccctcctcttgctcctcaagtaagaggtgcagagatgaggtccttctggactaaaagccaaaaaaagaaagaaaaaaataatttttcttttctgttttatttgctaattaaaaatggggagggggaaagtcgtccctacttcctcctccctgcttcctctcctcccctgtacgtgccccagcattctggggttatttaacaatagcaatagttctagtgaatgtgtgaaaccaagaaacactctgtactgtgtgcggacccgcagtgacggccagtaaagtggacttaactcccaagtgtgtcgcgccggacaccgggccctggacatgctgcttccatgttcagtcccttccctgcttctcgctgtctttcttttcccacctcccaccccccagttttcagattttctctcatccaataatgtaaaactatcgtgtacgggttcctccctccttttctcttctcccaaatcttttcccttcaaaggaaaaaaaaatgttcagaggtccctgtcttctgtccccatcttcctgccgatagctatcccctgtatgatgttggatgctcctcacatgctgagtttccagccttttctgaaactcagtagctggggagagggcagggaggcttcctgggccttccagcctccttccccacctccttcccaaaccctcttgggaactcctcagggacaactactgctgagtttgggtgcaccctaagatggaggccaggtagcaatggggccggcctcagagagagcgctgtgtgtgtgtgtgtgtgtgtgtgtgtgtgtgtgtgtgtcggcctcagagcgcgctgtgtgtgtgtgtgtgtgtgtcagcctcagagcgcgcgctgtgtgtgtgtgtgtgtgtgtgtgtgtgtgcgtgctgtgtgaccctgtattgtttgataggatccattcagtttccccaagtacctgttttcattcccatttttcccattgtttaaaaccatcacttttttgtctttgggaaaccacaggaacaatttctctggagacaaggctgtgtctctctcctggtcatttttgttccagcctcttcagactgtgcaatctttcagcaggaactccctctcttctcggtagctttgaatcttaagcttctacgggagagtggtagaactggatcatttcctaatcccatttagttgtgcttttcttcatttacttcataccccaggaccccttccccagcagcagagaccctggagcacaggagagtagggaggaggggttctgggtccatcactgccctacatgtgactatgtccaagttaagcccccaacacgagaggaaagctgctgactcccagctatagccatgggcacttggccccctgcttttcctgctcagcagagcccctcccttcagagattacgggtacttgcactggggaggtggctgctggctggcccaagcagagagctgaggcatccaagaaatgttccattggggggtgggggtgccaggtgaggtggagcattccttgtattctggcagcactgaagagccactgaagggggtaggggcagtgtaggtcctggggcagcccctttattcctttatgccccttctccctcatagcctatttctaaagtcgccttttctgtcagataaacctcaaaacttttaattttatttgagatttttttttgcttttaagaggtggattgaagaatatttgaattgactttatattatgcataaatatttatattttatctaaataactgcgctgtaacaaactttgtgttagacagttgaaactgttagagttgggggctctgctttttccccctggcaattttcccctggtataagatgtgctagattaatttcattgtgaggtggatgggggagtgaaattgtgaggtggatgggggagtgaaatctccatggttcctgctttgtgttcctctcccagctccatctctttccctagggaccaggcactcatatggcggggtggggtcctagcctcagtttgaagaagtgggggctggagcggggttgggggtggtagggatagggcatgatcaaaggggccatttcttgcttttctttcctcatcttcactgcccccttgagctaggtggattttctcttcatgacaagagtatttggtagggaaagcaggtttaaaataaaaagacaacccaccccctgcccttttgcttccctcccatcagtctggttgacaggaagaaaccacaccatcaacaccaacaagtttctgtgttccttttacagcaaaagggactttttatataaccaaatgtggtgttttagtgactttttgataatgtacagttttttgtgaatttaaatttatttctttctatatttttaggaccaatctcatttttaataaggttaaaaagaaaaaaaaagtctagcgaaaaaactcctgtttttgccatgtgatgttccacaagtgcagctgtagaaaagtgcttgtcagttgttgaataaaaaaaccacatttgatagaga

SEQ ID NO: 371089 - DNA, 8355 bp, Homo sapiens
gttctggcgcccggagcgcggccatgtgaaccgcttgtaccccggggagagacgagccccgagcccggctggacgccgctgcctcaggaaatggaggcaaacgaccattttaactttactggccttccccctgcacctgctgcctcaggactgaaaccctctccttcctcaggggagggcctctacactaacgggtctcccatgaacttcccccagcaagggaaaagtttgaatggggatgtgaatgttaatggcttatctactgtatctcacactactacttcagggattttgaactctgctccccactcctccagcacctcacacctccatcaccccagcgtggcctacgactgtctctggaactactcacagtacccatctgccaatcctggcagcaacctcaaggacccaccccttctctcccagttctcggggggacaatacccactcaacggcatccttgggggcagccggcaaccttcatccccaagtcataacactaaccttcgggctgggagccaagagttctgggccaacggtacccagagtcccatggggcttaactttgattcacaagaactgtatgattcctttcctgaccagaattttgaggtgatgcccaatggaccccctagttttttcacctccccacagacttctcctatgttgggatctagcattcaaacctttgcaccctcccaggaggtaggcagtggtatccatcctgatgaggcagcagaaaaggagatgacttcagttgtggcagagaatggcactggcttggtaggcagcttggagctggaagaagagcagccagaactgaagatgtgtggctacaatggctctgtcccttctgtggaatcgttacaccaagaggtctcagtcctggtccctgaccccacagtgagctgtttagatgatccttcacatcttcctgatcaactggaagacactccaatcctcagtgaagactctctggagcccttcaactctctggcaccagagccagtgagtggaggactatatggtattgatgacacggagctgatgggtgcagaggacaagctgcctcttgaggacagccctgtgatttctgcccttgattgcccttccctcaataatgctactgccttcagtctcctggcagatgatagtcaaacatcaacctctatctttgccagtcccacctctccacctgtcctaggggagtctgtcctgcaagataacagctttgacctgaataatggtagtgacgctgaacaggaagaaatggaaactcaatcttcagacttcccaccatccctgacccagccagctcctgatcagtcatccactattcagctacatccagcaacctcaccagcagtctcgccaacaacctccccagcagtctccctagtggtttctccagcagcctccccagaaatctctccagaagtttgtcccgcagcttctacagttgtctctccagcagtcttctcagtggtctctccagcttcctcagcagtcctcccagcagtctccttagaagtcccgttgacggcttcagtgacatccccaaaagcctctcccgtaacttccccagcagctgcctttccaacagcctccccagcaaataaggatgtcagcagctttctagaaaccactgctgacgtggaagagatcactggagaaggactcactgcttctggtagtggtgatgtcatgaggagacgtattgctaccccagaagaagttcgtcttcccctccaacatgggtggcggagagaggtgcgcatcaagaagggcagccaccgatggcagggggagacctggtattatggcccctgtgggaagaggatgaagcaatttccagaagtgatcaagtacctgagccgcaacgtggtacacagtgtccgccgagagcacttcagcttcagtccccgtatgcctgttggagatttctttgaagaaagagacacgccagagggcttgcagtgggtgcagctctcagcagaggagatcccgtcgaggattcaggcaattactggcaaacggggtcgacctcgaaacactgagaaggctaagactaaggaagtccccaaggtgaaacggggtcgaggtcggccacctaaggtcaaaatcactgagctattgaacaagacagacaaccgccccctaaagaaactggaggcccaagaaacattgaatgaggaggataaagcaaagattgctaaaagcaagaagaagatgaggcagaaggttcaacggggagagtgtcagactactatccaagggcaggccagaaataagcggaaacaagagaccaagagcttaaagcagaaggaagctaagaagaaatccaaggctgagaaagaaaaaggaaagacaaagcaggaaaaactgaaggaaaaagtcaagagggaaaagaaggagaaggtaaaaatgaaggaaaaggaggaggtgaccaaagccaagccagcctgtaaagcagataagaccctggccacacagaggcgcttggaggaacggcagaggcagcagatgatcttggaggaaatgaagaagccgacagaggatatgtgtctgactgaccaccagcccctgcctgacttctcacgagtccctggtctgacattgcccagtggagccttctcagactgcttgaccattgtggagttcctgcatagctttggcaaggtgctgggctttgatcctgccaaagatgtgcctagcctgggggtcctgcaggagggactcctgtgtcaaggtgacagcttgggtgaggtgcaagacctgctggtcaggctgctgaaggctgcactccatgatcctggctttccctcctactgtcagtccctaaagatcttgggggagaaggtgtctgagatcccactgacaagagacaatgtgtcagagatcctgcgctgcttccttatggcatatggagtagagccagccctctgtgaccgcctgcgcacccagccttttcaggcccagccaccccagcagaaggctgctgtcctggccttccttgtgcatgagctcaatggctccaccctcatcatcaatgagattgacaagactctggagagtatgtccagctacaggaaaaacaagtggattgttgaaggccggctccggaggctgaaaactgttctggccaagcgaactgggcggtctgaagtagagatggaagggccagaggaatgcctgggacggaggcgcagttctcggatcatggaggagaccagtggcatggaagaagaggaagaagaggagtctatagcagctgtccctggccgcaggggtcgaagagatggagaggttgatgccacagcatctagcatcccagagctagagcgccagatagaaaaactcagcaagcgtcagcttttctttcgcaaaaagctgcttcactcatcccagatgcttcgggcggtctccctgggtcaggaccgctacagacgtcgctactgggtattgccgtatttggctggtatctttgtagaaggaacagaggggaacttagttcctgaggaggtgataaagaaggaaactgactccttaaaagtggcagcccatgcgtcactcaaccctgccctcttctctatgaagatggagttagctggctccaacaccactgccagttctcctgcccgggcccgaggccgacctcgaaaaactaagcccgggtctatgcaacctaggcatcttaagtcccctgtcaggggtcaggattcagaacagccccaggcccagcttcagcctgaggctcagcttcatgctcctgcccagccccagcctcagcttcagcttcagcttcagtcccataaggggttcctggagcaagaaggctcccctttgtcactgggtcagagccagcatgacctcagccagtcagccttcctgtcttggctgagccagactcagagccatagctccctgttgagcagctcagtcctcacacctgatagcagtccgggaaaactagacccagctccatcacaacccccggaggagccagagcctgatgaggcagaatccagccctgatcctcaagcactctggtttaacatctcagcccagatgccctgcaatgctgcccccacaccgccccctgcagtttctgaggaccaacccactccctcccctcagcagcttgcctcctccaagccaatgaatagacctagtgctgccaacccttgttctccagtgcagttctcttccacgcccttggctgggttggcccctaagaggcgagcaggagaccctggagaaatgccacagagtcccacagggctgggacagcccaaacggagagggagacctcccagtaagttcttcaaacagatggaacagcgttacctaacccagctgacagcccagcctgtcccacctgagatgtgctcaggctggtggtggatacgagatcctgagatgttggatgccatgctcaaggccctacacccccgaggtatccgggagaaggcacttcacaaacaccttaacaagcacagggacttcttgcaggaagtctgcctgcggccctcagctgaccccatctttgagcccaggcaactacctgcctttcaagaagggattatgagctggtcccccaaagagaagacatacgagacagacctagcagtgcttcaatgggtagaggagctggagcagcgggttatcatgtctgatctgcagattcggggctggacatgtcctagcccagactctacccgtgaagacttggcctactgtgagcacctctccgactcccaggaggatatcacctggcgaggtcggggcagggagggactggcacctcagcgtaaaactaccaaccctttggacctggctgtgatgcggctggctgccctggaacagaatgtagaacggcggtacctgcgggagcccctctggccaactcatgaggttgtgctggagaaggccctgcttagcacacctaatggtgcccctgagggcaccactacagagatatcatatgagatcacccctcgcattcgtgtctggcgccagaccctcgagcggtgccggagcgcagcccaggtgtgcttgtgcctgggccagctggagaggtccattgcctgggagaagtctgtcaacaaagtgcaggtggagggagaattcactcagaagcctggtttcccaaagcgtggccagaagcggaaaagtggttattcgctgaacttctcagagggtgatggccgccgacgccgggtactgttgaggggccgagaaagcccagcagcagggcctcggtactcggaagaagggctctccccctccaagcggcggcgactctctatgcggaaccaccacagtgatctcacattttgcgagattatcctgatggagatggagtcccatgatgcagcctggcctttcctagagcctgtgaacccacgtttggtgagtgggtaccggcgcatcatcaaaaatcctatggatttttccaccatgcgggagcggctgctcaggggagggtacaccagctcagaggagtttgcggctgatgccctcctggtatttgacaactgccagactttcaacgaggatgactctgaagtaggcaaggctgggcacatcatgcgccgcttcttcgagagccgctgggaggagttttatcagggaaaacaggccaatctgtgaggcaagggaggtggggagtcaccttgtggcatctccccccaccttccaaacaaaaacctgccattttcacctgctgatgctgccctgggtccagactcaagtcagatacaaccctgatttttgaccttgcccttggcagtgccccacatcctcttattcctacatccctttctcccttccctcctcttgctcctcaagtaagaggtgcagagatgaggtccttctggactaaaagccaaaaaaagaaagaaaaaaataatttttcttttctgttttatttgctaattaaaaatggggagggggaaagtcgtccctacttcctcctccctgcttcctctcctcccctgtacgtgccccagcattctggggttatttaacaatagcaatagttctagtgaatgtgtgaaaccaagaaacactctgtactgtgtgcggacccgcagtgacggccagtaaagtggacttaactcccaagtgtgtcgcgccggacaccgggccctggacatgctgcttccatgttcagtcccttccctgcttctcgctgtctttcttttcccacctcccaccccccagttttcagattttctctcatccaataatgtaaaactatcgtgtacgggttcctccctccttttctcttctcccaaatcttttcccttcaaaggaaaaaaaaatgttcagaggtccctgtcttctgtccccatcttcctgccgatagctatcccctgtatgatgttggatgctcctcacatgctgagtttccagccttttctgaaactcagtagctggggagagggcagggaggcttcctgggccttccagcctccttccccacctccttcccaaaccctcttgggaactcctcagggacaactactgctgagtttgggtgcaccctaagatggaggccaggtagcaatggggccggcctcagagagagcgctgtgtgtgtgtgtgtgtgtgtgtgtgtgtgtgtgtgtgtcggcctcagagcgcgctgtgtgtgtgtgtgtgtgtgtcagcctcagagcgcgcgctgtgtgtgtgtgtgtgtgtgtgtgtgtgtgcgtgctgtgtgaccctgtattgtttgataggatccattcagtttccccaagtacctgttttcattcccatttttcccattgtttaaaaccatcacttttttgtctttgggaaaccacaggaacaatttctctggagacaaggctgtgtctctctcctggtcatttttgttccagcctcttcagactgtgcaatctttcagcaggaactccctctcttctcggtagctttgaatcttaagcttctacgggagagtggtagaactggatcatttcctaatcccatttagttgtgcttttcttcatttacttcataccccaggaccccttccccagcagcagagaccctggagcacaggagagtagggaggaggggttctgggtccatcactgccctacatgtgactatgtccaagttaagcccccaacacgagaggaaagctgctgactcccagctatagccatgggcacttggccccctgcttttcctgctcagcagagcccctcccttcagagattacgggtacttgcactggggaggtggctgctggctggcccaagcagagagctgaggcatccaagaaatgttccattggggggtgggggtgccaggtgaggtggagcattccttgtattctggcagcactgaagagccactgaagggggtaggggcagtgtaggtcctggggcagcccctttattcctttatgccccttctccctcatagcctatttctaaagtcgccttttctgtcagataaacctcaaaacttttaattttatttgagatttttttttgcttttaagaggtggattgaagaatatttgaattgactttatattatgcataaatatttatattttatctaaataactgcgctgtaacaaactttgtgttagacagttgaaactgttagagttgggggctctgctttttccccctggcaattttcccctggtataagatgtgctagattaatttcattgtgaggtggatgggggagtgaaattgtgaggtggatgggggagtgaaatctccatggttcctgctttgtgttcctctcccagctccatctctttccctagggaccaggcactcatatggcggggtggggtcctagcctcagtttgaagaagtgggggctggagcggggttgggggtggtagggatagggcatgatcaaaggggccatttcttgcttttctttcctcatcttcactgcccccttgagctaggtggattttctcttcatgacaagagtatttggtagggaaagcaggtttaaaataaaaagacaacccaccccctgcccttttgcttccctcccatcagtctggttgacaggaagaaaccacaccatcaacaccaacaagtttctgtgttccttttacagcaaaagggactttttatataaccaaatgtggtgttttagtgactttttgataatgtacagttttttgtgaatttaaatttatttctttctatatttttaggaccaatctcatttttaataaggttaaaaagaaaaaaaaagtctagcgaaaaaactcctgtttttgccatgtgatgttccacaagtgcagctgtagaaaagtgcttgtcagttgttgaataaaaaaaccacatttgatagaga

SEQ ID NO: 371090 - DNA, 4708 bp, Homo sapiens
tgcatcaacgcgttgggagcttaccatatggtcgactgcaggcggcgcgaattcactagtgattgagccagctcatgacctcagccagtcagccttcctgtcttggctgagccagactcagagccatagctccctgttgagcagctcagtcctcacacctgatagcagtccgggaaaactagacccagctccatcacaacccccggaggagccagagcctgatgaggcagaatccagccctgatcctcaagcactctggtttaacatctcagcccagatgccctgcaatgctgcccccacaccgccccctgcagtttctgaggaccaacccactccctcccctcagcagcttgcctcctccaagccaatgaatagacctagtgctgccaacccttgttctccagtgcagttctcttccacgcccttggctgggttggcccctaagaggcgagcaggagaccctggagaaatgccacagagtcccacagggctgggacagcccaaacggagagggagacctcccagtaagttcttcaaacagatggaacagcgttacctaacccagctgacagcccagcctgtcccacctgagatgtgctcaggctggtggtggatacgagatcctgagatgttggatgccatgctcaaggccctacacccccgaggtatccgggagaaggcacttcacaaacaccttaacaagcacagggacttcttgcaggaagtctgcctgcggccctcagctgaccccatctttgagcccaggcaactacctgcctttcaagaagggattatgagctggtcccccaaagagaagacatacgagacagacctagcagtgcttcaatgggtagaggagctggagcagcgggttatcatgtctgatctgcagattcggggctggacatgtcctagcccagactctacccgtgaagacttggcctactgtgagcacctctccgactcccaggaggatatcacctggcgaggtcggggcagggagggactggcacctcagcgtaaaactaccaaccctttggacctggctgtgatgcggctggctgccctggaacagaatgtagaacggcggtacctgcgggagcccctctggccaactcatgaggttgtgctggagaaggccctgcttagcacacctaatggtgcccctgagggcaccactacagagatatcatatgagatcacccctcgcattcgtgtctggcgccagaccctcgagcggtgccggagcgcagcccaggtgtgcttgtgcctgggccagctggagaggtccattgcctgggagaagtctgtcaacaaagtgacatgtctagtctgccggaagggtgacaatgatgagtttcttctgctttgtgatgggtgtgaccgtggctgccacatttactgccatcgtcccaagatggaggctgtcccagaaggagattggttctgtactgtctgtttggctcagcaggtggagggagaattcactcagaagcctggtttcccaaagcgtggccagaagcggaaaagtggttattcgctgaacttctcagagggtgatggccgccgacgccgggtactgttgaggggccgagaaagcccagcagcagggcctcggtactcggaagaagggctctccccctccaagcggcggcgactctctatgcggaaccaccacagtgatctcacattttgcgagattatcctgatggagatggagtcccatgatgcagcctggcctttcctagagcctgtgaacccacgtttggtgagtgggtaccggcgcatcatcaaaaatcctatggatttttccaccatgcgggagcggctgctcaggggagggtacaccagctcagaggagtttgcggctgatgccctcctggtatttgacaactgccagactttcaacgaggatgactctgaagtaggcaaggctgggcacatcatgcgccgcttcttcgagagccgctgggaggagttttatcagggaaaacaggccaatctgtgaggcaagggaggtggggagtcaccttgtggcatctccccccaccttccaaacaaaaacctgccattttcacctgctgatgctgccctgggtccagactcaagtcagatacaaccctgatttttgaccttgcccttggcagtgccccacatcctcttattcctacatccctttctcccttccctcctcttgctcctcaagtaagaggtgcagagatgaggtccttctggactaaaagccaaaaaaagaaagaaaaaaataatttttcttttctgttttatttgctaattaaaaatggggagggggaaagtcgtccctacttcctcctccctgcttcctctcctcccctgtacgtgccccagcattctggggttatttaacaatagcaatagttctagtgaatgtgtgaaaccaagaaacactctgtactgtgtgcggacccgcagtgacggccagtaaagtggacttaactcccaagtgtgtcgcgccggacaccgggccctggacatgctgcttccatgttcagtcccttccctgcttctcgctgtctttcttttcccacctcccaccccccagttttcagattttctctcatccaataatgtaaaactatcgtgtacgggttcctccctccttttctcttctcccaaatcttttcccttcaaaggaaaaaaaaatgttcagaggtccctgtcttctgtccccatcttcctgccgatagctatcccctgtatgatgttggatgctcctcacatgctgagtttccagccttttctgaaactcagtagctggggagagggcagggaggcttcctgggccttccagcctccttccccacctccttcccaaaccctcttgggaactcctcagggacaactactgctgagtttgggtgcaccctaagatggaggccaggtagcaatggggccggcctcagagagagcgctgtgtgtgtgtgtgtgtgtgtgtgtgtgtgtgtgtgtgtcggcctcagagcgcgctgtgtgtgtgtgtgtgtgtgtcagcctcagagcgcgcgctgtgtgtgtgtgtgtgtgtgtgtgtgtgtgcgtgctgtgtgaccctgtattgtttgataggatccattcagtttccccaagtacctgttttcattcccatttttcccattgtttaaaaccatcacttttttgtctttgggaaaccacaggaacaatttctctggagacaaggctgtgtctctctcctggtcatttttgttccagcctcttcagactgtgcaatctttcagcaggaactccctctcttctcggtagctttgaatcttaagcttctacgggagagtggtagaactggatcatttcctaatcccatttagttgtgcttttcttcatttacttcataccccaggaccccttccccagcagcagagaccctggagcacaggagagtagggaggaggggttctgggtccatcactgccctacatgtgactatgtccaagttaagcccccaacacgagaggaaagctgctgactcccagctatagccatgggcacttggccccctgcttttcctgctcagcagagcccctcccttcagagattacgggtacttgcactggggaggtggctgctggctggcccaagcagagagctgaggcatccaagaaatgttccattggggggtgggggtgccaggtgaggtggagcattccttgtattctggcagcactgaagagccactgaagggggtaggggcagtgtaggtcctggggcagcccctttattcctttatgccccttctccctcatagcctatttctaaagtcgccttttctgtcagataaacctcaaaacttttaattttatttgagatttttttttgcttttaagaggtggattgaagaatatttgaattgactttatattatgcataaatatttatattttatctaaataactgcgctgtaacaaactttgtgttagacagttgaaactgttagagttgggggctctgctttttccccctggcaattttcccctggtataagatgtgctagattaatttcattgtgaggtggatgggggagtgaaattgtgaggtggatgggggagtgaaatctccatggttcctgctttgtgttcctctcccagctccatctctttccctagggaccaggcactcatatggcggggtggggtcctagcctcagtttgaagaagtgggggctggagcggggttgggggtggtagggatagggcatgatcaaaggggccatttcttgcttttctttcctcatcttcactgcccccttgagctaggtggattttctcttcatgacaagagtatttggtagggaaagcaggtttaaaataaaaagacaacccaccccctgcccttttgcttccctcccatcagtctggttgacaggaagaaaccacaccatcaacaccaacaagtttctgtgttccttttacagcaaaagggactttttatataaccaaatgtggtgttttagtgactttttgataatgtacagttttttgtgaatttaaatttatttctttctatatttttaggaccaatctcatttttaataaggttaaaaagaaaaaaaaagtctagcgaaaaaactcctgtttttgccatgtgatgttccacaagtgcagctgtagaaaagtgcttgtcagttgttgaataaaaaaaccacatttgatagaga

SEQ ID NO: 371091 - DNA, 2942 bp, Homo sapiens
atgtgggtgaaccccccggtctttgctactgctgcaactcctacccagctcacagttttgcccctgccctgtccaggtacaccagctcagaggagtttgcggctgatgccctcctggtatttgacaactgccagactttcaacgaggatgactctgaagtaggcaaggctgggcacatcatgcgccgcttcttcgagagccgctgggaggagttttatcagggaaaacaggccaatctgtgaggcaagggaggtggggagtcaccttgtggcatctccccccaccttccaaacaaaaacctgccattttcacctgctgatgctgccctgggtccagactcaagtcagatacaaccctgatttttgaccttgcccttggcagtgccccacatcctcttattcctacatccctttctcccttccctcctcttgctcctcaagtaagaggtgcagagatgaggtccttctggactaaaagccaaaaaaagaaagaaaaaaataatttttcttttctgttttatttgctaattaaaaatggggagggggaaagtcgtccctacttcctcctccctgcttcctctcctcccctgtacgtgccccagcattctggggttatttaacaatagcaatagttctagtgaatgtgtgaaaccaagaaacactctgtactgtgtgcggacccgcagtgacggccagtaaagtggacttaactcccaagtgtgtcgcgccggacaccgggccctggacatgctgcttccatgttcagtcccttccctgcttctcgctgtctttcttttcccacctcccaccccccagttttcagattttctctcatccaataatgtaaaactatcgtgtacgggttcctccctccttttctcttctcccaaatcttttcccttcaaaggaaaaaaaaatgttcagaggtccctgtcttctgtccccatcttcctgccgatagctatcccctgtatgatgttggatgctcctcacatgctgagtttccagccttttctgaaactcagtagctggggagagggcagggaggcttcctgggccttccagcctccttccccacctccttcccaaaccctcttgggaactcctcagggacaactactgctgagtttgggtgcaccctaagatggaggccaggtagcaatggggccggcctcagagagagcgctgtgtgtgtgtgtgtgtgtgtgtgtgtgtgtgtgtgtgtcggcctcagagcgcgctgtgtgtgtgtgtgtgtgtgtcagcctcagagcgcgcgctgtgtgtgtgtgtgtgtgtgtgtgtgtgtgcgtgctgtgtgaccctgtattgtttgataggatccattcagtttccccaagtacctgttttcattcccatttttcccattgtttaaaaccatcacttttttgtctttgggaaaccacaggaacaatttctctggagacaaggctgtgtctctctcctggtcatttttgttccagcctcttcagactgtgcaatctttcagcaggaactccctctcttctcggtagctttgaatcttaagcttctacgggagagtggtagaactggatcatttcctaatcccatttagttgtgcttttcttcatttacttcataccccaggaccccttccccagcagcagagaccctggagcacaggagagtagggaggaggggttctgggtccatcactgccctacatgtgactatgtccaagttaagcccccaacacgagaggaaagctgctgactcccagctatagccatgggcacttggccccctgcttttcctgctcagcagagcccctcccttcagagattacgggtacttgcactggggaggtggctgctggctggcccaagcagagagctgaggcatccaagaaatgttccattggggggtgggggtgccaggtgaggtggagcattccttgtattctggcagcactgaagagccactgaagggggtaggggcagtgtaggtcctggggcagcccctttattcctttatgccccttctccctcatagcctatttctaaagtcgccttttctgtcagataaacctcaaaacttttaattttatttgagatttttttttgcttttaagaggtggattgaagaatatttgaattgactttatattatgcataaatatttatattttatctaaataactgcgctgtaacaaactttgtgttagacagttgaaactgttagagttgggggctctgctttttccccctggcaattttcccctggtataagatgtgctagattaatttcattgtgaggtggatgggggagtgaaattgtgaggtggatgggggagtgaaatctccatggttcctgctttgtgttcctctcccagctccatctctttccctagggaccaggcactcatatggcggggtggggtcctagcctcagtttgaagaagtgggggctggagcggggttgggggtggtagggatagggcatgatcaaaggggccatttcttgcttttctttcctcatcttcactgcccccttgagctaggtggattttctcttcatgacaagagtatttggtagggaaagcaggtttaaaataaaaagacaacccaccccctgcccttttgcttccctcccatcagtctggttgacaggaagaaaccacaccatcaacaccaacaagtttctgtgttccttttacagcaaaagggactttttatataaccaaatgtggtgttttagtgactttttgataatgtacagttttttgtgaatttaaatttatttctttctatatttttaggaccaatctcatttttaataaggttaaaaagaaaaaaaaagtctagcgaaaaaactcctgtttttgccatgtgatgttccacaagtgcagctgtagaaaagtgcttgtcagttgttgaataaaaaaaccacatttgatagaga

SEQ ID NO: 371092 - DNA, 3573 bp, Homo sapiens
gttctggcgcccggagcgcggccatgtgaaccgcttgtaccccggggagagacgagccccgagcccggctggacgccgctgcctcaggaaatggaggcaaacgaccattttaactttactggccttccccctgcacctgctgcctcaggactgaaaccctctccttcctcaggggagggcctctacactaacgggtctcccatgaacttcccccagcaagggaaaagtttgaatggggatgtgaatgttaatggcttatctactgtatctcacactactacttcagggattttgaactctgctccccactcctccagcacctcacacctccatcaccccagcgtggcctacgactgtctctggaactactcacagtacccatctgccaatcctggcagcaacctcaaggacccaccccttctctcccagttctcggggggacaatacccactcaacggcatccttgggggcagccggcaaccttcatccccaagtcataacactaaccttcgggctgggagccaagagttctgggccaacggtacccagagtcccatggggcttaactttgattcacaagaactgtatgattcctttcctgaccagaattttgaggtgatgcccaatggaccccctagttttttcacctccccacagacttctcctatgttgggatctagcattcaaacctttgcaccctcccaggaggtaggcagtggtatccatcctgatgaggcagcagaaaaggagatgacttcagttgtggcagagaatggcactggcttggtaggcagcttggagctggaagaagagcagccagaactgaagatgtgtggctacaatggctctgtcccttctgtggaatcgttacaccaagaggtctcagtcctggtccctgaccccacagtgagctgtttagatgatccttcacatcttcctgatcaactggaagacactccaatcctcagtgaagactctctggagcccttcaactctctggcaccagagccagtgagtggaggactatatggtattgatgacacggagctgatgggtgcagaggacaagctgcctcttgaggacagccctgtgatttctgcccttgattgcccttccctcaataatgctactgccttcagtctcctggcagatgatagtcaaacatcaacctctatctttgccagtcccacctctccacctgtcctaggggagtctgtcctgcaagataacagctttgacctgaataatggtagtgacgctgaacaggaagaaatggaaactcaatcttcagacttcccaccatccctgacccagccagctcctgatcagtcatccactattcagctacatccagcaacctcaccagcagtctcgccaacaacctccccagcagtctccctagtggtttctccagcagcctccccagaaatctctccagaagtttgtcccgcagcttctacagttgtctctccagcagtcttctcagtggtctctccagcttcctcagcagtcctcccagcagtctccttagaagtcccgttgacggcttcagtgacatccccaaaagcctctcccgtaacttccccagcagctgcctttccaacagcctccccagcaaataaggatgtcagcagctttctagaaaccactgctgacgtggaagagatcactggagaaggactcactgcttctggtagtggtgatgtcatgaggagacgtattgctaccccagaagaagttcgtcttcccctccaacatgggtggcggagagaggtgcgcatcaagaagggcagccaccgatggcagggggagacctggtattatggcccctgtgggaagaggatgaagcaatttccagaagtgatcaagtacctgagccgcaacgtggtacacagtgtccgccgagagcacttcagcttcagtccccgtatgcctgttggagatttctttgaagaaagagacacgccagagggcttgcagtgggtgcagctctcagcagaggagatcccgtcgaggattcaggcaattactggcaaacggggtcgacctcgaaacactgagaaggctaagactaaggaagtccccaaggtgaaacggggtcgaggtcggccacctaaggtcaaaatcactgagctattgaacaagacagacaaccgccccctaaagaaactggaggcccaagaaacattgaatgaggaggataaagcaaagattgctaaaagcaagaagaagatgaggcagaaggttcaacggggagagtgtcagactactatccaagggcaggccagaaataagcggaaacaagagaccaagagcttaaagcagaaggaagctaagaagaaatccaaggctgagaaagaaaaaggaaagacaaagcaggaaaaactgaaggaaaaagtcaagagggaaaagaaggagaaggtaaaaatgaaggaaaaggaggaggtgaccaaagccaagccagcctgtaaagcagataagaccctggccacacagaggcgcttggaggaacggcagaggcagcagatgatcttggaggaaatgaagaagccgacagaggatatgtgtctgactgaccaccagcccctgcctgacttctcacgagtccctggtctgacattgcccagtggagccttctcagactgcttgaccattgtggagttcctgcatagctttggcaaggtgctgggctttgatcctgccaaagatgtgcctagcctgggggtcctgcaggagggactcctgtgtcaaggtgacagcttgggtgaggtgcaagacctgctggtcaggctgctgaaggctgcactccatgatcctggctttccctcctactgtcagtccctaaagatcttgggggagaaggtgtctgagatcccactgacaagagacaatgtgtcagagatcctgcgctgcttccttatggcatatggagtagagccagccctctgtgaccgcctgcgcacccagccttttcaggcccagccaccccagcagaaggctgctgtcctggccttccttgtgcatgagctcaatggctccaccctcatcatcaatgagattgacaagactctggagagtatgtccagctacaggaaaaacaagtggattgttgaaggccggctccggaggctgaaaactgttctggccaagcgaactgggcggtctgaagtagagatggaagggccagaggaatgcctgggacggaggcgcagttctcggatcatggaggagaccagtggcatggaagaagaggaagaagaggagtctatagcagctgtccctggccgcaggggtcgaagagatggagaggttgatgccacagcatctagcatcccagagctagagcgccagatagaaaaactcagcaagcgtcagcttttctttcgcaaaaagctgcttcactcatcccagatgcttcgggcggtctccctgggtcaggaccgctacagacgtcgctactgggtattgccgtatttggctggtatctttgtagaaggaacagaggggaacttagggctgagaaagaaaaaggaaagacaaagcaggaaaaactgaaggaaaaagtcaagaggg

SEQ ID NO: 371093 - DNA, 3053 bp, Homo sapiens
gttctggcgcccggagcgcggccatgtgaaccgcttgtaccccggggagagacgagccccgagcccggctggacgccgctgcctcaggaaatggaggcaaacgaccattttaactttactggccttccccctgcacctgctgcctcaggactgaaaccctctccttcctcaggggagggcctctacactaacgggtctcccatgaacttcccccagcaagggaaaagtttgaatggggatgtgaatgttaatggcttatctactgtatctcacactactacttcagggattttgaactctgctccccactcctccagcacctcacacctccatcaccccagcgtggcctacgactgtctctggaactactcacagtacccatctgccaatcctggcagcaacctcaaggacccaccccttctctcccagttctcggggggacaatacccactcaacggcatccttgggggcagccggcaaccttcatccccaagtcataacactaaccttcgggctgggagccaagagttctgggccaacggtacccagagtcccatggggcttaactttgattcacaagaactgtatgattcctttcctgaccagaattttgaggtgatgcccaatggaccccctagttttttcacctccccacagacttctcctatgttgggatctagcattcaaacctttgcaccctcccaggaggtaggcagtggtatccatcctgatgaggcagcagaaaaggagatgacttcagttgtggcagagaatggcactggcttggtaggcagcttggagctggaagaagagcagccagaactgaagatgtgtggctacaatggctctgtcccttctgtggaatcgttacaccaagaggtctcagtcctggtccctgaccccacagtgagctgtttagatgatccttcacatcttcctgatcaactggaagacactccaatcctcagtgaagactctctggagcccttcaactctctggcaccagagccagtgagtggaggactatatggtattgatgacacggagctgatgggtgcagaggacaagctgcctcttgaggacagccctgtgatttctgcccttgattgcccttccctcaataatgctactgccttcagtctcctggcagatgatagtcaaacatcaacctctatctttgccagtcccacctctccacctgtcctaggggagtctgtcctgcaagataacagctttgacctgaataatggtagtgacgctgaacaggaagaaatggaaactcaatcttcagacttcccaccatccctgacccagccagctcctgatcagtcatccactattcagctacatccagcaacctcaccagcagtctcgccaacaacctccccagcagtctccctagtggtttctccagcagcctccccagaaatctctccagaagtttgtcccgcagcttctacagttgtctctccagcagtcttctcagtggtctctccagcttcctcagcagtcctcccagcagtctccttagaagtcccgttgacggcttcagtgacatccccaaaagcctctcccgtaacttccccagcagctgcctttccaacagcctccccagcaaataaggatgtcagcagctttctagaaaccactgctgacgtggaagagatcactggagaaggactcactgcttctggtagtggtgatgtcatgaggagacgtattgctaccccagaagaagttcgtcttcccctccaacatgggtggcggagagaggtgcgcatcaagaagggcagccaccgatggcagggggagacctggtattatggcccctgtgggaagaggatgaagcaatttccagaagtgatcaagtacctgagccgcaacgtggtacacagtgtccgccgagagcacttcagcttcagtccccgtatgcctgttggagatttctttgaagaaagagacacgccagagggcttgcagtgggtgcagctctcagcagaggagatcccgtcgaggattcaggcaattactggcaaacggggtcgacctcgaaacactgagaaggctaagactaaggaagtccccaaggtgaaacggggtcgaggtcggccacctaaggtcaaaatcactgagctattgaacaagacagacaaccgccccctaaagaaactggaggcccaagaaacattgaatgaggaggataaagcaaagattgctaaaagcaagaagaagatgaggcagaaggttcaacggggagagtgtcagactactatccaagggcaggccagaaataagcggaaacaagagaccaagagcttaaagcagaaggaagctaagaagaaatccaaggctgagaaagaaaaaggaaagacaaagcaggaaaaactgaaggaaaaagtcaagagggaaaagaaggagaaggtaaaaatgaaggaaaaggaggaggtgaccaaagccaagccagcctgtaaagcagataagaccctggccacacagaggcgcttggaggaacggcagaggcagcagatgatcttggaggaaatgaagaagccgacagaggatatgtgtctgactgaccaccagcccctgcctgacttctcacgagtccctggtctgacattgcccagtggagccttctcagactgcttgaccattgtggagttcctgcatagctttggcaaggtgctgggctttgatcctgccaaagatgtgcctagcctgggggtcctgcaggagggactcctgtgtcaaggtgacagcttgggtgaggtgcaagacctgctggtcaggctgctgaaggctgcactccatgatcctggctttccctcctactgtcaggtgagtgcaagtccctcccaaagtaaccaggacaagtaaaggagatgtaactacttagtgtttctcttttccttatatttttccatttctttttcttcctgactcctctccttattttatttttctttattttttccttttcttttgtggtcttctttcgtattctgtcttaacccccatagttctcttctgatgtattttcctcttgcacattc

SEQ ID NO: 371094 - DNA, 1408 bp, Homo sapiens
gttctggcgcccggagcgcggccatgtgaaccgcttgtaccccggggagagacgagccccgagcccggctggacgccgctgcctcaggaaatggaggcaaacgaccattttaactttactggccttccccctgcacctgctgcctcaggactgaaaccctctccttcctcaggggagggcctctacactaacgggtctcccatgaacttcccccagcaagggaaaagtttgaatggggatgtgaatgttaatggcttatctactgtatctcacactactacttcagggattttgaactctgctccccactcctccagcacctcacacctccatcaccccagcgtggcctacgactgtctctggaactactcacagtacccatctgccaatcctggcagcaacctcaaggacccaccccttctctcccagttctcggggggacaatacccactcaacggcatccttgggggcagccggcaaccttcatccccaagtcataacactaaccttcgggctgggagccaagagttctgggccaacggtacccagagtcccatggggcttaactttgattcacaagaactgtatgattcctttcctgaccagaattttgaggtgatgcccaatggaccccctagttttttcacctccccacagacttctcctatgttgggatctagcattcaaacctttgcaccctcccaggaggtaggcagtggtatccatcctgatgaggcagcagaaaaggagatgacttcagttgtggcagagaatggcactggcttggtaggcagcttggagctggaagaagagcagccagaactgaagatgtgtggctacaatggctctgtcccttctgtggaatcgttacaccaagaggtctcagtcctggtccctgaccccacagtgagctgtttagatgatccttcacatcttcctgatcaactggaagacactccaatcctcagtgaagactctctggagcccttcaactctctggcaccagagccagtgagtggaggactatatggtattgatgacacggagctgatgggtgcagaggacaagctgcctcttgaggacagccctgtgatttctgcccttgattgcccttccctcaataatgctactgccttcagtctcctggcagatgatagtcaaacatcaacctctatctttgccagtcccacctctccacctgtcctaggggagtctgtcctgcaagaggacacgacgtatagagccctgatagtaatgcgtagtgagcgctgcacaggcacatgataagtcgaagcactcaagcgtcagactgcccaaccatcctgaatcctgccatgctctcagactcggtcatgctcgtgattcaaggaacagtccggcagatcctgcagatctgctttccatttct

SEQ ID NO: 371095 - DNA, 298 bp, Homo sapiens
cggcagaggcagcagatgatcttggaggaaatgaagaagccgacagaggatatgtgtctgactgaccaccaggtagtgaggagagagtaacagttcctgggtcagctgggaagactttcctttaaaaaaaaaaaaaggacttctgcaatgggagagacatttccattaaagattaaaggaaggccgggtgccatggctcacactgtaatcccagcactttgggaggccgaggcgggcagatcgcttgagcccagcagttcaagaccagcctgggcaacatggcgagacctcatctcta

SEQ ID NO: 371096 - DNA, 331 bp, Homo sapiens
atctgggttctaggctggaactcctttttcagctgcagcccctttacccttgagcctcctttccctttttttgtgctgccacttcatcctattccctattcccctgcagtgagattgacaagactctggagagtatgtccagctacaggaaaaacaagtggattgttgaaggccggctccggaggtagggaccagacagagagtagagcctcagagaggagagaagtggggcgggtgaagcatagccagggttttggcttgaaatgtgatgctttagccccttccctgggtttgggaccttaccagggcccaggatggtttagagtcaagg

SEQ ID NO: 371097 - DNA, 300 bp, Homo sapiens
ccggcttatgcatgatagtattttgaagccttaaatcatatttaggcagagattgtagtagggcaagcagtgcatctccagctgttgctaatctcacctgtttcctatactaacaggtggagggagaattcactcagaagcctggtttcccaaagcgtggccagaagcggaaaagtggttattcgctgaacttctcagagggtgatggccgccgacgccgggtactgttgaggggccgagaaagcccagcagcagggcctcggtactcggaagaagggctctccccctccaagcggcggc

SEQ ID NO: 371098 - DNA, 682 bp, Homo sapiens
gatgcatcattcctagttgctatagtggttactagggcaaagcttggatggagatagaggaggagtgggatgaggcgaccaagagcttggttcgggcacatattaaatttgacacccccctggagcatgccagttagggctgataggcatttagaaattagatttagagctcagaagaatcactgtagtatagtacattgtagtaaatgtgcaagaggaagtcctggtggtggataacatcacccagggaaataggcttgcagcttgggaagcttggctagggagaaatggacaaaggaggaggagctggtaaaacagtcatgaaagacagcctcaagacagtgttgtcccagacaggaggttctgtactgtctgttgggccaggtggagggagaattcactcagaagcctggtttcccaaagcgtggccagaagcggaaaagtggttattcgctgaacttctcagagggtgatggccgccgacgccgggtactgttgaggggccgagaaagcccagcagcagggcctcggtactcggaagaagggctctccccctccaagcggcggcgactctctatgcggaaccaccacagtgatctcacattttgcgagattatcctgatggatttgtccgcattgtggcagccagcatgtgggtacgagctcgattcgtatctgtctg

SEQ ID NO: 371099 - DNA, 8463 bp, Homo sapiens
agcacgcaaaccagccggtaaatcagataagaccctggccgcacagaggcgcttggaggaacggcagaggagcagatgatcttggaggaaatgaagaacgccgacagaggatatgtgtctgactgaccaccagctcctgcctgacttctcacgagtccctggtctgacattgcccagcaggggaaaagtttgaatggggatgtgaatgttaatggcttatctactgtatctcacactactacttcagggattttgaactctgctccccactcctccagcacctcacacctccatcaccccagcgtggcctacgactgtctctggaactactcacagtacccatctgccaatcctggcagcaacctcaaggacccaccccttctctcccagttctcggggggacaatacccactcaacggcatccttgggggcagccggcaaccttcatccccaagtcataacactaaccttcgggctgggagccaagagttctgggccaacggtacccagagtcccatggggcttaactttgattcacaagaactgtatgattcctttcctgaccagaattttgaggtgatgcccaatggaccccctagttttttcacctccccacagacttctcctatgttgggatctagcattcaaacctttgcaccctcccaggaggtaggcagtggtatccatcctgatgaggcagcagaaaaggagatgacttcagttgtggcagagaatggcactggcttggtaggcagcttggagctggaagaagagcagccagaactgaagatgtgtggctacaatggctctgtcccttctgtggaatcgttacaccaagaggtctcagtcctggtccctgaccccacagtgagctgtttagatgatccttcacatcttcctgatcaactggaagacactccaatcctcagtgaagactctctggagcccttcaactctctggcaccagagccagtgagtggaggactatatggtattgatgacacggagctgatgggtgcagaggacaagctgcctcttgaggacagccctgtgatttctgcccttgattgcccttccctcaataatgctactgccttcagtctcctggcagatgatagtcaaacatcaacctctatctttgccagtcccacctctccacctgtcctaggggagtctgtcctgcaagataacagctttgacctgaataatggtagtgacgctgaacaggaagaaatggaaactcaatcttcagacttcccaccatccctgacccagccagctcctgatcagtcatccactattcagctacatccagcaacctcaccagcagtctcgccaacaacctccccagcagtctccctagtggtttctccagcagcctccccagaaatctctccagaagtttgtcccgcagcttctacagttgtctctccagcagtcttctcagtggtctctccagcttcctcagcagtcctcccagcagtctccttagaagtcccgttgacggcttcagtgacatccccaaaagcctctcccgtaacttccccagcagctgcctttccaacagcctccccagcaaataaggatgtcagcagctttctagaaaccactgctgacgtggaagagatcactggagaaggactcactgcttctggtagtggtgatgtcatgaggagacgtattgctaccccagaagaagttcgtcttcccctccaacatgggtggcggagagaggtgcgcatcaagaagggcagccaccgatggcagggggagacctggtattatggcccctgtgggaagaggatgaagcaatttccagaagtgatcaagtacctgagccgcaacgtggtacacagtgtccgccgagagcacttcagcttcagtccccgtatgcctgttggagatttctttgaagaaagagacacgccagagggcttgcagtgggtgcagctctcagcagaggagatcccgtcgaggattcaggcaattactggcaaacggggtcgacctcgaaacactgagaaggctaagactaaggaagtccccaaggtgaaacggggtcgaggtcggccacctaaggtcaaaatcactgagctattgaacaagacagacaaccgccccctaaagaaactggaggcccaagaaacattgaatgaggaggataaagcaaagattgctaaaagcaagaagaagatgaggcagaaggttcaacggggagagtgtcagactactatccaagggcaggccagaaataagcggaaacaagagaccaagagcttaaagcagaaggaagctaagaagaaatccaaggctgagaaagaaaaaggaaagacaaagcaggaaaaactgaaggaaaaagtcaagagggaaaagaaggagaaggtaaaaatgaaggaaaaggaggaggtgaccaaagccaagccagcctgtaaagcagataagaccctggccacacagaggcgcttggaggaacggcagaggcagcagatgatcttggaggaaatgaagaagccgacagaggatatgtgtctgactgaccaccagcccctgcctgacttctcacgagtccctggtctgacattgcccagtggagccttctcagactgcttgaccattgtggagttcctgcatagctttggcaaggtgctgggctttgatcctgccaaagatgtgcctagcctgggggtcctgcaggagggactcctgtgtcaaggtgacagcttgggtgaggtgcaagacctgctggtcaggctgctgaaggctgcactccatgatcctggctttccctcctactgtcagtccctaaagatcttgggggagaaggtgtctgagatcccactgacaagagacaatgtgtcagagatcctgcgctgcttccttatggcatatggagtagagccagccctctgtgaccgcctgcgcacccagccttttcaggcccagccaccccagcagaaggctgctgtcctggccttccttgtgcatgagctcaatggctccaccctcatcatcaatgagattgacaagactctggagagtatgtccagctacaggaaaaacaagtggattgttgaaggccggctccggaggctgaaaactgttctggccaagcgaactgggcggtctgaagtagagatggaagggccagaggaatgcctgggacggaggcgcagttctcggatcatggaggagaccagtggcatggaagaagaggaagaagaggagtctatagcagctgtccctggccgcaggggtcgaagagatggagaggttgatgccacagcatctagcatcccagagctagagcgccagatagaaaaactcagcaagcgtcagcttttctttcgcaaaaagctgcttcactcatcccagatgcttcgggcggtctccctgggtcaggaccgctacagacgtcgctactgggtattgccgtatttggctggtatctttgtagaaggaacagaggggaacttagttcctgaggaggtgataaagaaggaaactgactccttaaaagtggcagcccatgcgtcactcaaccctgccctcttctctatgaagatggagttagctggctccaacaccactgccagttctcctgcccgggcccgaggccgacctcgaaaaactaagcccgggtctatgcaacctaggcatcttaagtcccctgtcaggggtcaggattcagaacagccccaggcccagcttcagcctgaggctcagcttcatgctcctgcccagccccagcctcagcttcagcttcagcttcagtcccataaggggttcctggagcaagaaggctcccctttgtcactgggtcagagccagcatgacctcagccagtcagccttcctgtcttggctgagccagactcagagccatagctccctgttgagcagctcagtcctcacacctgatagcagtccgggaaaactagacccagctccatcacaacccccggaggagccagagcctgatgaggcagaatccagccctgatcctcaagcactctggtttaacatctcagcccagatgccctgcaatgctgcccccacaccgccccctgcagtttctgaggaccaacccactccctcccctcagcagcttgcctcctccaagccaatgaatagacctagtgctgccaacccttgttctccagtgcagttctcttccacgcccttggctgggttggcccctaagaggcgagcaggagaccctggagaaatgccacagagtcccacagggctgggacagcccaaacggagagggagacctcccagtaagttcttcaaacagatggaacagcgttacctaacccagctgacagcccagcctgtcccacctgagatgtgctcaggctggtggtggatacgagatcctgagatgttggatgccatgctcaaggccctacacccccgaggtatccgggagaaggcacttcacaaacaccttaacaagcacagggacttcttgcaggaagtctgcctgcggccctcagctgaccccatctttgagcccaggcaactacctgcctttcaagaagggattatgagctggtcccccaaagagaagacatacgagacagacctagcagtgcttcaatgggtagaggagctggagcagcgggttatcatgtctgatctgcagattcggggctggacatgtcctagcccagactctacccgtgaagacttggcctactgtgagcacctctccgactcccaggaggatatcacctggcgaggtcggggcagggagggactggcacctcagcgtaaaactaccaaccctttggacctggctgtgatgcggctggctgccctggaacagaatgtagaacggcggtacctgcgggagcccctctggccaactcatgaggttgtgctggagaaggccctgcttagcacacctaatggtgcccctgagggcaccactacagagatatcatatgagatcacccctcgcattcgtgtctggcgccagaccctcgagcggtgccggagcgcagcccaggtgtgcttgtgcctgggccagctggagaggtccattgcctgggagaagtctgtcaacaaagtgacatgtctagtctgccggaagggtgacaatgatgagtttcttctgctttgtgatgggtgtgaccgtggctgccacatttactgccatcgtcccaagatggaggctgtcccagaaggagattggttctgtactgtctgtttggctcagcaggtggagggagaattcactcagaagcctggtttcccaaagcgtggccagaagcggaaaagtggttattcgctgaacttctcagagggtgatggccgccgacgccgggtactgttgaggggccgagaaagcccagcagcagggcctcggtactcggaagaagggctctccccctccaagcggcggcgactctctatgcggaaccaccacagtgatctcacattttgcgagattatcctgatggagatggagtcccatgatgcagcctggcctttcctagagcctgtgaacccacgtttggtgagtgggtaccggcgcatcatcaaaaatcctatggatttttccaccatgcgggagcggctgctcaggggagggtacaccagctcagaggagtttgcggctgatgccctcctggtatttgacaactgccagactttcaacgaggatgactctgaagtaggcaaggctgggcacatcatgcgccgcttcttcgagagccgctgggaggagttttatcagggaaaacaggccaatctgtgaggcaagggaggtggggagtcaccttgtggcatctccccccaccttccaaacaaaaacctgccattttcacctgctgatgctgccctgggtccagactcaagtcagatacaaccctgatttttgaccttgcccttggcagtgccccacatcctcttattcctacatccctttctcccttccctcctcttgctcctcaagtaagaggtgcagagatgaggtccttctggactaaaagccaaaaaaagaaagaaaaaaataatttttcttttctgttttatttgctaattaaaaatggggagggggaaagtcgtccctacttcctcctccctgcttcctctcctcccctgtacgtgccccagcattctggggttatttaacaatagcaatagttctagtgaatgtgtgaaaccaagaaacactctgtactgtgtgcggacccgcagtgacggccagtaaagtggacttaactcccaagtgtgtcgcgccggacaccgggccctggacatgctgcttccatgttcagtcccttccctgcttctcgctgtctttcttttcccacctcccaccccccagttttcagattttctctcatccaataatgtaaaactatcgtgtacgggttcctccctccttttctcttctcccaaatcttttcccttcaaaggaaaaaaaaatgttcagaggtccctgtcttctgtccccatcttcctgccgatagctatcccctgtatgatgttggatgctcctcacatgctgagtttccagccttttctgaaactcagtagctggggagagggcagggaggcttcctgggccttccagcctccttccccacctccttcccaaaccctcttgggaactcctcagggacaactactgctgagtttgggtgcaccctaagatggaggccaggtagcaatggggccggcctcagagagagcgctgtgtgtgtgtgtgtgtgtgtgtgtgtgtgtgtgtgtgtcggcctcagagcgcgctgtgtgtgtgtgtgtgtgtgtcagcctcagagcgcgcgctgtgtgtgtgtgtgtgtgtgtgtgtgtgtgcgtgctgtgtgaccctgtattgtttgataggatccattcagtttccccaagtacctgttttcattcccatttttcccattgtttaaaaccatcacttttttgtctttgggaaaccacaggaacaatttctctggagacaaggctgtgtctctctcctggtcatttttgttccagcctcttcagactgtgcaatctttcagcaggaactccctctcttctcggtagctttgaatcttaagcttctacgggagagtggtagaactggatcatttcctaatcccatttagttgtgcttttcttcatttacttcataccccaggaccccttccccagcagcagagaccctggagcacaggagagtagggaggaggggttctgggtccatcactgccctacatgtgactatgtccaagttaagcccccaacacgagaggaaagctgctgactcccagctatagccatgggcacttggccccctgcttttcctgctcagcagagcccctcccttcagagattacgggtacttgcactggggaggtggctgctggctggcccaagcagagagctgaggcatccaagaaatgttccattggggggtgggggtgccaggtgaggtggagcattccttgtattctggcagcactgaagagccactgaagggggtaggggcagtgtaggtcctggggcagcccctttattcctttatgccccttctccctcatagcctatttctaaagtcgccttttctgtcagataaacctcaaaacttttaattttatttgagatttttttttgcttttaagaggtggattgaagaatatttgaattgactttatattatgcataaatatttatattttatctaaataactgcgctgtaacaaactttgtgttagacagttgaaactgttagagttgggggctctgctttttccccctggcaattttcccctggtataagatgtgctagattaatttcattgtgaggtggatgggggagtgaaattgtgaggtggatgggggagtgaaatctccatggttcctgctttgtgttcctctcccagctccatctctttccctagggaccaggcactcatatggcggggtggggtcctagcctcagtttgaagaagtgggggctggagcggggttgggggtggtagggatagggcatgatcaaaggggccatttcttgcttttctttcctcatcttcactgcccccttgagctaggtggattttctcttcatgacaagagtatttggtagggaaagcaggtttaaaataaaaagacaacccaccccctgcccttttgcttccctcccatcagtctggttgacaggaagaaaccacaccatcaacaccaacaagtttctgtgttccttttacagcaaaagggactttttatataaccaaatgtggtgttttagtgactttttgataatgtacagttttttgtgaatttaaatttatttctttctatatttttaggaccaatctcatttttaataaggttaaaaagaaaaaaaaagtctagcgaaaaaactcctgtttttgccatgtgatgttccacaagtgcagctgtagaaaagtgcttgtcagttgttgaataaaaaaaccacatttgatagaga

SEQ ID NO: 371100 - DNA, 8610 bp, Homo sapiens
cggaatacacagcgcaactagggtgactttgtcttcggcgagctcgatcctaagcccatacctagacctggcagatacccctaggaagaaaaatggagctcgggggggatagtggctttttgaggtgagaaaaacttgtctttccagctctctgcagtggaggctgatttgcatgttggtgattagcaattagcagagccaagtcgctgtgtttttgtggcagcagcaccagctcgcgagtgggagtgcaaattatttcaagctcatgcagagcttctggcctggagagggcaggtgggcgagcccgaaacagccccaacagacaccctgcatcaagaaaggcttctttcaaaatatacggagtggttagggtctagcagcgggcattgaggctgttttaactgactgtggcaggatcagactggctgttaaagtcgtctgagcccaatgtagtgattggcatgcgaaggagggaaggaagcaggcagagcatatcattatttgtctactcagtttccttttttttgttgtttagcattagtacacgtgacagcccctctcatcttttccctcaaaatagataaaagcttagcttccagttgattcctggtacaagggtaaccaccactctgtaaaattacaggatgttttctcgtttcccaatggatggaggagatatctgagaacatgatagagatgttgtatcagaccccactctcttttcctctctttgcctgctgtaggattgattttaccagcacatctctgctcagagtatcttgatgtgatcggttcccagcaatgaactggccgcaataaatgttgaatgaatgaacatccttctagcaaagattgactgcctagtatagctaagtgaaccaatataaggcactgattttgacttttggtctctcctgtgatttcctagaactgaagatgtgtggctacaatggctctgtcccttctgtggaatcgttacaccaagaggtctcagtcctggtccctgaccccacagtgagctgtttagatgatccttcacatcttcctgatcaactggaagacactccaatcctcagtgaagactctctggagcccttcaactctctggcaccagagccagtgagtggaggactatatggtattgatgacacggagctgatgggtgcagaggacaagctgcctcttgaggacagccctgtgatttctgcccttgattgcccttccctcaataatgctactgccttcagtctcctggcagatgatagtcaaacatcaacctctatctttgccagtcccacctctccacctgtcctaggggagtctgtcctgcaagataacagctttgacctgaataatggtagtgacgctgaacaggaagaaatggaaactcaatcttcagacttcccaccatccctgacccagccagctcctgatcagtcatccactattcagctacatccagcaacctcaccagcagtctcgccaacaacctccccagcagtctccctagtggtttctccagcagcctccccagaaatctctccagaagtttgtcccgcagcttctacagttgtctctccagcagtcttctcagtggtctctccagcttcctcagcagtcctcccagcagtctccttagaagtcccgttgacggcttcagtgacatccccaaaagcctctcccgtaacttccccagcagctgcctttccaacagcctccccagcaaataaggatgtcagcagctttctagaaaccactgctgacgtggaagagatcactggagaaggactcactgcttctggtagtggtgatgtcatgaggagacgtattgctaccccagaagaagttcgtcttcccctccaacatgggtggcggagagaggtgcgcatcaagaagggcagccaccgatggcagggggagacctggtattatggcccctgtgggaagaggatgaagcaatttccagaagtgatcaagtacctgagccgcaacgtggtacacagtgtccgccgagagcacttcagcttcagtccccgtatgcctgttggagatttctttgaagaaagagacacgccagagggcttgcagtgggtgcagctctcagcagaggagatcccgtcgaggattcaggcaattactggcaaacggggtcgacctcgaaacactgagaaggctaagactaaggaagtccccaaggtgaaacggggtcgaggtcggccacctaaggtcaaaatcactgagctattgaacaagacagacaaccgccccctaaagaaactggaggcccaagaaacattgaatgaggaggataaagcaaagattgctaaaagcaagaagaagatgaggcagaaggttcaacggggagagtgtcagactactatccaagggcaggccagaaataagcggaaacaagagaccaagagcttaaagcagaaggaagctaagaagaaatccaaggctgagaaagaaaaaggaaagacaaagcaggaaaaactgaaggaaaaagtcaagagggaaaagaaggagaaggtaaaaatgaaggaaaaggaggaggtgaccaaagccaagccagcctgtaaagcagataagaccctggccacacagaggcgcttggaggaacggcagaggcagcagatgatcttggaggaaatgaagaagccgacagaggatatgtgtctgactgaccaccagcccctgcctgacttctcacgagtccctggtctgacattgcccagtggagccttctcagactgcttgaccattgtggagttcctgcatagctttggcaaggtgctgggctttgatcctgccaaagatgtgcctagcctgggggtcctgcaggagggactcctgtgtcaaggtgacagcttgggtgaggtgcaagacctgctggtcaggctgctgaaggctgcactccatgatcctggctttccctcctactgtcagtccctaaagatcttgggggagaaggtgtctgagatcccactgacaagagacaatgtgtcagagatcctgcgctgcttccttatggcatatggagtagagccagccctctgtgaccgcctgcgcacccagccttttcaggcccagccaccccagcagaaggctgctgtcctggccttccttgtgcatgagctcaatggctccaccctcatcatcaatgagattgacaagactctggagagtatgtccagctacaggaaaaacaagtggattgttgaaggccggctccggaggctgaaaactgttctggccaagcgaactgggcggtctgaagtagagatggaagggccagaggaatgcctgggacggaggcgcagttctcggatcatggaggagaccagtggcatggaagaagaggaagaagaggagtctatagcagctgtccctggccgcaggggtcgaagagatggagaggttgatgccacagcatctagcatcccagagctagagcgccagatagaaaaactcagcaagcgtcagcttttctttcgcaaaaagctgcttcactcatcccagatgcttcgggcggtctccctgggtcaggaccgctacagacgtcgctactgggtattgccgtatttggctggtatctttgtagaaggaacagaggggaacttagttcctgaggaggtgataaagaaggaaactgactccttaaaagtggcagcccatgcgtcactcaaccctgccctcttctctatgaagatggagttagctggctccaacaccactgccagttctcctgcccgggcccgaggccgacctcgaaaaactaagcccgggtctatgcaacctaggcatcttaagtcccctgtcaggggtcaggattcagaacagccccaggcccagcttcagcctgaggctcagcttcatgctcctgcccagccccagcctcagcttcagcttcagcttcagtcccataaggggttcctggagcaagaaggctcccctttgtcactgggtcagagccagcatgacctcagccagtcagccttcctgtcttggctgagccagactcagagccatagctccctgttgagcagctcagtcctcacacctgatagcagtccgggaaaactagacccagctccatcacaacccccggaggagccagagcctgatgaggcagaatccagccctgatcctcaagcactctggtttaacatctcagcccagatgccctgcaatgctgcccccacaccgccccctgcagtttctgaggaccaacccactccctcccctcagcagcttgcctcctccaagccaatgaatagacctagtgctgccaacccttgttctccagtgcagttctcttccacgcccttggctgggttggcccctaagaggcgagcaggagaccctggagaaatgccacagagtcccacagggctgggacagcccaaacggagagggagacctcccagtaagttcttcaaacagatggaacagcgttacctaacccagctgacagcccagcctgtcccacctgagatgtgctcaggctggtggtggatacgagatcctgagatgttggatgccatgctcaaggccctacacccccgaggtatccgggagaaggcacttcacaaacaccttaacaagcacagggacttcttgcaggaagtctgcctgcggccctcagctgaccccatctttgagcccaggcaactacctgcctttcaagaagggattatgagctggtcccccaaagagaagacatacgagacagacctagcagtgcttcaatgggtagaggagctggagcagcgggttatcatgtctgatctgcagattcggggctggacatgtcctagcccagactctacccgtgaagacttggcctactgtgagcacctctccgactcccaggaggatatcacctggcgaggtcggggcagggagggactggcacctcagcgtaaaactaccaaccctttggacctggctgtgatgcggctggctgccctggaacagaatgtagaacggcggtacctgcgggagcccctctggccaactcatgaggttgtgctggagaaggccctgcttagcacacctaatggtgcccctgagggcaccactacagagatatcatatgagatcacccctcgcattcgtgtctggcgccagaccctcgagcggtgccggagcgcagcccaggtgtgcttgtgcctgggccagctggagaggtccattgcctgggagaagtctgtcaacaaagtgacatgtctagtctgccggaagggtgacaatgatgagtttcttctgctttgtgatgggtgtgaccgtggctgccacatttactgccatcgtcccaagatggaggctgtcccagaaggagattggttctgtactgtctgtttggctcagcaggtggagggagaattcactcagaagcctggtttcccaaagcgtggccagaagcggaaaagtggttattcgctgaacttctcagagggtgatggccgccgacgccgggtactgttgaggggccgagaaagcccagcagcagggcctcggtactcggaagaagggctctccccctccaagcggcggcgactctctatgcggaaccaccacagtgatctcacattttgcgagattatcctgatggagatggagtcccatgatgcagcctggcctttcctagagcctgtgaacccacgtttggtgagtgggtaccggcgcatcatcaaaaatcctatggatttttccaccatgcgggagcggctgctcaggggagggtacaccagctcagaggagtttgcggctgatgccctcctggtatttgacaactgccagactttcaacgaggatgactctgaagtaggcaaggctgggcacatcatgcgccgcttcttcgagagccgctgggaggagttttatcagggaaaacaggccaatctgtgaggcaagggaggtggggagtcaccttgtggcatctccccccaccttccaaacaaaaacctgccattttcacctgctgatgctgccctgggtccagactcaagtcagatacaaccctgatttttgaccttgcccttggcagtgccccacatcctcttattcctacatccctttctcccttccctcctcttgctcctcaagtaagaggtgcagagatgaggtccttctggactaaaagccaaaaaaagaaagaaaaaaataatttttcttttctgttttatttgctaattaaaaatggggagggggaaagtcgtccctacttcctcctccctgcttcctctcctcccctgtacgtgccccagcattctggggttatttaacaatagcaatagttctagtgaatgtgtgaaaccaagaaacactctgtactgtgtgcggacccgcagtgacggccagtaaagtggacttaactcccaagtgtgtcgcgccggacaccgggccctggacatgctgcttccatgttcagtcccttccctgcttctcgctgtctttcttttcccacctcccaccccccagttttcagattttctctcatccaataatgtaaaactatcgtgtacgggttcctccctccttttctcttctcccaaatcttttcccttcaaaggaaaaaaaaatgttcagaggtccctgtcttctgtccccatcttcctgccgatagctatcccctgtatgatgttggatgctcctcacatgctgagtttccagccttttctgaaactcagtagctggggagagggcagggaggcttcctgggccttccagcctccttccccacctccttcccaaaccctcttgggaactcctcagggacaactactgctgagtttgggtgcaccctaagatggaggccaggtagcaatggggccggcctcagagagagcgctgtgtgtgtgtgtgtgtgtgtgtgtgtgtgtgtgtgtgtcggcctcagagcgcgctgtgtgtgtgtgtgtgtgtgtcagcctcagagcgcgcgctgtgtgtgtgtgtgtgtgtgtgtgtgtgtgcgtgctgtgtgaccctgtattgtttgataggatccattcagtttccccaagtacctgttttcattcccatttttcccattgtttaaaaccatcacttttttgtctttgggaaaccacaggaacaatttctctggagacaaggctgtgtctctctcctggtcatttttgttccagcctcttcagactgtgcaatctttcagcaggaactccctctcttctcggtagctttgaatcttaagcttctacgggagagtggtagaactggatcatttcctaatcccatttagttgtgcttttcttcatttacttcataccccaggaccccttccccagcagcagagaccctggagcacaggagagtagggaggaggggttctgggtccatcactgccctacatgtgactatgtccaagttaagcccccaacacgagaggaaagctgctgactcccagctatagccatgggcacttggccccctgcttttcctgctcagcagagcccctcccttcagagattacgggtacttgcactggggaggtggctgctggctggcccaagcagagagctgaggcatccaagaaatgttccattggggggtgggggtgccaggtgaggtggagcattccttgtattctggcagcactgaagagccactgaagggggtaggggcagtgtaggtcctggggcagcccctttattcctttatgccccttctccctcatagcctatttctaaagtcgccttttctgtcagataaacctcaaaacttttaattttatttgagatttttttttgcttttaagaggtggattgaagaatatttgaattgactttatattatgcataaatatttatattttatctaaataactgcgctgtaacaaactttgtgttagacagttgaaactgttagagttgggggctctgctttttccccctggcaattttcccctggtataagatgtgctagattaatttcattgtgaggtggatgggggagtgaaattgtgaggtggatgggggagtgaaatctccatggttcctgctttgtgttcctctcccagctccatctctttccctagggaccaggcactcatatggcggggtggggtcctagcctcagtttgaagaagtgggggctggagcggggttgggggtggtagggatagggcatgatcaaaggggccatttcttgcttttctttcctcatcttcactgcccccttgagctaggtggattttctcttcatgacaagagtatttggtagggaaagcaggtttaaaataaaaagacaacccaccccctgcccttttgcttccctcccatcagtctggttgacaggaagaaaccacaccatcaacaccaacaagtttctgtgttccttttacagcaaaagggactttttatataaccaaatgtggtgttttagtgactttttgataatgtacagttttttgtgaatttaaatttatttctttctatatttttaggaccaatctcatttttaataaggttaaaaagaaaaaaaaagtctagcgaaaaaactcctgtttttgccatgtgatgttccacaagtgcagctgtagaaaagtgcttgtcagttgttgaataaaaaaaccacatttgatagaga

SEQ ID NO: 371101 - DNA, 8567 bp, Homo sapiens
gttctggcgcccggagcgcggccatgtgaaccgcttgtaccccggggagagacgagccccgagcccggctggacgccgctgcctcaggaaatggaggcaaacgaccattttaactttactggccttccccctgcacctgctgcctcaggactgaaaccctctccttcctcaggggagggcctctacactaacgggtctcccatgaacttcccccagcaagggaaaagtttgaatggggatgtgaatgttaatggcttatctactgtatctcacactactacttcagggattttgaactctgctccccactcctccagcacctcacacctccatcaccccagcgtggcctacgactgtctctggaactactcacagtacccatctgccaatcctggcagcaacctcaaggacccaccccttctctcccagttctcggggggacaatacccactcaacggcatccttgggggcagccggcaaccttcatccccaagtcataacactaaccttcgggctgggagccaagagttctgggccaacggtacccagagtcccatggggcttaactttgattcacaagaactgtatgattcctttcctgaccagaattttgaggtgatgcccaatggaccccctagttttttcacctccccacagacttctcctatgttgggatctagcattcaaacctttgcaccctcccaggaggtaggcagtggtatccatcctgatgaggcagcagaaaaggagatgacttcagttgtggcagagaatggcactggcttggtaggcagcttggagctggaagaagagcagccagaactgaagatgtgtggctacaatggctctgtcccttctgtggaatcgttacaccaagaggtctcagtcctggtccctgaccccacagtgagctgtttagatgatccttcacatcttcctgatcaactggaagacactccaatcctcagtgaagactctctggagcccttcaactctctggcaccagagccagtgagtggaggactatatggtattgatgacacggagctgatgggtgcagaggacaagctgcctcttgaggacagccctgtgatttctgcccttgattgcccttccctcaataatgctactgccttcagtctcctggcagatgatagtcaaacatcaacctctatctttgccagtcccacctctccacctgtcctaggggagtctgtcctgcaagataacagctttgacctgaataatggtagtgacgctgaacaggaagaaatggaaactcaatcttcagacttcccaccatccctgacccagccagctcctgatcagtcatccactattcagctacatccagcaacctcaccagcagtctcgccaacaacctccccagcagtctccctagtggtttctccagcagcctccccagaaatctctccagaagtttgtcccgcagcttctacagttgtctctccagcagtcttctcagtggtctctccagcttcctcagcagtcctcccagcagtctccttagaagtcccgttgacggcttcagtgacatccccaaaagcctctcccgtaacttccccagcagctgcctttccaacagcctccccagcaaataaggatgtcagcagctttctagaaaccactgctgacgtggaagagatcactggagaaggactcactgcttctggtagtggtgatgtcatgaggagacgtattgctaccccagaagaagttcgtcttcccctccaacatgggtggcggagagaggtgcgcatcaagaagggcagccaccgatggcagggggagacctggtattatggcccctgtgggaagaggatgaagcaatttccagaagtgatcaagtacctgagccgcaacgtggtacacagtgtccgccgagagcacttcagcttcagtccccgtatgcctgttggagatttctttgaagaaagagacacgccagagggcttgcagtgggtgcagctctcagcagaggagatcccgtcgaggattcaggcaattactggcaaacggggtcgacctcgaaacactgagaaggctaagactaaggaagtccccaaggtgaaacggggtcgaggtcggccacctaaggtcaaaatcactgagctattgaacaagacagacaaccgccccctaaagaaactggaggcccaagaaacattgaatgaggaggataaagcaaagattgctaaaagcaagaagaagatgaggcagaaggttcaacggggagagtgtcagactactatccaagggcaggccagaaataagcggaaacaagagaccaagagcttaaagcagaaggaagctaagaagaaatccaaggctgagaaagaaaaaggaaagacaaagcaggaaaaactgaaggaaaaagtcaagagggaaaagaaggagaaggtaaaaatgaaggaaaaggaggaggtgaccaaagccaagccagcctgtaaagcagataagaccctggccacacagaggcgcttggaggaacggcagaggcagcagatgatcttggaggaaatgaagaagccgacagaggatatgtgtctgactgaccaccagcccctgcctgacttctcacgagtccctggtctgacattgcccagtggagccttctcagactgcttgaccattgtggagttcctgcatagctttggcaaggtgctgggctttgatcctgccaaagatgtgcctagcctgggggtcctgcaggagggactcctgtgtcaaggtgacagcttgggtgaggtgcaagacctgctggtcaggctgctgaaggctgcactccatgatcctggctttccctcctactgtcagtccctaaagatcttgggggagaaggtgtctgagatcccactgacaagagacaatgtgtcagagatcctgcgctgcttccttatggcatatggagtagagccagccctctgtgaccgcctgcgcacccagccttttcaggcccagccaccccagcagaaggctgctgtcctggccttccttgtgcatgagctcaatggctccaccctcatcatcaatgagattgacaagactctggagagtatgtccagctacaggaaaaacaagtggattgttgaaggccggctccggaggctgaaaactgttctggccaagcgaactgggcggtctgaagtagagatggaagggccagaggaatgcctgggacggaggcgcagttctcggatcatggaggagaccagtggcatggaagaagaggaagaagaggagtctatagcagctgtccctggccgcaggggtcgaagagatggagaggttgatgccacagcatctagcatcccagagctagagcgccagatagaaaaactcagcaagcgtcagcttttctttcgcaaaaagctgcttcactcatcccagatgcttcgggcggtctccctgggtcaggaccgctacagacgtcgctactgggtattgccgtatttggctggtatctttgtagaaggaacagaggggaacttagttcctgaggaggtgataaagaaggaaactgactccttaaaagtggcagcccatgcgtcactcaaccctgccctcttctctatgaagatggagttagctggctccaacaccactgccagttctcctgcccgggcccgaggccgacctcgaaaaactaagcccgggtctatgcaacctaggcatcttaagtcccctgtcaggggtcaggattcagaacagccccaggcccagcttcagcctgaggctcagcttcatgctcctgcccagccccagcctcagcttcagcttcagcttcagtcccataaggggttcctggagcaagaaggctcccctttgtcactgggtcagagccagcatgacctcagccagtcagccttcctgtcttggctgagccagactcagagccatagctccctgttgagcagctcagtcctcacacctgatagcagtccgggaaaactagacccagctccatcacaacccccggaggagccagagcctgatgaggcagaatccagccctgatcctcaagcactctggtttaacatctcagcccagatgccctgcaatgctgcccccacaccgccccctgcagtttctgaggaccaacccactccctcccctcagcagcttgcctcctccaagccaatgaatagacctagtgctgccaacccttgttctccagtgcagttctcttccacgcccttggctgggttggcccctaagaggcgagcaggagaccctggagaaatgccacagagtcccacagggctgggacagcccaaacggagagggagacctcccagtaagttcttcaaacagatggaacagcgttacctaacccagctgacagcccagcctgtcccacctgagatgtgctcaggctggtggtggatacgagatcctgagatgttggatgccatgctcaaggccctacacccccgaggtatccgggagaaggcacttcacaaacaccttaacaagcacagggacttcttgcaggaagtctgcctgcggccctcagctgaccccatctttgagcccaggcaactacctgcctttcaagaagggattatgagctggtcccccaaagagaagacatacgagacagacctagcagtgcttcaatgggtagaggagctggagcagcgggttatcatgtctgatctgcagattcggggctggacatgtcctagcccagactctacccgtgaagacttggcctactgtgagcacctctccgactcccaggaggatatcacctggcgaggtcggggcagggagggactggcacctcagcgtaaaactaccaaccctttggacctggctgtgatgcggctggctgccctggaacagaatgtagaacggcggtacctgcgggagcccctctggccaactcatgaggttgtgctggagaaggccctgcttagcacacctaatggtgcccctgagggcaccactacagagatatcatatgagatcacccctcgcattcgtgtctggcgccagaccctcgagcggtgccggagcgcagcccaggtgtgcttgtgcctgggccagctggagaggtccattgcctgggagaagtctgtcaacaaagtgacatgtctagtctgccggaagggtgacaatgatgagtttcttctgctttgtgatgggtgtgaccgtggctgccacatttactgccatcgtcccaagatggaggctgtcccagaaggagattggttctgtactgtctgtttggctcagcaggtggagggagaattcactcagaagcctggtttcccaaagcgtggccagaagcggaaaagtggttattcgctgaacttctcagagggtgatggccgccgacgccgggtactgttgaggggccgagaaagcccagcagcagggcctcggtactcggaagaagggctctccccctccaagcggcggcgactctctatgcggaaccaccacagtgatctcacattttgcgagattatcctgatggagatggagtcccatgatgcagcctggcctttcctagagcctgtgaacccacgtttggtgagtgggtaccggcgcatcatcaaaaatcctatggatttttccaccatgcgggagcggctgctcaggggagggtacaccagctcagaggagtttgcggctgatgccctcctggtatttgacaactgccagactttcaacgaggatgactctgaagtaggcaaggctgggcacatcatgcgccgcttcttcgagagccgctgggaggagttttatcagggaaaacaggccaatctgtgaggcaagggaggtggggagtcaccttgtggcatctccccccaccttccaaacaaaaacctgccattttcacctgctgatgctgccctgggtccagactcaagtcagatacaaccctgatttttgaccttgcccttggcagtgccccacatcctcttattcctacatccctttctcccttccctcctcttgctcctcaagtaagaggtgcagagatgaggtccttctggactaaaagccaaaaaaagaaagaaaaaaataatttttcttttctgttttatttgctaattaaaaatggggagggggaaagtcgtccctacttcctcctccctgcttcctctcctcccctgtacgtgccccagcattctggggttatttaacaatagcaatagttctagtgaatgtgtgaaaccaagaaacactctgtactgtgtgcggacccgcagtgacggccagtaaagtggacttaactcccaagtgtgtcgcgccggacaccgggccctggacatgctgcttccatgttcagtcccttccctgcttctcgctgtctttcttttcccacctcccaccccccagttttcagattttctctcatccaataatgtaaaactatcgtgtacgggttcctccctccttttctcttctcccaaatcttttcccttcaaaggaaaaaaaaatgttcagaggtccctgtcttctgtccccatcttcctgccgatagctatcccctgtatgatgttggatgctcctcacatgctgagtttccagccttttctgaaactcagtagctggggagagggcagggaggcttcctgggccttccagcctccttccccacctccttcccaaaccctcttgggaactcctcagggacaactactgctgagtttgggtgcaccctaagatggaggccaggtagcaatggggccggcctcagagagagcgctgtgtgtgtgtgtgtgtgtgtgtgtgtgtgtgtgtgtgtcggcctcagagcgcgctgtgtgtgtgtgtgtgtgtgtcagcctcagagcgcgcgctgtgtgtgtgtgtgtgtgtgtgtgtgtgtgcgtgctgtgtgaccctgtattgtttgataggatccattcagtttccccaagtacctgttttcattcccatttttcccattgtttaaaaccatcacttttttgtctttgggaaaccacaggaacaatttctctggagacaaggctgtgtctctctcctggtcatttttgttccagcctcttcagactgtgcaatctttcagcaggaactccctctcttctcggtagctttgaatcttaagcttctacgggagagtggtagaactggatcatttcctaatcccatttagttgtgcttttcttcatttacttcataccccaggaccccttccccagcagcagagaccctggagcacaggagagtagggaggaggggttctgggtccatcactgccctacatgtgactatgtccaagttaagcccccaacacgagaggaaagctgctgactcccagctatagccatgggcacttggccccctgcttttcctgctcagcagagcccctcccttcagagattacgggtacttgcactggggaggtggctgctggctggcccaagcagagagctgaggcatccaagaaatgttccattggggggtgggggtgccaggtgaggtggagcattccttgtattctggcagcactgaagagccactgaagggggtaggggcagtgtaggtcctggggcagcccctttattcctttatgccccttctccctcatagcctatttctaaagtcgccttttctgtcagataaacctcaaaacttttaattttatttgagatttttttttgcttttaagaggtggattgaagaatatttgaattgactttatattatgcataaatatttatattttatctaaataactgcgctgtaacaaactttgtgttagacagttgaaactgttagagttgggggctctgctttttccccctggcaattttcccctgcccttttgcttccctcccatcagtctggttgacaggaagaaaccacaccatcaacaccaacaagtttctgtgttccttttacagcaaaagggactttttatataaccaaatgtggtgttttagtgactttttgataatgtacagttttttgtgaatttaaatttatttctttctatatttttaggaccaatctcatttttaataaggttaaaaagaaaaaaaaagtctagcgaaaaaactcctgtttttgccatgtgatgttccacaagtgcagctgtagaaaagtgcttgtcagttgttgaataaaaaaaccacatttgatagagattcaaaagactctgtgtattcatcttcccttctacacacctgagggggagacggcgttgggataggtatgactggcttaagagaccacaggcaagggaacaacaggggctcctgttccataccctctgtgtggatggaaagggtcattagtgctcctgcctaaatgtctggctgagttgctggagcaaagggggattcagtgcatccaggtcctgccttgtgagatgtggccccagcttcctaagctgccacctctgtgttcctgtcatagcaaatatgggaccatcaccagcttaccacttcccactcacggataagacaccaagacgtagacttttgtgttttatttaaaaaaaaaaagtgtgaagtaagacaaaatggacctctaccaagttgtagggaaggacaaggaaaaga

SEQ ID NO: 371102 - DNA, 7343 bp, Homo sapiens
gttctggcgcccggagcgcggccatgtgaaccgcttgtaccccggggagagacgagccccgagcccggctggacgccgctgcctcaggaaatggaggcaaacgaccattttaactttactggccttccccctgcacctgctgcctcaggactgaaaccctctccttcctcaggggagggcctctacactaacgggtctcccatgaacttcccccagcaagggaaaagtttgaatggggatgtgaatgttaatggcttatctactgtatctcacactactacttcagggattttgaactctgctccccactcctccagcacctcacacctccatcaccccagcgtggcctacgactgtctctggaactactcacagtacccatctgccaatcctggcagcaacctcaaggacccaccccttctctcccagttctcggggggacaatacccactcaacggcatccttgggggcagccggcaaccttcatccccaagtcataacactaaccttcgggctgggagccaagagttctgggccaacggtacccagagtcccatggggcttaactttgattcacaagaactgtatgattcctttcctgaccagaattttgaggtgatgcccaatggaccccctagttttttcacctccccacagacttctcctatgttgggatctagcattcaaacctttgcaccctcccaggaggtaggcagtggtatccatcctgatgaggcagcagaaaaggagatgacttcagttgtggcagagaatggcactggcttggtaggcagcttggagctggaagaagagcagccagaactgaagatgtgtggctacaatggctctgtcccttctgtggaatcgttacaccaagaggtctcagtcctggtccctgaccccacagtgagctgtttagatgatccttcacatcttcctgatcaactggaagacactccaatcctcagtgaagactctctggagcccttcaactctctggcaccagagccagtgagtggaggactatatggtattgatgacacggagctgatgggtgcagaggacaagctgcctcttgaggacagccctgtgatttctgcccttgattgcccttccctcaataatgctactgccttcagtctcctggcagatgatagtcaaacatcaacctctatctttgccagtcccacctctccacctgtcctaggggagtctgtcctgcaagataacagctttgacctgaataatggtagtgacgctgaacaggaagaaatggaaactcaatcttcagacttcccaccatccctgacccagccagctcctgatcagtcatccactattcagctacatccagcaacctcaccagcagtctcgccaacaacctccccagcagtctccctagtggtttctccagcagcctccccagaaatctctccagaagtttgtcccgcagcttctacagttgtctctccagcagtcttctcagtggtctctccagcttcctcagcagtcctcccagcagtctccttagaagtcccgttgacggcttcagtgacatccccaaaagcctctcccgtaacttccccagcagctgcctttccaacagcctccccagcaaataaggatgtcagcagctttctagaaaccactgctgacgtggaagagatcactggagaaggactcactgcttctggtagtggtgatgtcatgaggagacgtattgctaccccagaagaagttcgtcttcccctccaacatgggtggcggagagaggtgcgcatcaagaagggcagccaccgatggcagggggagacctggtattatggcccctgtgggaagaggatgaagcaatttccagaagtgatcaagtacctgagccgcaacgtggtacacagtgtccgccgagagcacttcagcttcagtccccgtatgcctgttggagatttctttgaagaaagagacacgccagagggcttgcagtgggtgcagctctcagcagaggagatcccgtcgaggattcaggcaattactggcaaacggggtcgacctcgaaacactgagaaggctaagactaaggaagtccccaaggtgaaacggggtcgaggtcggccacctaaggtcaaaatcactgagctattgaacaagacagacaaccgccccctaaagaaactggaggcccaagaaacattgaatgaggaggataaagcaaagattgctaaaagcaagaagaagatgaggcagaaggttcaacggggagagtgtcagactactatccaagggcaggccagaaataagcggaaacaagagaccaagagcttaaagcagaaggaagctaagaagaaatccaaggctgagaaagaaaaaggaaagacaaagcaggaaaaactgaaggaaaaagtcaagagggaaaagaaggagaaggtaaaaatgaaggaaaaggaggaggtgaccaaagccaagccagcctgtaaagcagataagaccctggccacacagaggcgcttggaggaacggcagaggcagcagatgatcttggaggaaatgaagaagccgacagaggatatgtgtctgactgaccaccagcccctgcctgacttctcacgagtccctggtctgacattgcccagtggagccttctcagactgcttgaccattgtggagttcctgcatagctttggcaaggtgctgggctttgatcctgccaaagatgtgcctagcctgggggtcctgcaggagggactcctgtgtcaaggtgacagcttgggtgaggtgcaagacctgctggtcaggctgctgaaggctgcactccatgatcctggctttccctcctactgtcagtccctaaagatcttgggggagaaggtgtctgagatcccactgacaagagacaatgtgtcagagatcctgcgctgcttccttatggcatatggagtagagccagccctctgtgaccgcctgcgcacccagccttttcaggcccagccaccccagcagaaggctgctgtcctggccttccttgtgcatgagctcaatggctccaccctcatcatcaatgagattgacaagactctggagagtatgtccagctacaggaaaaacaagtggattgttgaaggccggctccggaggctgaaaactgttctggccaagcgaactgggcggtctgaagtagagatggaagggccagaggaatgcctgggacggaggcgcagttctcggatcatggaggagaccagtggcatggaagaagaggaagaagaggagtctatagcagctgtccctggccgcaggggtcgaagagatggagaggttgatgccacagcatctagcatcccagagctagagcgccagatagaaaaactcagcaagcgtcagcttttctttcgcaaaaagctgcttcactcatcccagatgcttcgggcggtctccctgggtcaggaccgctacagacgtcgctactgggtattgccgtatttggctggtatctttgtagaaggaacagaggggaacttagttcctgaggaggtgataaagaaggaaactgactccttaaaagtggcagcccatgcgtcactcaaccctgccctcttctctatgaagatggagttagctggctccaacaccactgccagttctcctgcccgggcccgaggccgacctcgaaaaactaagcccgggtctatgcaacctaggcatcttaagtcccctgtcaggggtcaggattcagaacagccccaggcccagcttcagcctgaggctcagcttcatgctcctgcccagccccagcctcagcttcagcttcagcttcagtcccataaggggttcctggagcaagaaggctcccctttgtcactgggtcagagccagcatgacctcagccagtcagccttcctgtcttggctgagccagactcagagccatagctccctgttgagcagctcagtcctcacacctgatagcagtccgggaaaactagacccagctccatcacaacccccggaggagccagagcctgatgaggcagaatccagccctgatcctcaagcactctggtttaacatctcagcccagatgccctgcaatgctgcccccacaccgccccctgcagtttctgaggaccaacccactccctcccctcagcagcttgcctcctccaagccaatgaatagacctagtgctgccaacccttgttctccagtgcagttctcttccacgcccttggctgggttggcccctaagaggcgagcaggagaccctggagaaatgccacagagtcccacagggctgggacagcccaaacggagagggagacctcccagtaagttcttcaaacagatggaacagcgttacctaacccagctgacagcccagcctgtcccacctgagatgtgctcaggctggtggtggatacgagatcctgagatgttggatgccatgctcaaggccctacacccccgaggtatccgggagaaggcacttcacaaacaccttaacaagcacagggacttcttgcaggaagtctgcctgcggccctcagctgaccccatctttgagcccaggcaactacctgcctttcaagaagggattatgagctggtcccccaaagagaagacatacgagacagacctagcagtgcttcaatgggtagaggagctggagcagcgggttatcatgtctgatctgcagattcggggctggacatgtcctagcccagactctacccgtgaagacttggcctactgtgagcacctctccgactcccaggaggatatcacctggcgaggtcggggcagggagggactggcacctcagcgtaaaactaccaaccctttggacctggctgtgatgcggctggctgccctggaacagaatgtagaacggcggtacctgcgggagcccctctggccaactcatgaggttgtgctggagaaggccctgcttagcacacctaatggtgcccctgagggcaccactacagagatatcatatgagatcacccctcgcattcgtgtctggcgccagaccctcgagcggtgccggagcgcagcccaggtgtgcttgtgcctgggccagctggagaggtccattgcctgggagaagtctgtcaacaaagtgacatgtctagtctgccggaagggtgacaatgatgagtttcttctgctttgtgatgggtgtgaccgtggctgccacatttactgccatcgtcccaagatggaggctgtcccagaaggagattggttctgtactgtctgtttggctcagcaggtggagggagaattcactcagaagcctggtttcccaaagcgtggccagaagcggaaaagtggttattcgctgaacttctcagagggtgatggccgccgacgccgggtactgttgaggggccgagaaagcccagcagcagggcctcggtactcggaagaagggctctccccctccaagcggcggcgactctctatgcggaaccaccacagtgatctcacattttgcgagattatcctgatggagatggagtcccatgatgcagcctggcctttcctagagcctgtgaacccacgtttggtgagtgggtaccggcgcatcatcaaaaatcctatggatttttccaccatgcgggagcggctgctcaggggagggtacaccagctcagaggagtttgcggctgatgccctcctggtatttgacaactgccagactttcaacgaggatgactctgaagtaggcaaggctgggcacatcatgcgccgcttcttcgagagccgctgggaggagttttatcagggaaaacaggccaatctgtgaggcaagggaggtggggagtcaccttgtggcatctccccccaccttccaaacaaaaacctgccattttcacctgctgatgctgccctgggtccagactcaagtcagatacaaccctgatttttgaccttgcccttggcagtgccccacatcctcttattcctacatccctttctcccttccctcctcttgctcctcaagtaagaggtgcagagatgaggtccttctggactaaaagccaaaaaaagaaagaaaaaaataatttttcttttctgttttatttgctaattaaaaatggggagggggaaagtcgtccctacttcctcctccctgcttcctctcctcccctgtacgtgccccagcattctggggttatttaacaatagcaatagttctagtgaatgtgtgaaaccaagaaacactctgtactgtgtgcggacccgcagtgacggccagtaaagtggacttaactcccaagtgtgtcgcgccggacaccgggccctggacatgctgcttccatgttcagtcccttccctgcttctcgctgtctttcttttcccacctcccaccccccagttttcagattttctctcatccaataatgtaaaactatcgtgtacgggttcctccctccttttctcttctcccaaatcttttcccttcaaaggaaaaaaaaatgttcagaggtccctgtcttctgtccccatcttcctgccgatagctatcccctgtatgatgttggatgctcctcacatgctgagtttccagccttttctgaaactcagtagctggggagagggcagggaggcttcctgggccttccagcctccttccccacctccttcccaaaccctcttgggaactcctcagggacaactactgctgagtttgggtgcaccctaagatggaggccaggtagcaatggggccggcctcagagagagcgctgtgtgtgtgtgtgtgtgtgtgtgtgtgtgtgtgtgtgtcggcctcagagcgcgctgtgtgtgtgtgtgtgtgtgtcagcctcagagcgcgcgctgtgtgtgtgtgtgtgtgtgtgtgtgtgtgcgtgctgtgtgaccctgtattgtttgataggatccattcagtttccccaagtacctgttttcattcccatttttcccattgtttaaaaccatcacttttttgtctttgggaaaccacaggaacaatttctctggagacaaggctgtgtctctctcctggtcatttttgttccagcctcttcagactgtgcaatctttcagcaggaactccctctcttctcggtagctttgaatcttaagcttctacgggagagtggtagaactggatcatttcctaatcccatttagttgtgcttttcttcatttacttcataccccaggaccccttccccagcagcagagaccctggagcacaggagagtagggaggaggggttctgggtccatcactgccctacgctgtaaactgccctgacgctgtaaactgccctgacgctgtaaactgccctgacgctgtaaactgacgctgtaaactg

SEQ ID NO: 371103 - DNA, 5580 bp, Homo sapiens
caagtagctgggattacaggcccatgccaccacacctggctgatttttgtatttttagtagagacagggtttcaccatgttggccaggctggtctcgaactcctgacctcaggtgatccgcctgtcttggcctcccaaagtgctggaattacaggtgtgagccaccacacttggccttcccttaatctttctccatctatttcaaggctgaaaactgttctggccaagcgaactgggcggtctgaagtagagatggaagggccagaggaatgcctgggacggaggcgcagttctcggatcatggaggagaccagtggcatggaagaagaggaagaagaggagtctatagcagctgtccctggccgcaggggtcgaagagatggagaggttgatgccacagcatctagcatcccagagctagagcgccagatagaaaaactcagcaagcgtcagcttttctttcgcaaaaagctgcttcactcatcccagatgcttcgggcggtctccctgggtcaggaccgctacagacgtcgctactgggtattgccgtatttggctggtatctttgtagaaggaacagaggggaacttagttcctgaggaggtgataaagaaggaaactgactccttaaaagtggcagcccatgcgtcactcaaccctgccctcttctctatgaagatggagttagctggctccaacaccactgccagttctcctgcccgggcccgaggccgacctcgaaaaactaagcccgggtctatgcaacctaggcatcttaagtcccctgtcaggggtcaggattcagaacagccccaggcccagcttcagcctgaggctcagcttcatgctcctgcccagccccagcctcagcttcagcttcagcttcagtcccataaggggttcctggagcaagaaggctcccctttgtcactgggtcagagccagcatgacctcagccagtcagccttcctgtcttggctgagccagactcagagccatagctccctgttgagcagctcagtcctcacacctgatagcagtccgggaaaactagacccagctccatcacaacccccggaggagccagagcctgatgaggcagaatccagccctgatcctcaagcactctggtttaacatctcagcccagatgccctgcaatgctgcccccacaccgccccctgcagtttctgaggaccaacccactccctcccctcagcagcttgcctcctccaagccaatgaatagacctagtgctgccaacccttgttctccagtgcagttctcttccacgcccttggctgggttggcccctaagaggcgagcaggagaccctggagaaatgccacagagtcccacagggctgggacagcccaaacggagagggagacctcccagtaagttcttcaaacagatggaacagcgttacctaacccagctgacagcccagcctgtcccacctgagatgtgctcaggctggtggtggatacgagatcctgagatgttggatgccatgctcaaggccctacacccccgaggtatccgggagaaggcacttcacaaacaccttaacaagcacagggacttcttgcaggaagtctgcctgcggccctcagctgaccccatctttgagcccaggcaactacctgcctttcaagaagggattatgagctggtcccccaaagagaagacatacgagacagacctagcagtgcttcaatgggtagaggagctggagcagcgggttatcatgtctgatctgcagattcggggctggacatgtcctagcccagactctacccgtgaagacttggcctactgtgagcacctctccgactcccaggaggatatcacctggcgaggtcggggcagggagggactggcacctcagcgtaaaactaccaaccctttggacctggctgtgatgcggctggctgccctggaacagaatgtagaacggcggtacctgcgggagcccctctggccaactcatgaggttgtgctggagaaggccctgcttagcacacctaatggtgcccctgagggcaccactacagagatatcatatgagatcacccctcgcattcgtgtctggcgccagaccctcgagcggtgccggagcgcagcccaggtgtgcttgtgcctgggccagctggagaggtccattgcctgggagaagtctgtcaacaaagtgacatgtctagtctgccggaagggtgacaatgatgagtttcttctgctttgtgatgggtgtgaccgtggctgccacatttactgccatcgtcccaagatggaggctgtcccagaaggagattggttctgtactgtctgtttggctcagcaggtggagggagaattcactcagaagcctggtttcccaaagcgtggccagaagcggaaaagtggttattcgctgaacttctcagagggtgatggccgccgacgccgggtactgttgaggggccgagaaagcccagcagcagggcctcggtactcggaagaagggctctccccctccaagcggcggcgactctctatgcggaaccaccacagtgatctcacattttgcgagattatcctgatggagatggagtcccatgatgcagcctggcctttcctagagcctgtgaacccacgtttggtgagtgggtaccggcgcatcatcaaaaatcctatggatttttccaccatgcgggagcggctgctcaggggagggtacaccagctcagaggagtttgcggctgatgccctcctggtatttgacaactgccagactttcaacgaggatgactctgaagtaggcaaggctgggcacatcatgcgccgcttcttcgagagccgctgggaggagttttatcagggaaaacaggccaatctgtgaggcaagggaggtggggagtcaccttgtggcatctccccccaccttccaaacaaaaacctgccattttcacctgctgatgctgccctgggtccagactcaagtcagatacaaccctgatttttgaccttgcccttggcagtgccccacatcctcttattcctacatccctttctcccttccctcctcttgctcctcaagtaagaggtgcagagatgaggtccttctggactaaaagccaaaaaaagaaagaaaaaaataatttttcttttctgttttatttgctaattaaaaatggggagggggaaagtcgtccctacttcctcctccctgcttcctctcctcccctgtacgtgccccagcattctggggttatttaacaatagcaatagttctagtgaatgtgtgaaaccaagaaacactctgtactgtgtgcggacccgcagtgacggccagtaaagtggacttaactcccaagtgtgtcgcgccggacaccgggccctggacatgctgcttccatgttcagtcccttccctgcttctcgctgtctttcttttcccacctcccaccccccagttttcagattttctctcatccaataatgtaaaactatcgtgtacgggttcctccctccttttctcttctcccaaatcttttcccttcaaaggaaaaaaaaatgttcagaggtccctgtcttctgtccccatcttcctgccgatagctatcccctgtatgatgttggatgctcctcacatgctgagtttccagccttttctgaaactcagtagctggggagagggcagggaggcttcctgggccttccagcctccttccccacctccttcccaaaccctcttgggaactcctcagggacaactactgctgagtttgggtgcaccctaagatggaggccaggtagcaatggggccggcctcagagagagcgctgtgtgtgtgtgtgtgtgtgtgtgtgtgtgtgtgtgtgtcggcctcagagcgcgctgtgtgtgtgtgtgtgtgtgtcagcctcagagcgcgcgctgtgtgtgtgtgtgtgtgtgtgtgtgtgtgcgtgctgtgtgaccctgtattgtttgataggatccattcagtttccccaagtacctgttttcattcccatttttcccattgtttaaaaccatcacttttttgtctttgggaaaccacaggaacaatttctctggagacaaggctgtgtctctctcctggtcatttttgttccagcctcttcagactgtgcaatctttcagcaggaactccctctcttctcggtagctttgaatcttaagcttctacgggagagtggtagaactggatcatttcctaatcccatttagttgtgcttttcttcatttacttcataccccaggaccccttccccagcagcagagaccctggagcacaggagagtagggaggaggggttctgggtccatcactgccctacatgtgactatgtccaagttaagcccccaacacgagaggaaagctgctgactcccagctatagccatgggcacttggccccctgcttttcctgctcagcagagcccctcccttcagagattacgggtacttgcactggggaggtggctgctggctggcccaagcagagagctgaggcatccaagaaatgttccattggggggtgggggtgccaggtgaggtggagcattccttgtattctggcagcactgaagagccactgaagggggtaggggcagtgtaggtcctggggcagcccctttattcctttatgccccttctccctcatagcctatttctaaagtcgccttttctgtcagataaacctcaaaacttttaattttatttgagatttttttttgcttttaagaggtggattgaagaatatttgaattgactttatattatgcataaatatttatattttatctaaataactgcgctgtaacaaactttgtgttagacagttgaaactgttagagttgggggctctgctttttccccctggcaattttcccctggtataagatgtgctagattaatttcattgtgaggtggatgggggagtgaaattgtgaggtggatgggggagtgaaatctccatggttcctgctttgtgttcctctcccagctccatctctttccctagggaccaggcactcatatggcggggtggggtcctagcctcagtttgaagaagtgggggctggagcggggttgggggtggtagggatagggcatgatcaaaggggccatttcttgcttttctttcctcatcttcactgcccccttgagctaggtggattttctcttcatgacaagagtatttggtagggaaagcaggtttaaaataaaaagacaacccaccccctgcccttttgcttccctcccatcagtctggttgacaggaagaaaccacaccatcaacaccaacaagtttctgtgttccttttacagcaaaagggactttttatataaccaaatgtggtgttttagtgactttttgataatgtacagttttttgtgaatttaaatttatttctttctatatttttaggaccaatctcatttttaataaggttaaaaagaaaaaaaaagtctagcgaaaaaactcctgtttttgccatgtgatgttccacaagtgcagctgtagaaaagtgcttgtcagttgttgaataaaaaaaccacatttgatagaga

SEQ ID NO: 371104 - DNA, 5083 bp, Homo sapiens
agagactacgatggatgctgcgttacagatcgcggccgagtgggtattgccgtatttggctggtatctttgtagaaggaacagaggggaacttagttcctgaggaggtgataaagaaggaaactgactccttaaaagtggcagcccatgcgtcactcaaccctgccctcttctctatgaagatggagttagctggctccaacaccactgccagttctcctgcccgggcccgaggccgacctcgaaaaactaagcccgggtctatgcaacctaggcatcttaagtcccctgtcaggggtcaggattcagaacagccccaggcccagcttcagcctgaggctcagcttcatgctcctgcccagccccagcctcagcttcagcttcagcttcagtcccataaggggttcctggagcaagaaggctcccctttgtcactgggtcagagccagcatgacctcagccagtcagccttcctgtcttggctgagccagactcagagccatagctccctgttgagcagctcagtcctcacacctgatagcagtccgggaaaactagacccagctccatcacaacccccggaggagccagagcctgatgaggcagaatccagccctgatcctcaagcactctggtttaacatctcagcccagatgccctgcaatgctgcccccacaccgccccctgcagtttctgaggaccaacccactccctcccctcagcagcttgcctcctccaagccaatgaatagacctagtgctgccaacccttgttctccagtgcagttctcttccacgcccttggctgggttggcccctaagaggcgagcaggagaccctggagaaatgccacagagtcccacagggctgggacagcccaaacggagagggagacctcccagtaagttcttcaaacagatggaacagcgttacctaacccagctgacagcccagcctgtcccacctgagatgtgctcaggctggtggtggatacgagatcctgagatgttggatgccatgctcaaggccctacacccccgaggtatccgggagaaggcacttcacaaacaccttaacaagcacagggacttcttgcaggaagtctgcctgcggccctcagctgaccccatctttgagcccaggcaactacctgcctttcaagaagggattatgagctggtcccccaaagagaagacatacgagacagacctagcagtgcttcaatgggtagaggagctggagcagcgggttatcatgtctgatctgcagattcggggctggacatgtcctagcccagactctacccgtgaagacttggcctactgtgagcacctctccgactcccaggaggatatcacctggcgaggtcggggcagggagggactggcacctcagcgtaaaactaccaaccctttggacctggctgtgatgcggctggctgccctggaacagaatgtagaacggcggtacctgcgggagcccctctggccaactcatgaggttgtgctggagaaggccctgcttagcacacctaatggtgcccctgagggcaccactacagagatatcatatgagatcacccctcgcattcgtgtctggcgccagaccctcgagcggtgccggagcgcagcccaggtgtgcttgtgcctgggccagctggagaggtccattgcctgggagaagtctgtcaacaaagtgacatgtctagtctgccggaagggtgacaatgatgagtttcttctgctttgtgatgggtgtgaccgtggctgccacatttactgccatcgtcccaagatggaggctgtcccagaaggagattggttctgtactgtctgtttggctcagcaggtggagggagaattcactcagaagcctggtttcccaaagcgtggccagaagcggaaaagtggttattcgctgaacttctcagagggtgatggccgccgacgccgggtactgttgaggggccgagaaagcccagcagcagggcctcggtactcggaagaagggctctccccctccaagcggcggcgactctctatgcggaaccaccacagtgatctcacattttgcgagattatcctgatggagatggagtcccatgatgcagcctggcctttcctagagcctgtgaacccacgtttggtgagtgggtaccggcgcatcatcaaaaatcctatggatttttccaccatgcgggagcggctgctcaggggagggtacaccagctcagaggagtttgcggctgatgccctcctggtatttgacaactgccagactttcaacgaggatgactctgaagtaggcaaggctgggcacatcatgcgccgcttcttcgagagccgctgggaggagttttatcagggaaaacaggccaatctgtgaggcaagggaggtggggagtcaccttgtggcatctccccccaccttccaaacaaaaacctgccattttcacctgctgatgctgccctgggtccagactcaagtcagatacaaccctgatttttgaccttgcccttggcagtgccccacatcctcttattcctacatccctttctcccttccctcctcttgctcctcaagtaagaggtgcagagatgaggtccttctggactaaaagccaaaaaaagaaagaaaaaaataatttttcttttctgttttatttgctaattaaaaatggggagggggaaagtcgtccctacttcctcctccctgcttcctctcctcccctgtacgtgccccagcattctggggttatttaacaatagcaatagttctagtgaatgtgtgaaaccaagaaacactctgtactgtgtgcggacccgcagtgacggccagtaaagtggacttaactcccaagtgtgtcgcgccggacaccgggccctggacatgctgcttccatgttcagtcccttccctgcttctcgctgtctttcttttcccacctcccaccccccagttttcagattttctctcatccaataatgtaaaactatcgtgtacgggttcctccctccttttctcttctcccaaatcttttcccttcaaaggaaaaaaaaatgttcagaggtccctgtcttctgtccccatcttcctgccgatagctatcccctgtatgatgttggatgctcctcacatgctgagtttccagccttttctgaaactcagtagctggggagagggcagggaggcttcctgggccttccagcctccttccccacctccttcccaaaccctcttgggaactcctcagggacaactactgctgagtttgggtgcaccctaagatggaggccaggtagcaatggggccggcctcagagagagcgctgtgtgtgtgtgtgtgtgtgtgtgtgtgtgtgtgtgtgtcggcctcagagcgcgctgtgtgtgtgtgtgtgtgtgtcagcctcagagcgcgcgctgtgtgtgtgtgtgtgtgtgtgtgtgtgtgcgtgctgtgtgaccctgtattgtttgataggatccattcagtttccccaagtacctgttttcattcccatttttcccattgtttaaaaccatcacttttttgtctttgggaaaccacaggaacaatttctctggagacaaggctgtgtctctctcctggtcatttttgttccagcctcttcagactgtgcaatctttcagcaggaactccctctcttctcggtagctttgaatcttaagcttctacgggagagtggtagaactggatcatttcctaatcccatttagttgtgcttttcttcatttacttcataccccaggaccccttccccagcagcagagaccctggagcacaggagagtagggaggaggggttctgggtccatcactgccctacatgtgactatgtccaagttaagcccccaacacgagaggaaagctgctgactcccagctatagccatgggcacttggccccctgcttttcctgctcagcagagcccctcccttcagagattacgggtacttgcactggggaggtggctgctggctggcccaagcagagagctgaggcatccaagaaatgttccattggggggtgggggtgccaggtgaggtggagcattccttgtattctggcagcactgaagagccactgaagggggtaggggcagtgtaggtcctggggcagcccctttattcctttatgccccttctccctcatagcctatttctaaagtcgccttttctgtcagataaacctcaaaacttttaattttatttgagatttttttttgcttttaagaggtggattgaagaatatttgaattgactttatattatgcataaatatttatattttatctaaataactgcgctgtaacaaactttgtgttagacagttgaaactgttagagttgggggctctgctttttccccctggcaattttcccctggtataagatgtgctagattaatttcattgtgaggtggatgggggagtgaaattgtgaggtggatgggggagtgaaatctccatggttcctgctttgtgttcctctcccagctccatctctttccctagggaccaggcactcatatggcggggtggggtcctagcctcagtttgaagaagtgggggctggagcggggttgggggtggtagggatagggcatgatcaaaggggccatttcttgcttttctttcctcatcttcactgcccccttgagctaggtggattttctcttcatgacaagagtatttggtagggaaagcaggtttaaaataaaaagacaacccaccccctgcccttttgcttccctcccatcagtctggttgacaggaagaaaccacaccatcaacaccaacaagtttctgtgttccttttacagcaaaagggactttttatataaccaaatgtggtgttttagtgactttttgataatgtacagttttttgtgaatttaaatttatttctttctatatttttaggaccaatctcatttttaataaggttaaaaagaaaaaaaaagtctagcgaaaaaactcctgtttttgccatgtgatgttccacaagtgcagctgtagaaaagtgcttgtcagttgttgaataaaaaaaccacatttgatagaga

SEQ ID NO: 371105 - DNA, 5003 bp, Homo sapiens
gttctggcgcccggagcgcggccatgtgaaccgcttgtaccccggggagagacgagccccgagcccggctggacgccgctgcctcaggaaatggaggcaaacgaccattttaactttactggccttccccctgcacctgctgcctcaggactgaaaccctctccttcctcaggggagggcctctacactaacgggtctcccatgaacttcccccagcaagggaaaagtttgaatggggatgtgaatgttaatggcttatctactgtatctcacactactacttcagggattttgaactctgctccccactcctccagcacctcacacctccatcaccccagcgtggcctacgactgtctctggaactactcacagtacccatctgccaatcctggcagcaacctcaaggacccaccccttctctcccagttctcggggggacaatacccactcaacggcatccttgggggcagccggcaaccttcatccccaagtcataacactaaccttcgggctgggagccaagagttctgggccaacggtacccagagtcccatggggcttaactttgattcacaagaactgtatgattcctttcctgaccagaattttgaggtgatgcccaatggaccccctagttttttcacctccccacagacttctcctatgttgggatctagcattcaaacctttgcaccctcccaggaggtaggcagtggtatccatcctgatgaggcagcagaaaaggagatgacttcagttgtggcagagaatggcactggcttggtaggcagcttggagctggaagaagagcagccagaactgaagatgtgtggctacaatggctctgtcccttctgtggaatcgttacaccaagaggtctcagtcctggtccctgaccccacagtgagctgtttagatgatccttcacatcttcctgatcaactggaagacactccaatcctcagtgaagactctctggagcccttcaactctctggcaccagagccagtgagtggaggactatatggtattgatgacacggagctgatgggtgcagaggacaagctgcctcttgaggacagccctgtgatttctgcccttgattgcccttccctcaataatgctactgccttcagtctcctggcagatgatagtcaaacatcaacctctatctttgccagtcccacctctccacctgtcctaggggagtctgtcctgcaagataacagctttgacctgaataatggtagtgacgctgaacaggaagaaatggaaactcaatcttcagacttcccaccatccctgacccagccagctcctgatcagtcatccactattcagctacatccagcaacctcaccagcagtctcgccaacaacctccccagcagtctccctagtggtttctccagcagcctccccagaaatctctccagaagtttgtcccgcagcttctacagttgtctctccagcagtcttctcagtggtctctccagcttcctcagcagtcctcccagcagtctccttagaagtcccgttgacggcttcagtgacatccccaaaagcctctcccgtaacttccccagcagctgcctttccaacagcctccccagcaaataaggatgtcagcagctttctagaaaccactgctgacgtggaagagatcactggagaaggactcactgcttctggtagtggtgatgtcatgaggagacgtattgctaccccagaagaagttcgtcttcccctccaacatgggtggcggagagaggtgcgcatcaagaagggcagccaccgatggcagggggagacctggtattatggcccctgtgggaagaggatgaagcaatttccagaagtgatcaagtacctgagccgcaacgtggtacacagtgtccgccgagagcacttcagcttcagtccccgtatgcctgttggagatttctttgaagaaagagacacgccagagggcttgcagtgggtgcagctctcagcagaggagatcccgtcgaggattcaggcaattactggcaaacggggtcgacctcgaaacactgagaaggctaagactaaggaagtccccaaggtgaaacggggtcgaggtcggccacctaaggtcaaaatcactgagctattgaacaagacagacaaccgccccctaaagaaactggaggcccaagaaacattgaatgaggaggataaagcaaagattgctaaaagcaagaagaagatgaggcagaaggttcaacggggagagtgtcagactactatccaagggcaggccagaaataagcggaaacaagagaccaagagcttaaagcagaaggaagctaagaagaaatccaaggctgagaaagaaaaaggaaagacaaagcaggaaaaactgaaggaaaaagtcaagagggaaaagaaggagaaggtaaaaatgaaggaaaaggaggaggtgaccaaagccaagccagcctgtaaagcagataagaccctggccacacagaggcgcttggaggaacggcagaggcagcagatgatcttggaggaaatgaagaagccgacagaggatatgtgtctgactgaccaccagcccctgcctgacttctcacgagtccctggtctgacattgcccagtggagccttctcagactgcttgaccattgtggagttcctgcatagctttggcaaggtgctgggctttgatcctgccaaagatgtgcctagcctgggggtcctgcaggagggactcctgtgtcaaggtgacagcttgggtgaggtgcaagacctgctggtcaggctgctgaaggctgcactccatgatcctggctttccctcctactgtcagtccctaaagatcttgggggagaaggtgtctgagatcccactgacaagagacaatgtgtcagagatcctgcgctgcttccttatggcatatggagtagagccagccctctgtgaccgcctgcgcacccagccttttcaggcccagccaccccagcagaaggctgctgtcctggccttccttgtgcatgagctcaatggctccaccctcatcatcaatgagattgacaagactctggagagtatgtccagctacaggaaaaacaagtggattgttgaaggccggctccggaggctgaaaactgttctggccaagcgaactgggcggtctgaagtagagatggaagggccagaggaatgcctgggacggaggcgcagttctcggatcatggaggagaccagtggcatggaagaagaggaagaagaggagtctatagcagctgtccctggccgcaggggtcgaagagatggagaggttgatgccacagcatctagcatcccagagctagagcgccagatagaaaaactcagcaagcgtcagcttttctttcgcaaaaagctgcttcactcatcccagatgcttcgggcggtctccctgggtcaggaccgctacagacgtcgctactgggtattgccgtatttggctggtatctttgtagaaggaacagaggggaacttagttcctgaggaggtgataaagaaggaaactgactccttaaaagtggcagcccatgcgtcactcaaccctgccctcttctctatgaagatggagttagctggctccaacaccactgccagttctcctgcccgggcccgaggccgacctcgaaaaactaagcccgggtctatgcaacctaggcatcttaagtcccctgtcaggggtcaggattcagaacagccccaggcccagcttcagcctgaggctcagcttcatgctcctgcccagccccagcctcagcttcagcttcagcttcagtcccataaggggttcctggagcaagaaggctcccctttgtcactgggtcagagccagcatgacctcagccagtcagccttcctgtcttggctgagccagactcagagccatagctccctgttgagcagctcagtcctcacacctgatagcagtccgggaaaactagacccagctccatcacaacccccggaggagccagagcctgatgaggcagaatccagccctgatcctcaagcactctggtttaacatctcagcccagatgccctgcaatgctgcccccacaccgccccctgcagtttctgaggaccaacccactccctcccctcagcagcttgcctcctccaagccaatgaatagacctagtgctgccaacccttgttctccagtgcagttctcttccacgcccttggctgggttggcccctaagaggcgagcaggagaccctggagaaatgccacagagtcccacagggctgggacagcccaaacggagagggagacctcccagtaagttcttcaaacagatggaacagcgttacctaacccagctgacagcccagcctgtcccacctgagatgtgctcaggctggtggtggatacgagatcctgagatgttggatgccatgctcaaggccctacacccccgaggtatccgggagaaggcacttcacaaacaccttaacaagcacagggacttcttgcaggaagtctgcctgcggccctcagctgaccccatctttgagcccaggcaactacctgcctttcaagaagggattatgagctggtcccccaaagagaagacatacgagacagacctagcagtgcttcaatgggtagaggagctggagcagcgggttatcatgtctgatctgcagattcggggctggacatgtcctagcccagactctacccgtgaagacttggcctactgtgagcacctctccgactcccaggaggatatcacctggcgaggtcggggcagggagggactggcacctcagcgtaaaactaccaaccctttggacctggctgtgatgcggctggctgccctggaacagaatgtagaacggcggtacctgcgggagcccctctggccaactcatgaggttgtgctggagaaggccctgcttagcacacctaatggtgcccctgagggcaccactacagagatgtgagtgactcccaccctcca

SEQ ID NO: 371106 - DNA, 3519 bp, Homo sapiens
gttctggcgcccggagcgcggccatgtgaaccgcttgtaccccggggagagacgagccccgagcccggctggacgccgctgcctcaggaaatggaggcaaacgaccattttaactttactggccttccccctgcacctgctgcctcaggactgaaaccctctccttcctcaggggagggcctctacactaacgggtctcccatgaacttcccccagcaagggaaaagtttgaatggggatgtgaatgttaatggcttatctactgtatctcacactactacttcagggattttgaactctgctccccactcctccagcacctcacacctccatcaccccagcgtggcctacgactgtctctggaactactcacagtacccatctgccaatcctggcagcaacctcaaggacccaccccttctctcccagttctcggggggacaatacccactcaacggcatccttgggggcagccggcaaccttcatccccaagtcataacactaaccttcgggctgggagccaagagttctgggccaacggtacccagagtcccatggggcttaactttgattcacaagaactgtatgattcctttcctgaccagaattttgaggtgatgcccaatggaccccctagttttttcacctccccacagacttctcctatgttgggatctagcattcaaacctttgcaccctcccaggaggtaggcagtggtatccatcctgatgaggcagcagaaaaggagatgacttcagttgtggcagagaatggcactggcttggtaggcagcttggagctggaagaagagcagccagaactgaagatgtgtggctacaatggctctgtcccttctgtggaatcgttacaccaagaggtctcagtcctggtccctgaccccacagtgagctgtttagatgatccttcacatcttcctgatcaactggaagacactccaatcctcagtgaagactctctggagcccttcaactctctggcaccagagccagtgagtggaggactatatggtattgatgacacggagctgatgggtgcagaggacaagctgcctcttgaggacagccctgtgatttctgcccttgattgcccttccctcaataatgctactgccttcagtctcctggcagatgatagtcaaacatcaacctctatctttgccagtcccacctctccacctgtcctaggggagtctgtcctgcaagataacagctttgacctgaataatggtagtgacgctgaacaggaagaaatggaaactcaatcttcagacttcccaccatccctgacccagccagctcctgatcagtcatccactattcagctacatccagcaacctcaccagcagtctcgccaacaacctccccagcagtctccctagtggtttctccagcagcctccccagaaatctctccagaagtttgtcccgcagcttctacagttgtctctccagcagtcttctcagtggtctctccagcttcctcagcagtcctcccagcagtctccttagaagtcccgttgacggcttcagtgacatccccaaaagcctctcccgtaacttccccagcagctgcctttccaacagcctccccagcaaataaggatgtcagcagctttctagaaaccactgctgacgtggaagagatcactggagaaggactcactgcttctggtagtggtgatgtcatgaggagacgtattgctaccccagaagaagttcgtcttcccctccaacatgggtggcggagagaggtgcgcatcaagaagggcagccaccgatggcagggggagacctggtattatggcccctgtgggaagaggatgaagcaatttccagaagtgatcaagtacctgagccgcaacgtggtacacagtgtccgccgagagcacttcagcttcagtccccgtatgcctgttggagatttctttgaagaaagagacacgccagagggcttgcagtgggtgcagctctcagcagaggagatcccgtcgaggattcaggcaattactggcaaacggggtcgacctcgaaacactgagaaggctaagactaaggaagtccccaaggtgaaacggggtcgaggtcggccacctaaggtcaaaatcactgagctattgaacaagacagacaaccgccccctaaagaaactggaggcccaagaaacattgaatgaggaggataaagcaaagattgctaaaagcaagaagaagatgaggcagaaggttcaacggggagagtgtcagactactatccaagggcaggccagaaataagcggaaacaagagaccaagagcttaaagcagaaggaagctaagaagaaatccaaggctgagaaagaaaaaggaaagacaaagcaggaaaaactgaaggaaaaagtcaagagggaaaagaaggagaaggtaaaaatgaaggaaaaggaggaggtgaccaaagccaagccagcctgtaaagcagataagaccctggccacacagaggcgcttggaggaacggcagaggcagcagatgatcttggaggaaatgaagaagccgacagaggatatgtgtctgactgaccaccagcccctgcctgacttctcacgagtccctggtctgacattgcccagtggagccttctcagactgcttgaccattgtggagttcctgcatagctttggcaaggtgctgggctttgatcctgccaaagatgtgcctagcctgggggtcctgcaggagggactcctgtgtcaaggtgacagcttgggtgaggtgcaagacctgctggtcaggctgctgaaggctgcactccatgatcctggctttccctcctactgtcagtccctaaagatcttgggggagaaggtgtctgagatcccactgacaagagacaatgtgtcagagatcctgcgctgcttccttatggcatatggagtagagccagccctctgtgaccgcctgcgcacccagccttttcaggcccagccaccccagcagaaggctgctgtcctggccttccttgtgcatgagctcaatggctccaccctcatcatcaatgagattgacaagactctggagagtatgtccagctacaggaaaaacaagtggattgttgaaggccggctccggaggctgaaaactgttctggccaagcgaactgggcggtctgaagtagagatggaagggccagaggaatgcctgggacggaggcgcagttctcggatcatggaggagaccagtggcatggaagaagaggaagaagaggagtctatagcagctgtccctggccgcaggggtcgaagagatggagaggttgatgccacagcatctagcatcccagagctagagcgccagatagaaaaactcagcaaggtattgtgcttctaacctcccaagagttggagatatgggctgggcaagaattgatcagcttcttttttaaactgaattttaatttttattcttttgagatggggtttcttgcactccagcctgggccacagagtgagaccctgtctcaaa

SEQ ID NO: 371107 - DNA, 2038 bp, Homo sapiens
gttctggcgcccggagcgcggccatgtgaaccgcttgtaccccggggagagacgagccccgagcccggctggacgccgctgcctcaggaaatggaggcaaacgaccattttaactttactggccttccccctgcacctgctgcctcaggactgaaaccctctccttcctcaggggagggcctctacactaacgggtctcccatgaacttcccccagcaagggaaaagtttgaatggggatgtgaatgttaatggcttatctactgtatctcacactactacttcagggattttgaactctgctccccactcctccagcacctcacacctccatcaccccagcgtggcctacgactgtctctggaactactcacagtacccatctgccaatcctggcagcaacctcaaggacccaccccttctctcccagttctcggggggacaatacccactcaacggcatccttgggggcagccggcaaccttcatccccaagtcataacactaaccttcgggctgggagccaagagttctgggccaacggtacccagagtcccatggggcttaactttgattcacaagaactgtatgattcctttcctgaccagaattttgaggtgatgcccaatggaccccctagttttttcacctccccacagacttctcctatgttgggatctagcattcaaacctttgcaccctcccaggaggtaggcagtggtatccatcctgatgaggcagcagaaaaggagatgacttcagttgtggcagagaatggcactggcttggtaggcagcttggagctggaagaagagcagccagaactgaagatgtgtggctacaatggctctgtcccttctgtggaatcgttacaccaagaggtctcagtcctggtccctgaccccacagtgagctgtttagatgatccttcacatcttcctgatcaactggaagacactccaatcctcagtgaagactctctggagcccttcaactctctggcaccagagccagtgagtggaggactatatggtattgatgacacggagctgatgggtgcagaggacaagctgcctcttgaggacagccctgtgatttctgcccttgattgcccttccctcaataatgctactgccttcagtctcctggcagatgatagtcaaacatcaacctctatctttgccagtcccacctctccacctgtcctaggggagtctgtcctgcaagataacagctttgacctgaataatggtagtgacgctgaacaggaagaaatggaaactcaatcttcagacttcccaccatccctgacccagccagctcctgatcagtcatccactattcagctacatccagcaacctcaccagcagtctcgccaacaacctccccagcagtctccctagtggtttctccagcagcctccccagaaatctctccagaagtttgtcccgcagcttctacagttgtctctccagcagtcttctcagtggtctctccagcttcctcagcagtcctcccagcagtctccttagaagtcccgttgacggcttcagtgacatccccaaaagcctctcccgtaacttccccagcagctgcctttccaacagcctccccagcaaataaggatgtcagcagctttctagaaaccactgctgacgtggaagagatcactggagaaggactcactgcttctggtagtggtgatgtcatgaggagacgtattgctaccccagaagaagttcgtcttcccctccaacatgggtaaatgctctagtttgctacatttattgaccttgacaagtttaatgcacaactctagaaagaagggaatgcctcttttcctctgaggtgggggaggaatgggccagacaagagtagattacaggacagttatctgcagtgataatgtttcttggcatgagattcctaggttttccttcttctctcaaggtctgtcttccatcacctattcttttttcatcttgtagtgactcaattttgcccaaggagctccagctattatcttttccaaaccctag

SEQ ID NO: 371108 - DNA, 317 bp, Homo sapiens
caaacttaatcaccttctgaattaggcccagatggcatcacttttatagagggactgagagccattgcctttctctgatatactggatgaattcaccactgtcactctggaaatgtgtttattcatcttcattttcattgtctacccagcgtcagcttttctttcgcaaaaagctgcttcactcatcccagatgcttcgggcggtctccctgggtcaggaccgctacagacgtcgctactgggtattgccgtatttggctggtatctttgtagaaggaacagaggggaacttaggtaggtgtgcctgtgggagtgtg

SEQ ID NO: 371109 - DNA, 1617 bp, Homo sapiens
  misc_feature (1614)..(1616): n is a, c, g, or t
gcagggacccacagtactggggtttaaccagtattcctgttgcttagaggcactcaatcttgatggaagcattatttgcattatcggttactccaaaaccactactggcccccaaagttggtattgtctctgtttgttaggagcttgttgttgttgttccctgccacattgatgaggtggatacatattcagaaggtgatgctttaaaaacacgaggaaatggaaaatcctgcattgatgccttcatttaagggggtgcaggtaatgtgttgatgaagcgtgtgagctttggaatcagatgacctggttttgaatcctgatttccaggctttgagttgtgtgacactggtccttgttttaacctcgttaagcctaagttttacatctggaaaatgggattatactgcttcttgtggttgttgtgaaaattaaaagagttaatgcatatataacagcaggctggcaaatcacaggcactcaataaatattgaccactataatcattcctccttgaatgaaagtggttccaagaaacagagccaaaagagacaactcagagtactaggtttggagagtcttagcatcacctactacctctgtttcctcgaggaaagttaaggactgagcttgtgaggtgaaacaactagcctagctgacagtcaggctctccctcccctcttgctccttcaccattctgtcaaccttttacagcacacaccacttactagctatcatacttttaaaaattgctcgcttatttatctgtctccaacactacagcataagctccatttagctcaggaactctgcccttgttgtcctctcctgtattccccacactgaggataagtgattgaactgaatagttaccctgtgttacttaacattgaatgaatgaatgagttcaatgaggtgcttgttgagagagagacacatacacacacagacacctgtcaccagatcaaccctgccatttaagtattgttatatttataatccaggacgtctgaattcctgcctcctttttaagactctttagagggagatttaacacatgcaggtagctgacttgtgtaaggttttatgccctgtttagccagtgccatgccttttgcagtgcattttatttcattctcgtggagaacagagactgctttttgccatcttggcacagggggtcatgtgtggttgtcattagtcagttcccctagggatctcatgagaacagatcatatgaagcaatcacgttaaatatcatatttcttatctatcctcatcagtcttggtcccccaggttaccactagcaaagaaaagaggaaaacagtaagctgtaacacatagagatggctttgggttagaaagacttccactcttagctagtctttcttgggcaagttgcacagtctcatagggtctcagttcccttagctgggtaagtcgtacctacttggcatggcagaagtgagctctgtttacagtgtgggtaatgtgtatattacacagctagcctcctggcaaatctctgtgggtatgatgtcctcattaaaaaatgaaatgggcgggtgtgtatgtgtcagtgaaaacattaccaactggaggtacagtgttgagtnnnc

SEQ ID NO: 371110 - DNA, 590 bp, Homo sapiens
cccaatacagagtgagagatgatgtgctcttctcagggtgtcacatcaggaggcacactatatccatctgccctcaacggggatgttaattttgatgacctagtcagagtagtgcccagtttctctactgtgtggttatcagtttttctcttgccactaataaggaaacaatttaatgtaaatatactagattacagctttttaaatgacttgaactaaacatatttttgtgattgtactgtgcacagtcatactataaaagccctaaagttgcccagactttcctatctacttttctttatccctgaaatgctctctttcctctcggccacctcgctctgaaactgcctttgttcttaagggccacgtgacaacatccacccagtctttttgcttcctgacttttctcagtctgagcctgacttctggaatcagactgaacatgttgggtgtgttctctgcagagagctctgctgaggtaattacaggttctggaaaccatagtgacctgaactttactgagggaggtaacctatttggagataaagtccaaatatggtcaagaatgaaagcaaaagtttgaagccaga

SEQ ID NO: 371111 - DNA, 7071 bp, Homo sapiens
cagcagctcggtggccgagtcggtcccgcggccggcggatcgggcgcgcgcgtcgggggtcgtccggctgccaggcagggcgagcacgcgccgggaggccttggaggcgtagggggcgggggtacggctcgcctgctcgcaagatggcggacgaggacggggaagggattcatccctcagcccctcacaggaacggaggtggcggcggcggcggggggtctgggctccactgcgccgggaacggcggcgggggaggcggcggcccgcgggtcgtgcgcatcgtcaagtccgagtccggctacggcttcaacgtgcggggccaagaaccacgtgaatgttgagggggcgacacacaagcaggtggtggacctgattcgagcaggcgagaaggaattgatcttgacagtgttatctgtacctcctcatgaggcagataacctagatcccagtgacgactcgttgggacaatcattttatgattacacagaaaagcaagcagtgcccatatcggtccccagatacaaacatgtggagcagaatggtgagaagtttgtggtatataatgtttacatggcagggaggcagctgtgttctaagcggtaccgggagtttgctatcctacaccagaacctgaagagagagtttgccaactttacatttcctcgactcccagggaagtggccattttcattatcagaacaacaattagatgcccgacgtcggggattggaagaatatctagaaaaagtgtgttcaatacgagtaattggtgagagtgacatcatgcaggaattcctatcagaatccgatgagaactacaatggtgtgtccgacgtagagctgagagtagcattaccagatggaacaacggttacagtcagggttaaaaagaacagtactacagaccaagtatatcaggctatcgcagcaaaggttggcatggacagtacgacagtgaattactttgccttatttgaagtgatcagtcactcctttgtacgtaaattggcacctaatgagtttcctcacaaactctacattcagaattatacatcagctgtgccaggcacctgcttgaccattcgaaagtggctttttacaacagaagaagaaattctcttaaatgacaatgaccttgctgttacctacttctttcatcaggcagtcgatgatgtgaagaaaggttacatcaaagcagaagaaaagtcctatcaattacagaagctatacgaacaaagaaaaatggtcatgtacctcaacatgctaaggacttgtgagggctacaatgaaatcatctttccccactgtgcctgtgactccaggaggaaggggcacgttatcacagccatcagcatcacgcactttaaactgcatgcctgcactgaagaaggacagctggagaaccaggtaattgcatttgaatgggatgagatgcagcgatgggacacagatgaagaagggatggccttctgtttcgaatatgcacgaggagagaagaagccccgatgggttaaaatcttcacgccatatttcaattacatgcatgagtgcttcgagagggtgttctgcgagctcaagtggagaaaagaggaatattagttagagactgattatctcatgtgagccaggacattcttccagcaaggttggcctctggatggtgaacgggctgtgcaaaaaagccctgcttcttcccttgtctagagggtggacattggctacaggctcttccatctctcatgacttcatggaccctcctctgccagttttttaaatcagatcaccctccatgttgttcctgacccacaggggaagctgtcctcagttgtagccgtcttgactggatgagtcctggcagtctttctaggcgaaccaagaatgtttgtgtgagggaaggtgtttgctgttgctttactgctgtctgtatgtgccagtgctggaacagaatttggaagattctgaataattagttacttattctcaaagaaaatctttgaaagaatcaggaggtcaagtcaagaacatgaaaatttatattttagtacagtagaaagaacattgggctctgggaattttatctgggttttctcctggcttttttttccctctgtgtaattttgggtaaatcagcctccctagctttcagttttctcttctgtgaaacaggaagactgaaccacgtaattaatatccaaggtcccttccggctctaaaaggctatgattctagatgagaagttatatcaagaaagatgtggccaatcagattgagtcatccaggcatacctttttagcttctgtttgtggagttgtctccagataagaggagatgtgccttcccaataactctttttttttttcctttcagaacattttccagatggcgaggtcacagcagagagatgtggccacctagcctttccttatccccttcccttcccttcacccccatcctcttactcctttcatgtcccatttcagacagagtaaccattaacaaaaaagaagagaaaaagttaaagtcgttatattcaaaagccctaaactaaatattattaataaccccctctgaatttcatgtctctggaattgaggtggtagtgaacagcagatcggtcagcaccagaagtcaactgagttaaggcaggaaaagaaataagcccaaccaacttgccaaaggtatctttgtcctttcacctgggcctcataccaacagcctctccttgtactatatttttaaaactggaactatgaacttcatccatttgcactgttcagacatatatatgtatgtatgtaaaaattatatatacacaaattagctgcacgtatatacatatatatatttctttttaaatttcatattgatggcagtaccttttttagcttgtgtttttacacacctttcactagaatccatgacctccctcgtgctctctttcttttgaaacaaactttaaaaaggaaaaaaaagcattttacagggaaaaatacctctcctcatgaaggacttgaaaagtttacaacctgcttggatttttgcccctttttttgtattgagtatagattccggctcatgggttgccatagagtctaggaacaaggagtatagtttctttatcttccaagagggtgctggggaggagaaagaggtgtgtttctcaaggttaacaggctgtagttctgcagggagagcctgaagtcctggtatgggctcttgattctgtgacaatttttttgatccatctatttctctcactcctggctttctagccacattctgcacctccttcctgctttcctagagcctcggtatgctttccctcaaccgaccctggctcaggaggttgatgccatgggaacctgaacctgaaacacttcatggtagtaatttcctgttttccttgcctttttttttttttttttttttttttttctgagacagggtcttactctgtcgcccagactggaatgtggtggcatgaacatagctcactgttaccttgaattctgggctcaggtgatccttccgcctcaccctcctgagtagctgggactacaggtgtgcaccaccacacctggctaattcttcttaaaatttttttgtagagacagggtctcactatgttgcccaggctggtctcaaactcctggcctcaggtgatcctcttgtctcagcctcccaaagtgctgggattacaggcatgagccactgtgtccttccctgccttttttgcagcagggatagtactcaggaccagagttaagctgataccttaggcacacaggttggacttacatagaggaaagaaagcaagaaatgccctatgtacatgaggttttacctcctccattcctgaccaataaccacccataactacggcattctctgtgacttccttaaacagcagtgatgggaagggatccaatagtatcttcaaggccttggggaaacttgcagtgggtcagtggtctgtgccaaccaaacgatagccccatccaagccagctgagaacctaggaaggagtagtaggaatatggttgattagattggatctcccaagttttaattgaaaggagactgaacgaaaacctttctgctttctgtccgttaaagagctcctcatctgatcttgcagctagaccctttgagacttaagagctgcatcccaggatcagaagccagggctaattggggtaggacaatattcccagcccctaagctctgtagataatgcataagaagcaccaagtcaggctcagatgcaactaaaacacatctttgagccttttctttttcccttctcccctttctaaacaaaaaccttcctaggatggcatcttttgctctaactgggagacagtcataattggttgtagtcaattctactaagcagtgttggggtggttggaaagtctcttttttgtaatttgtttttgcaaatcattgtgaggccactttttctttctttctttctttctttctttctttctttcgttctttcgttctttcgttctttctttctttctttctttctctttctttcttttgctttccttctttcatctcttttttgtaatttgttgttgcaaatcattgtgaggccacttttctttccccttccttccttcctttttttctgttttttttttttttttttcccagagtcttgctctgtcgcccaggttggagtgcagtggcacgatctcggctcactgcaccctctgcctcttgggttcaagcgattctcctgcctcagcctcccaagtagctgggattacaggcatacaccaccacgccccactaattttttgtatttttggtagggcggggtttcaccatgatggccaggttggttttgaactcctgacctcaagtaatctgcccacctcggcctcccaaagtgctaggattacaggagtgagccactgcgcctggcccacttttctttctttccttcttattttgttatgctggcagccatttgcccctgcatggtatgggatcaaagaggacagcctttcctccctcaccttctccaaatctaggtgaaatcacagagtacaaaacgtgagaatgctgaatgtgtaaagttgcagagggatccctaatttgaagactttgacacagaactaacttcttttgacttaaatgaatttaaaatgagccaaaggaccctgaaaagaagacatgttgatttcccactcctagatgctaaagagacttggcaccagctttgttcaaactgtaaaaatagcaatttgcccctactcgctcagagtgggacagtagtgaacagagctgggattccatgcgacagcttgaatgctgaccttcagacatgagacatagggatttggaggccccttagaatgggtagatggtgttatgttccctttctggcatagcattcacttggtgctttggagattaggtgagggccctataggtagttggcctgttggcagaatttatttaggaacagcccttttgaaagtgtcccagtaacaaagcacccagctgcagcaaggaggtggggaaggagggcaccccaaaggacagcgccttcttctcttccacccatgcacggccttgggtgatggaggcgggttccctgtggctgcgtggatcccataggatcaagcccttctttgcatgaagcagtgttgtgactcttctctctccccttcctctgcacttcctttctgtaatccctactgttcttcttagtcccagcttctgcccagggaggcttctacccagacttcttttgcaatttgtccctgggaagagggggtctcccagtgcccccagcttcatcccagcagaaccagcaggatcctcctggtctctcactggccttcctccacacttggtttctatcctcaggggtagaagctcagagctttttatggcccaggagaaaatgtagaccctgagaaacctgtccctgcagaaaggttcccttgggccatgctttgggccctctgctctttatatgtttattctattctccatttttccaccccgtccttaccctaggcctaaacacaggtacagatatgtgcatgctcagggcagctcctaggcctggactgagctctcaggggggaattagataaatattccaacatcctcatgcctggcccatttagtttcatcctttagttacccaggccagtagctttgggttatcccttcctgtagctccaaacccagcacttggagcagcaaaatagggcactgacaggagatgaaactctctcctatctcagaatttgccaacttctgggctgggctcctaggaggtagttttcttgaaggggactgcatcctagttgacctgaattttccagaccaggagggactgctgtgctctcccttctcgccatcatactgtttggctagattcattcagcagtagaagctgtttgatctgttgaccccagcatactgctgtttcttcaccagcttcattgtgtcacagtagcttcctttgggaggatgatgtgatagaacactcagagagagggagggagaagagagatagtgggtatgcttctctagctccccatcttccaggtccacctcttgacttcctgttcccctaaacctgagcacatcacgccaggcctctttgctgccaggacagcatcagctcactcctcagcaataatctagggtatgtgggaaggtcagggctgtggtaaggaatagaatcaaagaggggagtgatacggggtgggggcacttggccgcctgctaaacttggacattaattttatatcatgacccccttttaagccagtgagctgggcttcagtttttcccaggccatgcacatttaatttatttcagagaaactctaattgtattttcactgcagtatcttgtattttttatttgtgatttaagaaatgtgaagagaaaatacacagacacaataatggctaacattgtttctttcattccttgttctagagctaaccactctaaaattgtttggtaatgtcacttagtgtaattaattgtaacatattcttttaaataaattgatttattgatcaaaca

SEQ ID NO: 371112 - DNA, 6780 bp, Homo sapiens
atgggattgtctttttccctttttccccttaggaaccacgtgaatgttgagggggcgacacacaagcaggtggtggacctgattcgagcaggcgagaaggaattgatcttgacagtgttatctgtacctcctcatgaggcagataacctagatcccagtgacgactcgttgggacaatcattttatgattacacagaaaagcaagcagtgcccatatcggtccccagatacaaacatgtggagcagaatggtgagaagtttgtggtatataatgtttacatggcagggaggcagctgtgttctaagcggtaccgggagtttgctatcctacaccagaacctgaagagagagtttgccaactttacatttcctcgactcccagggaagtggccattttcattatcagaacaacaattagatgcccgacgtcggggattggaagaatatctagaaaaagtgtgttcaatacgagtaattggtgagagtgacatcatgcaggaattcctatcagaatccgatgagaactacaatggtgtgtccgacgtagagctgagagtagcattaccagatggaacaacggttacagtcagggttaaaaagaacagtactacagaccaagtatatcaggctatcgcagcaaaggttggcatggacagtacgacagtgaattactttgccttatttgaagtgatcagtcactcctttgtacgtaaattggcacctaatgagtttcctcacaaactctacattcagaattatacatcagctgtgccaggcacctgcttgaccattcgaaagtggctttttacaacagaagaagaaattctcttaaatgacaatgaccttgctgttacctacttctttcatcaggcagtcgatgatgtgaagaaaggttacatcaaagcagaagaaaagtcctatcaattacagaagctatacgaacaaagaaaaatggtcatgtacctcaacatgctaaggacttgtgagggctacaatgaaatcatctttccccactgtgcctgtgactccaggaggaaggggcacgttatcacagccatcagcatcacgcactttaaactgcatgcctgcactgaagaaggacagctggagaaccaggtaattgcatttgaatgggatgagatgcagcgatgggacacagatgaagaagggatggccttctgtttcgaatatgcacgaggagagaagaagccccgatgggttaaaatcttcacgccatatttcaattacatgcatgagtgcttcgagagggtgttctgcgagctcaagtggagaaaagaggaatattagttagagactgattatctcatgtgagccaggacattcttccagcaaggttggcctctggatggtgaacgggctgtgcaaaaaagccctgcttcttcccttgtctagagggtggacattggctacaggctcttccatctctcatgacttcatggaccctcctctgccagttttttaaatcagatcaccctccatgttgttcctgacccacaggggaagctgtcctcagttgtagccgtcttgactggatgagtcctggcagtctttctaggcgaaccaagaatgtttgtgtgagggaaggtgtttgctgttgctttactgctgtctgtatgtgccagtgctggaacagaatttggaagattctgaataattagttacttattctcaaagaaaatctttgaaagaatcaggaggtcaagtcaagaacatgaaaatttatattttagtacagtagaaagaacattgggctctgggaattttatctgggttttctcctggcttttttttccctctgtgtaattttgggtaaatcagcctccctagctttcagttttctcttctgtgaaacaggaagactgaaccacgtaattaatatccaaggtcccttccggctctaaaaggctatgattctagatgagaagttatatcaagaaagatgtggccaatcagattgagtcatccaggcatacctttttagcttctgtttgtggagttgtctccagataagaggagatgtgccttcccaataactctttttttttttcctttcagaacattttccagatggcgaggtcacagcagagagatgtggccacctagcctttccttatccccttcccttcccttcacccccatcctcttactcctttcatgtcccatttcagacagagtaaccattaacaaaaaagaagagaaaaagttaaagtcgttatattcaaaagccctaaactaaatattattaataaccccctctgaatttcatgtctctggaattgaggtggtagtgaacagcagatcggtcagcaccagaagtcaactgagttaaggcaggaaaagaaataagcccaaccaacttgccaaaggtatctttgtcctttcacctgggcctcataccaacagcctctccttgtactatatttttaaaactggaactatgaacttcatccatttgcactgttcagacatatatatgtatgtatgtaaaaattatatatacacaaattagctgcacgtatatacatatatatatttctttttaaatttcatattgatggcagtaccttttttagcttgtgtttttacacacctttcactagaatccatgacctccctcgtgctctctttcttttgaaacaaactttaaaaaggaaaaaaaagcattttacagggaaaaatacctctcctcatgaaggacttgaaaagtttacaacctgcttggatttttgcccctttttttgtattgagtatagattccggctcatgggttgccatagagtctaggaacaaggagtatagtttctttatcttccaagagggtgctggggaggagaaagaggtgtgtttctcaaggttaacaggctgtagttctgcagggagagcctgaagtcctggtatgggctcttgattctgtgacaatttttttgatccatctatttctctcactcctggctttctagccacattctgcacctccttcctgctttcctagagcctcggtatgctttccctcaaccgaccctggctcaggaggttgatgccatgggaacctgaacctgaaacacttcatggtagtaatttcctgttttccttgcctttttttttttttttttttttttttttctgagacagggtcttactctgtcgcccagactggaatgtggtggcatgaacatagctcactgttaccttgaattctgggctcaggtgatccttccgcctcaccctcctgagtagctgggactacaggtgtgcaccaccacacctggctaattcttcttaaaatttttttgtagagacagggtctcactatgttgcccaggctggtctcaaactcctggcctcaggtgatcctcttgtctcagcctcccaaagtgctgggattacaggcatgagccactgtgtccttccctgccttttttgcagcagggatagtactcaggaccagagttaagctgataccttaggcacacaggttggacttacatagaggaaagaaagcaagaaatgccctatgtacatgaggttttacctcctccattcctgaccaataaccacccataactacggcattctctgtgacttccttaaacagcagtgatgggaagggatccaatagtatcttcaaggccttggggaaacttgcagtgggtcagtggtctgtgccaaccaaacgatagccccatccaagccagctgagaacctaggaaggagtagtaggaatatggttgattagattggatctcccaagttttaattgaaaggagactgaacgaaaacctttctgctttctgtccgttaaagagctcctcatctgatcttgcagctagaccctttgagacttaagagctgcatcccaggatcagaagccagggctaattggggtaggacaatattcccagcccctaagctctgtagataatgcataagaagcaccaagtcaggctcagatgcaactaaaacacatctttgagccttttctttttcccttctcccctttctaaacaaaaaccttcctaggatggcatcttttgctctaactgggagacagtcataattggttgtagtcaattctactaagcagtgttggggtggttggaaagtctcttttttgtaatttgtttttgcaaatcattgtgaggccactttttctttctttctttctttctttctttctttctttcgttctttcgttctttcgttctttctttctttctttctttctctttctttcttttgctttccttctttcatctcttttttgtaatttgttgttgcaaatcattgtgaggccacttttctttccccttccttccttcctttttttctgttttttttttttttttttcccagagtcttgctctgtcgcccaggttggagtgcagtggcacgatctcggctcactgcaccctctgcctcttgggttcaagcgattctcctgcctcagcctcccaagtagctgggattacaggcatacaccaccacgccccactaattttttgtatttttggtagggcggggtttcaccatgatggccaggttggttttgaactcctgacctcaagtaatctgcccacctcggcctcccaaagtgctaggattacaggagtgagccactgcgcctggcccacttttctttctttccttcttattttgttatgctggcagccatttgcccctgcatggtatgggatcaaagaggacagcctttcctccctcaccttctccaaatctaggtgaaatcacagagtacaaaacgtgagaatgctgaatgtgtaaagttgcagagggatccctaatttgaagactttgacacagaactaacttcttttgacttaaatgaatttaaaatgagccaaaggaccctgaaaagaagacatgttgatttcccactcctagatgctaaagagacttggcaccagctttgttcaaactgtaaaaatagcaatttgcccctactcgctcagagtgggacagtagtgaacagagctgggattccatgcgacagcttgaatgctgaccttcagacatgagacatagggatttggaggccccttagaatgggtagatggtgttatgttccctttctggcatagcattcacttggtgctttggagattaggtgagggccctataggtagttggcctgttggcagaatttatttaggaacagcccttttgaaagtgtcccagtaacaaagcacccagctgcagcaaggaggtggggaaggagggcaccccaaaggacagcgccttcttctcttccacccatgcacggccttgggtgatggaggcgggttccctgtggctgcgtggatcccataggatcaagcccttctttgcatgaagcagtgttgtgactcttctctctccccttcctctgcacttcctttctgtaatccctactgttcttcttagtcccagcttctgcccagggaggcttctacccagacttcttttgcaatttgtccctgggaagagggggtctcccagtgcccccagcttcatcccagcagaaccagcaggatcctcctggtctctcactggccttcctccacacttggtttctatcctcaggggtagaagctcagagctttttatggcccaggagaaaatgtagaccctgagaaacctgtccctgcagaaaggttcccttgggccatgctttgggccctctgctctttatatgtttattctattctccatttttccaccccgtccttaccctaggcctaaacacaggtacagatatgtgcatgctcagggcagctcctaggcctggactgagctctcaggggggaattagataaatattccaacatcctcatgcctggcccatttagtttcatcctttagttacccaggccagtagctttgggttatcccttcctgtagctccaaacccagcacttggagcagcaaaatagggcactgacaggagatgaaactctctcctatctcagaatttgccaacttctgggctgggctcctaggaggtagttttcttgaaggggactgcatcctagttgacctgaattttccagaccaggagggactgctgtgctctcccttctcgccatcatactgtttggctagattcattcagcagtagaagctgtttgatctgttgaccccagcatactgctgtttcttcaccagcttcattgtgtcacagtagcttcctttgggaggatgatgtgatagaacactcagagagagggagggagaagagagatagtgggtatgcttctctagctccccatcttccaggtccacctcttgacttcctgttcccctaaacctgagcacatcacgccaggcctctttgctgccaggacagcatcagctcactcctcagcaataatctagggtatgtgggaaggtcagggctgtggtaaggaatagaatcaaagaggggagtgatacggggtgggggcacttggccgcctgctaaacttggacattaattttatatcatgacccccttttaagccagtgagctgggcttcagtttttcccaggccatgcacatttaatttatttcagagaaactctaattgtattttcactgcagtatcttgtattttttatttgtgatttaagaaatgtgaagagaaaatacacagacacaataatggctaacattgtttctttcattccttgttctagagctaaccactctaaaattgtttggtaatgtcacttagtgtaattaattgtaacatattcttttaaataaattgatttattgatcaaaca

SEQ ID NO: 371113 - DNA, 7318 bp, Homo sapiens
cagcagctcggtggccgagtcggtcccgcggccggcggatcgggcgcgcgcgtcgggggtcgtccggctgccaggcagggcgagcacgcgccggggtgcgcaagggggaccgcatcctggaggtgtgagtatcggggctacccgccgccccatcctccccgcgcctccatgcccctgcatgtccttcgctacccttgtcatcccccatagccgtagcgtcccctcgatgctcctgacgtccggctcgcctgctcgcaagatggcggacgaggacggggaagggattcatccctcagcccctcacaggaacggaggtggcggcggcggcggggggtctgggctccactgcgccgggaacggcggcgggggaggcggcggcccgcgggtcgtgcgcatcgtcaagtccgagtccggctacggcttcaacgtgcggggccaagtgagcgagggcgggcaactgcggagcatcaacggggagctgtacgcgccgctgcagcatgtgagcgccgtgctgcccgggggggcggccgatcgggccggggtgcgcaagggggaccgcatcctggaggtgaaccacgtgaatgttgagggggcgacacacaagcaggtggtggacctgattcgagcaggcgagaaggaattgatcttgacagtgttatctgtacctcctcatgaggcagataacctagatcccagtgacgactcgttgggacaatcattttatgattacacagaaaagcaagcagtgcccatatcggtccccagatacaaacatgtggagcagaatggtgagaagtttgtggtatataatgtttacatggcagggaggcagctgtgttctaagcggtaccgggagtttgctatcctacaccagaacctgaagagagagtttgccaactttacatttcctcgactcccagggaagtggccattttcattatcagaacaacaattagatgcccgacgtcggggattggaagaatatctagaaaaagtgtgttcaatacgagtaattggtgagagtgacatcatgcaggaattcctatcagaatccgatgagaactacaatggtgtgtccgacgtagagctgagagtagcattaccagatggaacaacggttacagtcagggttaaaaagaacagtactacagaccaagtatatcaggctatcgcagcaaaggttggcatggacagtacgacagtgaattactttgccttatttgaagtgatcagtcactcctttgtacgtaaattggcacctaatgagtttcctcacaaactctacattcagaattatacatcagctgtgccaggcacctgcttgaccattcgaaagtggctttttacaacagaagaagaaattctcttaaatgacaatgaccttgctgttacctacttctttcatcaggcagtcgatgatgtgaagaaaggttacatcaaagcagaagaaaagtcctatcaattacagaagctatacgaacaaagaaaaatggtcatgtacctcaacatgctaaggacttgtgagggctacaatgaaatcatctttccccactgtgcctgtgactccaggaggaaggggcacgttatcacagccatcagcatcacgcactttaaactgcatgcctgcactgaagaaggacagctggagaaccaggtaattgcatttgaatgggatgagatgcagcgatgggacacagatgaagaagggatggccttctgtttcgaatatgcacgaggagagaagaagccccgatgggttaaaatcttcacgccatatttcaattacatgcatgagtgcttcgagagggtgttctgcgagctcaagtggagaaaagaggaatattagttagagactgattatctcatgtgagccaggacattcttccagcaaggttggcctctggatggtgaacgggctgtgcaaaaaagccctgcttcttcccttgtctagagggtggacattggctacaggctcttccatctctcatgacttcatggaccctcctctgccagttttttaaatcagatcaccctccatgttgttcctgacccacaggggaagctgtcctcagttgtagccgtcttgactggatgagtcctggcagtctttctaggcgaaccaagaatgtttgtgtgagggaaggtgtttgctgttgctttactgctgtctgtatgtgccagtgctggaacagaatttggaagattctgaataattagttacttattctcaaagaaaatctttgaaagaatcaggaggtcaagtcaagaacatgaaaatttatattttagtacagtagaaagaacattgggctctgggaattttatctgggttttctcctggcttttttttccctctgtgtaattttgggtaaatcagcctccctagctttcagttttctcttctgtgaaacaggaagactgaaccacgtaattaatatccaaggtcccttccggctctaaaaggctatgattctagatgagaagttatatcaagaaagatgtggccaatcagattgagtcatccaggcatacctttttagcttctgtttgtggagttgtctccagataagaggagatgtgccttcccaataactctttttttttttcctttcagaacattttccagatggcgaggtcacagcagagagatgtggccacctagcctttccttatccccttcccttcccttcacccccatcctcttactcctttcatgtcccatttcagacagagtaaccattaacaaaaaagaagagaaaaagttaaagtcgttatattcaaaagccctaaactaaatattattaataaccccctctgaatttcatgtctctggaattgaggtggtagtgaacagcagatcggtcagcaccagaagtcaactgagttaaggcaggaaaagaaataagcccaaccaacttgccaaaggtatctttgtcctttcacctgggcctcataccaacagcctctccttgtactatatttttaaaactggaactatgaacttcatccatttgcactgttcagacatatatatgtatgtatgtaaaaattatatatacacaaattagctgcacgtatatacatatatatatttctttttaaatttcatattgatggcagtaccttttttagcttgtgtttttacacacctttcactagaatccatgacctccctcgtgctctctttcttttgaaacaaactttaaaaaggaaaaaaaagcattttacagggaaaaatacctctcctcatgaaggacttgaaaagtttacaacctgcttggatttttgcccctttttttgtattgagtatagattccggctcatgggttgccatagagtctaggaacaaggagtatagtttctttatcttccaagagggtgctggggaggagaaagaggtgtgtttctcaaggttaacaggctgtagttctgcagggagagcctgaagtcctggtatgggctcttgattctgtgacaatttttttgatccatctatttctctcactcctggctttctagccacattctgcacctccttcctgctttcctagagcctcggtatgctttccctcaaccgaccctggctcaggaggttgatgccatgggaacctgaacctgaaacacttcatggtagtaatttcctgttttccttgcctttttttttttttttttttttttttttctgagacagggtcttactctgtcgcccagactggaatgtggtggcatgaacatagctcactgttaccttgaattctgggctcaggtgatccttccgcctcaccctcctgagtagctgggactacaggtgtgcaccaccacacctggctaattcttcttaaaatttttttgtagagacagggtctcactatgttgcccaggctggtctcaaactcctggcctcaggtgatcctcttgtctcagcctcccaaagtgctgggattacaggcatgagccactgtgtccttccctgccttttttgcagcagggatagtactcaggaccagagttaagctgataccttaggcacacaggttggacttacatagaggaaagaaagcaagaaatgccctatgtacatgaggttttacctcctccattcctgaccaataaccacccataactacggcattctctgtgacttccttaaacagcagtgatgggaagggatccaatagtatcttcaaggccttggggaaacttgcagtgggtcagtggtctgtgccaaccaaacgatagccccatccaagccagctgagaacctaggaaggagtagtaggaatatggttgattagattggatctcccaagttttaattgaaaggagactgaacgaaaacctttctgctttctgtccgttaaagagctcctcatctgatcttgcagctagaccctttgagacttaagagctgcatcccaggatcagaagccagggctaattggggtaggacaatattcccagcccctaagctctgtagataatgcataagaagcaccaagtcaggctcagatgcaactaaaacacatctttgagccttttctttttcccttctcccctttctaaacaaaaaccttcctaggatggcatcttttgctctaactgggagacagtcataattggttgtagtcaattctactaagcagtgttggggtggttggaaagtctcttttttgtaatttgtttttgcaaatcattgtgaggccactttttctttctttctttctttctttctttctttctttcgttctttcgttctttcgttctttctttctttctttctttctctttctttcttttgctttccttctttcatctcttttttgtaatttgttgttgcaaatcattgtgaggccacttttctttccccttccttccttcctttttttctgttttttttttttttttttcccagagtcttgctctgtcgcccaggttggagtgcagtggcacgatctcggctcactgcaccctctgcctcttgggttcaagcgattctcctgcctcagcctcccaagtagctgggattacaggcatacaccaccacgccccactaattttttgtatttttggtagggcggggtttcaccatgatggccaggttggttttgaactcctgacctcaagtaatctgcccacctcggcctcccaaagtgctaggattacaggagtgagccactgcgcctggcccacttttctttctttccttcttattttgttatgctggcagccatttgcccctgcatggtatgggatcaaagaggacagcctttcctccctcaccttctccaaatctaggtgaaatcacagagtacaaaacgtgagaatgctgaatgtgtaaagttgcagagggatccctaatttgaagactttgacacagaactaacttcttttgacttaaatgaatttaaaatgagccaaaggaccctgaaaagaagacatgttgatttcccactcctagatgctaaagagacttggcaccagctttgttcaaactgtaaaaatagcaatttgcccctactcgctcagagtgggacagtagtgaacagagctgggattccatgcgacagcttgaatgctgaccttcagacatgagacatagggatttggaggccccttagaatgggtagatggtgttatgttccctttctggcatagcattcacttggtgctttggagattaggtgagggccctataggtagttggcctgttggcagaatttatttaggaacagcccttttgaaagtgtcccagtaacaaagcacccagctgcagcaaggaggtggggaaggagggcaccccaaaggacagcgccttcttctcttccacccatgcacggccttgggtgatggaggcgggttccctgtggctgcgtggatcccataggatcaagcccttctttgcatgaagcagtgttgtgactcttctctctccccttcctctgcacttcctttctgtaatccctactgttcttcttagtcccagcttctgcccagggaggcttctacccagacttcttttgcaatttgtccctgggaagagggggtctcccagtgcccccagcttcatcccagcagaaccagcaggatcctcctggtctctcactggccttcctccacacttggtttctatcctcaggggtagaagctcagagctttttatggcccaggagaaaatgtagaccctgagaaacctgtccctgcagaaaggttcccttgggccatgctttgggccctctgctctttatatgtttattctattctccatttttccaccccgtccttaccctaggcctaaacacaggtacagatatgtgcatgctcagggcagctcctaggcctggactgagctctcaggggggaattagataaatattccaacatcctcatgcctggcccatttagtttcatcctttagttacccaggccagtagctttgggttatcccttcctgtagctccaaacccagcacttggagcagcaaaatagggcactgacaggagatgaaactctctcctatctcagaatttgccaacttctgggctgggctcctaggaggtagttttcttgaaggggactgcatcctagttgacctgaattttccagaccaggagggactgctgtgctctcccttctcgccatcatactgtttggctagattcattcagcagtagaagctgtttgatctgttgaccccagcatactgctgtttcttcaccagcttcattgtgtcacagtagcttcctttgggaggatgatgtgatagaacactcagagagagggagggagaagagagatagtgggtatgcttctctagctccccatcttccaggtccacctcttgacttcctgttcccctaaacctgagcacatcacgccaggcctctttgctgccaggacagcatcagctcactcctcagcaataatctagggtatgtgggaaggtcagggctgtggtaaggaatagaatcaaagaggggagtgatacggggtgggggcacttggccgcctgctaaacttggacattaattttatatcatgacccccttttaagccagtgagctgggcttcagtttttcccaggccatgcacatttaatttatttcagagaaactctaattgtattttcactgcagtatcttgtattttttatttgtgatttaagaaatgtgaagagaaaatacacagacacaataatggctaacattgtttctttcattccttgttctagagctaaccactctaaaattgtttggtaatgtcacttagtgtaattaattgtaacatattcttttaaataaattgatttattgatcaaaca

SEQ ID NO: 371114 - DNA, 7264 bp, Homo sapiens
cagcagctcggtggccgagtcggtcccgcggccggcggatcgggcgcgcgcgtcgggggtcgtccggctgccaggcagggcgagcacgcgccggggtgcgcaagggggaccgcatcctggaggtgtgagtatcggggctacccgccgccccatcctccccgcgcctccatgcccctgcatgtccttcgctacccttgtcatcccccatagccgtagcgtcccctcgatgctcctgacgtccggctcgcctgctcgcaagatggcggacgaggacggggaagggattcatccctcagcccctcacaggaacggaggtggcggcggcggcggggggtctgggctccactgcgccgggaacggcggcgggggaggcggcggcccgcgggtcgtgcgcatcgtcaagtccgagtccggctacggcttcaacgtgcggggccaagtgagcgagggcgggcaactgcggagcatcaacggggagctgtacgcgccgctgcagcatgtgagcgccgtgctgcccgggggggcggccgatcgggccggggtgcgcaagggggaccgcatcctggaggtgaaccacgtgaatgttgagggggcgacacacaagcaggtggtggacctgattcgagcaggcgagaaggaattgatcttgacagtgttatctgtacctcctcatgaggcagataacctagatcccagtgacgactcgttgggacaatcattttatgattacacagaaaagcaagcagtggtatataatgtttacatggcagggaggcagctgtgttctaagcggtaccgggagtttgctatcctacaccagaacctgaagagagagtttgccaactttacatttcctcgactcccagggaagtggccattttcattatcagaacaacaattagatgcccgacgtcggggattggaagaatatctagaaaaagtgtgttcaatacgagtaattggtgagagtgacatcatgcaggaattcctatcagaatccgatgagaactacaatggtgtgtccgacgtagagctgagagtagcattaccagatggaacaacggttacagtcagggttaaaaagaacagtactacagaccaagtatatcaggctatcgcagcaaaggttggcatggacagtacgacagtgaattactttgccttatttgaagtgatcagtcactcctttgtacgtaaattggcacctaatgagtttcctcacaaactctacattcagaattatacatcagctgtgccaggcacctgcttgaccattcgaaagtggctttttacaacagaagaagaaattctcttaaatgacaatgaccttgctgttacctacttctttcatcaggcagtcgatgatgtgaagaaaggttacatcaaagcagaagaaaagtcctatcaattacagaagctatacgaacaaagaaaaatggtcatgtacctcaacatgctaaggacttgtgagggctacaatgaaatcatctttccccactgtgcctgtgactccaggaggaaggggcacgttatcacagccatcagcatcacgcactttaaactgcatgcctgcactgaagaaggacagctggagaaccaggtaattgcatttgaatgggatgagatgcagcgatgggacacagatgaagaagggatggccttctgtttcgaatatgcacgaggagagaagaagccccgatgggttaaaatcttcacgccatatttcaattacatgcatgagtgcttcgagagggtgttctgcgagctcaagtggagaaaagaggaatattagttagagactgattatctcatgtgagccaggacattcttccagcaaggttggcctctggatggtgaacgggctgtgcaaaaaagccctgcttcttcccttgtctagagggtggacattggctacaggctcttccatctctcatgacttcatggaccctcctctgccagttttttaaatcagatcaccctccatgttgttcctgacccacaggggaagctgtcctcagttgtagccgtcttgactggatgagtcctggcagtctttctaggcgaaccaagaatgtttgtgtgagggaaggtgtttgctgttgctttactgctgtctgtatgtgccagtgctggaacagaatttggaagattctgaataattagttacttattctcaaagaaaatctttgaaagaatcaggaggtcaagtcaagaacatgaaaatttatattttagtacagtagaaagaacattgggctctgggaattttatctgggttttctcctggcttttttttccctctgtgtaattttgggtaaatcagcctccctagctttcagttttctcttctgtgaaacaggaagactgaaccacgtaattaatatccaaggtcccttccggctctaaaaggctatgattctagatgagaagttatatcaagaaagatgtggccaatcagattgagtcatccaggcatacctttttagcttctgtttgtggagttgtctccagataagaggagatgtgccttcccaataactctttttttttttcctttcagaacattttccagatggcgaggtcacagcagagagatgtggccacctagcctttccttatccccttcccttcccttcacccccatcctcttactcctttcatgtcccatttcagacagagtaaccattaacaaaaaagaagagaaaaagttaaagtcgttatattcaaaagccctaaactaaatattattaataaccccctctgaatttcatgtctctggaattgaggtggtagtgaacagcagatcggtcagcaccagaagtcaactgagttaaggcaggaaaagaaataagcccaaccaacttgccaaaggtatctttgtcctttcacctgggcctcataccaacagcctctccttgtactatatttttaaaactggaactatgaacttcatccatttgcactgttcagacatatatatgtatgtatgtaaaaattatatatacacaaattagctgcacgtatatacatatatatatttctttttaaatttcatattgatggcagtaccttttttagcttgtgtttttacacacctttcactagaatccatgacctccctcgtgctctctttcttttgaaacaaactttaaaaaggaaaaaaaagcattttacagggaaaaatacctctcctcatgaaggacttgaaaagtttacaacctgcttggatttttgcccctttttttgtattgagtatagattccggctcatgggttgccatagagtctaggaacaaggagtatagtttctttatcttccaagagggtgctggggaggagaaagaggtgtgtttctcaaggttaacaggctgtagttctgcagggagagcctgaagtcctggtatgggctcttgattctgtgacaatttttttgatccatctatttctctcactcctggctttctagccacattctgcacctccttcctgctttcctagagcctcggtatgctttccctcaaccgaccctggctcaggaggttgatgccatgggaacctgaacctgaaacacttcatggtagtaatttcctgttttccttgcctttttttttttttttttttttttttttctgagacagggtcttactctgtcgcccagactggaatgtggtggcatgaacatagctcactgttaccttgaattctgggctcaggtgatccttccgcctcaccctcctgagtagctgggactacaggtgtgcaccaccacacctggctaattcttcttaaaatttttttgtagagacagggtctcactatgttgcccaggctggtctcaaactcctggcctcaggtgatcctcttgtctcagcctcccaaagtgctgggattacaggcatgagccactgtgtccttccctgccttttttgcagcagggatagtactcaggaccagagttaagctgataccttaggcacacaggttggacttacatagaggaaagaaagcaagaaatgccctatgtacatgaggttttacctcctccattcctgaccaataaccacccataactacggcattctctgtgacttccttaaacagcagtgatgggaagggatccaatagtatcttcaaggccttggggaaacttgcagtgggtcagtggtctgtgccaaccaaacgatagccccatccaagccagctgagaacctaggaaggagtagtaggaatatggttgattagattggatctcccaagttttaattgaaaggagactgaacgaaaacctttctgctttctgtccgttaaagagctcctcatctgatcttgcagctagaccctttgagacttaagagctgcatcccaggatcagaagccagggctaattggggtaggacaatattcccagcccctaagctctgtagataatgcataagaagcaccaagtcaggctcagatgcaactaaaacacatctttgagccttttctttttcccttctcccctttctaaacaaaaaccttcctaggatggcatcttttgctctaactgggagacagtcataattggttgtagtcaattctactaagcagtgttggggtggttggaaagtctcttttttgtaatttgtttttgcaaatcattgtgaggccactttttctttctttctttctttctttctttctttctttcgttctttcgttctttcgttctttctttctttctttctttctctttctttcttttgctttccttctttcatctcttttttgtaatttgttgttgcaaatcattgtgaggccacttttctttccccttccttccttcctttttttctgttttttttttttttttttcccagagtcttgctctgtcgcccaggttggagtgcagtggcacgatctcggctcactgcaccctctgcctcttgggttcaagcgattctcctgcctcagcctcccaagtagctgggattacaggcatacaccaccacgccccactaattttttgtatttttggtagggcggggtttcaccatgatggccaggttggttttgaactcctgacctcaagtaatctgcccacctcggcctcccaaagtgctaggattacaggagtgagccactgcgcctggcccacttttctttctttccttcttattttgttatgctggcagccatttgcccctgcatggtatgggatcaaagaggacagcctttcctccctcaccttctccaaatctaggtgaaatcacagagtacaaaacgtgagaatgctgaatgtgtaaagttgcagagggatccctaatttgaagactttgacacagaactaacttcttttgacttaaatgaatttaaaatgagccaaaggaccctgaaaagaagacatgttgatttcccactcctagatgctaaagagacttggcaccagctttgttcaaactgtaaaaatagcaatttgcccctactcgctcagagtgggacagtagtgaacagagctgggattccatgcgacagcttgaatgctgaccttcagacatgagacatagggatttggaggccccttagaatgggtagatggtgttatgttccctttctggcatagcattcacttggtgctttggagattaggtgagggccctataggtagttggcctgttggcagaatttatttaggaacagcccttttgaaagtgtcccagtaacaaagcacccagctgcagcaaggaggtggggaaggagggcaccccaaaggacagcgccttcttctcttccacccatgcacggccttgggtgatggaggcgggttccctgtggctgcgtggatcccataggatcaagcccttctttgcatgaagcagtgttgtgactcttctctctccccttcctctgcacttcctttctgtaatccctactgttcttcttagtcccagcttctgcccagggaggcttctacccagacttcttttgcaatttgtccctgggaagagggggtctcccagtgcccccagcttcatcccagcagaaccagcaggatcctcctggtctctcactggccttcctccacacttggtttctatcctcaggggtagaagctcagagctttttatggcccaggagaaaatgtagaccctgagaaacctgtccctgcagaaaggttcccttgggccatgctttgggccctctgctctttatatgtttattctattctccatttttccaccccgtccttaccctaggcctaaacacaggtacagatatgtgcatgctcagggcagctcctaggcctggactgagctctcaggggggaattagataaatattccaacatcctcatgcctggcccatttagtttcatcctttagttacccaggccagtagctttgggttatcccttcctgtagctccaaacccagcacttggagcagcaaaatagggcactgacaggagatgaaactctctcctatctcagaatttgccaacttctgggctgggctcctaggaggtagttttcttgaaggggactgcatcctagttgacctgaattttccagaccaggagggactgctgtgctctcccttctcgccatcatactgtttggctagattcattcagcagtagaagctgtttgatctgttgaccccagcatactgctgtttcttcaccagcttcattgtgtcacagtagcttcctttgggaggatgatgtgatagaacactcagagagagggagggagaagagagatagtgggtatgcttctctagctccccatcttccaggtccacctcttgacttcctgttcccctaaacctgagcacatcacgccaggcctctttgctgccaggacagcatcagctcactcctcagcaataatctagggtatgtgggaaggtcagggctgtggtaaggaatagaatcaaagaggggagtgatacggggtgggggcacttggccgcctgctaaacttggacattaattttatatcatgacccccttttaagccagtgagctgggcttcagtttttcccaggccatgcacatttaatttatttcagagaaactctaattgtattttcactgcagtatcttgtattttttatttgtgatttaagaaatgtgaagagaaaatacacagacacaataatggctaacattgtttctttcattccttgttctagagctaaccactctaaaattgtttggtaatgtcacttagtgtaattaattgtaacatattcttttaaataaattgatttattgatcaaaca

SEQ ID NO: 371115 - DNA, 7590 bp, Homo sapiens
cagcagctcggtggccgagtcggtcccgcggccggcggatcgggcgcgcgcgtcgggggtcgtccggctgccaggcagggcgagcacgcgccgggaggccttggaggcgtagggggcgggggtacggctcgcctgctcgcaagatggcggacgaggacggggaagggattcatccctcagcccctcacaggaacggaggtggcggcggcggcggggggtctgggctccactgcgccgggaacggcggcgggggaggcggcggcccgcgggtcgtgcgcatcgtcaagtccgagtccggctacggcttcaacgtgcggggccaagaaccacgtgaatgttgagggggcgacacacaagcaggtggtggacctgattcgagcaggcgagaaggaattgatcttgacagtgttatctgtacctcctcatgaggcagataacctagatcccagtgacgactcgttgggacaatcattttatgattacacagaaaagcaagcagtgcccatatcggtccccagatacaaacatgtggagcagaatggtgagaagtttgtggtatataatgtttacatggcagggaggcagctgtgttctaagcggtaccgggagtttgctatcctacaccagaacctgaagagagagtttgccaactttacatttcctcgactcccagggaagtggccattttcattatcagaacaacaattagatgcccgacgtcggggattggaagaatatctagaaaaagtgtgttcaatacgagtaattggtgagagtgacatcatgcaggaattcctatcagaatccgatgagaactacaatggtgtgtccgacgtagagctgagagtagcattaccagatggaacaacggttacagtcagggttaaaaagaacagtactacagaccaagtatatcaggctatcgcagcaaaggttggcatggacagtacgacagtgaattactttgccttatttgaagtgatcagtcactcctttgtacgtaaattggcacctaatgagtttcctcacaaactctacattcagaattatacatcagctgtgccaggcacctgcttgaccattcgaaagtggctttttacaacagaagaagaaattctcttaaatgacaatgaccttgctgttacctacttctttcatcaggcagtcgatgatgtgaagaaaggttacatcaaagcagaagaaaagtcctatcaattacagaagctatacgaacaaagaaaaatggtcatgtacctcaacatgctaaggacttgtgagggctacaatgaaatcatctttccccactgtgcctgtgactccaggaggaaggggcacgttatcacagccatcagcatcacgcactttaaactgcatgcctgcactgaagaaggacagctggagaaccaggtaattgcatttgaatgggatgagatgcagcgatgggacacagatgaagaagggatggccttctgtttcgaatatgcacgaggagagaagaagccccgatgggttaaaatcttcacgccatatttcaattacatgcatgagtgcttcgagagggtgttctgcgagctcaagtggagaaaagaggaatattagttagagactgattatctcatgtgagccaggacattcttccagcaaggttggcctctggatggtgaacgggctgtgcaaaaaagccctgcttcttcccttgtctagagggtggacattggctacaggctcttccatctctcatgacttcatggaccctcctctgccagttttttaaatcagatcaccctccatgttgttcctgacccacaggggaagctgtcctcagttgtagccgtcttgactggatgagtcctggcagtctttctaggcgaaccaagaatgtttgtgtgagggaaggtgtttgctgttgctttactgctgtctgtatgtgccagtgctggaacagaatttggaagattctgaataattagttacttattctcaaagaaaatctttgaaagaatcaggaggtcaagtcaagaacatgaaaatttatattttagtacagtagaaagaacattgggctctgggaattttatctgggttttctcctggcttttttttccctctgtgtaattttgggtaaatcagcctccctagctttcagttttctcttctgtgaaacaggaagactgaaccacgtaattaatatccaaggtcccttccggctctaaaaggctatgattctagatgagaagttatatcaagaaagatgtggccaatcagattgagtcatccaggcatacctttttagcttctgtttgtggagttgtctccagataagaggagatgtgccttcccaataactctttttttttttcctttcagaacattttccagatggcgaggtcacagcagagagatgtggccacctagcctttccttatccccttcccttcccttcacccccatcctcttactcctttcatgtcccatttcagacagagtaaccattaacaaaaaagaagagaaaaagttaaagtcgttatattcaaaagccctaaactaaatattattaataaccccctctgaatttcatgtctctggaattgaggtggtagtgaacagcagatcggtcagcaccagaagtcaactgagttaaggcaggaaaagaaataagcccaaccaacttgccaaaggtatctttgtcctttcacctgggcctcataccaacagcctctccttgtactatatttttaaaactggaactatgaacttcatccatttgcactgttcagacatatatatgtatgtatgtaaaaattatatatacacaaattagctgcacgtatatacatatatatatttctttttaaatttcatattgatggcagtaccttttttagcttgtgtttttacacacctttcactagaatccatgacctccctcgtgctctctttcttttgaaacaaactttaaaaaggaaaaaaaagcattttacagggaaaaatacctctcctcatgaaggacttgaaaagtttacaacctgcttggatttttgcccctttttttgtattgagtatagattccggctcatgggttgccatagagtctaggaacaaggagtatagtttctttatcttccaagagggtgctggggaggagaaagaggtgtgtttctcaaggttaacaggctgtagttctgcagggagagcctgaagtcctggtatgggctcttgattctgtgacaatttttttgatccatctatttctctcactcctggctttctagccacattctgcacctccttcctgctttcctagagcctcggtatgctttccctcaaccgaccctggctcaggaggttgatgccatgggaacctgaacctgaaacacttcatggtagtaatttcctgttttccttgcctttttttttttttttttttttttttttctgagacagggtcttactctgtcgcccagactggaatgtggtggcatgaacatagctcactgttaccttgaattctgggctcaggtgatccttccgcctcaccctcctgagtagctgggactacaggtgtgcaccaccacacctggctaattcttcttaaaatttttttgtagagacagggtctcactatgttgcccaggctggtctcaaactcctggcctcaggtgatcctcttgtctcagcctcccaaagtgctgggattacaggcatgagccactgtgtccttccctgccttttttgcagcagggatagtactcaggaccagagttaagctgataccttaggcacacaggttggacttacatagaggaaagaaagcaagaaatgccctatgtacatgaggttttacctcctccattcctgaccaataaccacccataactacggcattctctgtgacttccttaaacagcagtgatgggaagggatccaatagtatcttcaaggccttggggaaacttgcagtgggtcagtggtctgtgccaaccaaacgatagccccatccaagccagctgagaacctaggaaggagtagtaggaatatggttgattagattggatctcccaagttttaattgaaaggagactgaacgaaaacctttctgctttctgtccgttaaagagctcctcatctgatcttgcagctagaccctttgagacttaagagctgcatcccaggatcagaagccagggctaattggggtaggacaatattcccagcccctaagctctgtagataatgcataagaagcaccaagtcaggctcagatgcaactaaaacacatctttgagccttttctttttcccttctcccctttctaaacaaaaaccttcctaggatggcatcttttgctctaactgggagacagtcataattggttgtagtcaattctactaagcagtgttggggtggttggaaagtctcttttttgtaatttgtttttgcaaatcattgtgaggccactttttctttctttctttctttctttctttctttctttcgttctttcgttctttcgttctttctttctttctttctttctctttctttcttttgctttccttctttcatctcttttttgtaatttgttgttgcaaatcattgtgaggccacttttctttccccttccttccttcctttttttctgttttttttttttttttttcccagagtcttgctctgtcgcccaggttggagtgcagtggcacgatctcggctcactgcaccctctgcctcttgggttcaagcgattctcctgcctcagcctcccaagtagctgggattacaggcatacaccaccacgccccactaattttttgtatttttggtagggcggggtttcaccatgatggccaggttggttttgaactcctgacctcaagtaatctgcccacctcggcctcccaaagtgctaggattacaggagtgagccactgcgcctggcccacttttctttctttccttcttattttgttatgctggcagccatttgcccctgcatggtatgggatcaaagaggacagcctttcctccctcaccttctccaaatctaggtgaaatcacagagtacaaaacgtgagaatgctgaatgtgtaaagttgcagagggatccctaatttgaagactttgacacagaactaacttcttttgacttaaatgaatttaaaatgagccaaaggaccctgaaaagaagacatgttgatttcccactcctagatgctaaagagacttggcaccagctttgttcaaactgtaaaaatagcaatttgcccctactcgctcagagtgggacagtagtgaacagagctgggattccatgcgacagcttgaatgctgaccttcagacatgagacatagggatttggaggccccttagaatgggtagatggtgttatgttccctttctggcatagcattcacttggtgctttggagattaggtgagggccctataggtagttggcctgttggcagaatttatttaggaacagcccttttgaaagtgtcccagtaacaaagcacccagctgcagcaaggaggtggggaaggagggcaccccaaaggacagcgccttcttctcttccacccatgcacggccttgggtgatggaggcgggttccctgtggctgcgtggatcccataggatcaagcccttctttgcatgaagcagtgttgtgactcttctctctccccttcctctgcacttcctttctgtaatccctactgttcttcttagtcccagcttctgcccagggaggcttctacccagacttcttttgcaatttgtccctgggaagagggggtctcccagtgcccccagcttcatcccagcagaaccagcaggatcctcctggtctctcactggccttcctccacacttggtttctatcctcaggggtagaagctcagagctttttatggcccaggagaaaatgtagaccctgagaaacctgtccctgcagaaaggttcccttgggccatgctttgggccctctgctctttatatgtttattctattctccatttttccaccccgtccttaccctaggcctaaacacaggtacagatatgtgcatgctcagggcagctcctaggcctggactgagctctcaggggggaattagataaatattccaacatcctcatgcctggcccatttagtttcatcctttagttacccaggccagtagctttgggttatcccttcctgtagctccaaacccagcacttggagcagcaaaatagggcactgacaggagatgaaactctctcctatctcagaatttgccaacttctgggctgggctcctaggaggtagttttcttgaaggggactgcatcctagttgacctgaattttccagaccaggagggactgctgtgctctcccttctcgccatcatactgtttggctagattcattcagcagtagaagctgtttgatctgttgaccccagcatactgctgtttcttcaccagcttcattgtgtcacagtagcttcctttgggaggatgatgtgatagaacactcagagagagggagggagaagagagatagtgggtatgcttctctagctccccatcttccaggtccacctcttgacttcctgttcccctaaacctgagcacatcacgccaggcctctttgctgccaggacagcatcagctcactcctcagcaataatctagggtatgtgggaaggtcagggctgtggtaaggaatagaatcaaagaggggagtgatacggggtgggggcacttggccgcctgctaaacttggacattaattttatatcatgacccccttttaagccagtgagctgggcttcagtttttcccaggccatgcacatttaatttatttcagagaaactctaattgtattttcactgcagtatcttgtattttttatttgtgatttaagaaatgtgaagagaaaatacacagacacaataatggctaacattgtttctttcattccttgttctagagctaaccactctaaaattgtttggtaatgtcacttagtgtaattaattgtaacatattcttttaaataaattgatttattgatcaaacaaaaaaaaaaaaaaaaaaaaaaaaaaaaaaaaaaaaaaaaaaaaaaaaaaaaaaaaaaaaaaaaggagggagaagcaaaacaaaaaatatgccgacgaaaggagggacaaccaaatagatagaggagcaacacggtatcttattataacaaaaagaagggacccaagaagagggaagcagtaatataatacacaacagtcagcaggcgcaggattataaacgatgctgatttcggggcgaaaaccggaccatcgtgacactccatctagcgagcacggcacccaaacacacaccagagggggagtcacgaacaaaaactcggagggaccgaaacctcctccagagagcagtattgagacccaccccccaagggacataagtataaccccaccgcgcggcgtactcaagggtgccacacacagccacgcaccatatcgccgccgccaaacaaatacacaccccgccgcatcgcacgtgaaaaaataaaccgagcagggaaatacatcggacaaacaaccgc

SEQ ID NO: 371116 - DNA, 6494 bp, Homo sapiens
agttcgacggagactctctctcggttcgggagtttgctatcctacaccagaacctgaagagagagtttgccaactttacatttcctcgactcccagggaagtggccattttcattatcagaacaacaattagatgcccgacgtcggggattggaagaatatctagaaaaagtgtgttcaatacgagtaattggtgagagtgacatcatgcaggaattcctatcagaatccgatgagaactacaatggtgtgtccgacgtagagctgagagtagcattaccagatggaacaacggttacagtcagggttaaaaagaacagtactacagaccaagtatatcaggctatcgcagcaaaggttggcatggacagtacgacagtgaattactttgccttatttgaagtgatcagtcactcctttgtacgtaaattggcacctaatgagtttcctcacaaactctacattcagaattatacatcagctgtgccaggcacctgcttgaccattcgaaagtggctttttacaacagaagaagaaattctcttaaatgacaatgaccttgctgttacctacttctttcatcaggcagtcgatgatgtgaagaaaggttacatcaaagcagaagaaaagtcctatcaattacagaagctatacgaacaaagaaaaatggtcatgtacctcaacatgctaaggacttgtgagggctacaatgaaatcatctttccccactgtgcctgtgactccaggaggaaggggcacgttatcacagccatcagcatcacgcactttaaactgcatgcctgcactgaagaaggacagctggagaaccaggtaattgcatttgaatgggatgagatgcagcgatgggacacagatgaagaagggatggccttctgtttcgaatatgcacgaggagagaagaagccccgatgggttaaaatcttcacgccatatttcaattacatgcatgagtgcttcgagagggtgttctgcgagctcaagtggagaaaagaggaatattagttagagactgattatctcatgtgagccaggacattcttccagcaaggttggcctctggatggtgaacgggctgtgcaaaaaagccctgcttcttcccttgtctagagggtggacattggctacaggctcttccatctctcatgacttcatggaccctcctctgccagttttttaaatcagatcaccctccatgttgttcctgacccacaggggaagctgtcctcagttgtagccgtcttgactggatgagtcctggcagtctttctaggcgaaccaagaatgtttgtgtgagggaaggtgtttgctgttgctttactgctgtctgtatgtgccagtgctggaacagaatttggaagattctgaataattagttacttattctcaaagaaaatctttgaaagaatcaggaggtcaagtcaagaacatgaaaatttatattttagtacagtagaaagaacattgggctctgggaattttatctgggttttctcctggcttttttttccctctgtgtaattttgggtaaatcagcctccctagctttcagttttctcttctgtgaaacaggaagactgaaccacgtaattaatatccaaggtcccttccggctctaaaaggctatgattctagatgagaagttatatcaagaaagatgtggccaatcagattgagtcatccaggcatacctttttagcttctgtttgtggagttgtctccagataagaggagatgtgccttcccaataactctttttttttttcctttcagaacattttccagatggcgaggtcacagcagagagatgtggccacctagcctttccttatccccttcccttcccttcacccccatcctcttactcctttcatgtcccatttcagacagagtaaccattaacaaaaaagaagagaaaaagttaaagtcgttatattcaaaagccctaaactaaatattattaataaccccctctgaatttcatgtctctggaattgaggtggtagtgaacagcagatcggtcagcaccagaagtcaactgagttaaggcaggaaaagaaataagcccaaccaacttgccaaaggtatctttgtcctttcacctgggcctcataccaacagcctctccttgtactatatttttaaaactggaactatgaacttcatccatttgcactgttcagacatatatatgtatgtatgtaaaaattatatatacacaaattagctgcacgtatatacatatatatatttctttttaaatttcatattgatggcagtaccttttttagcttgtgtttttacacacctttcactagaatccatgacctccctcgtgctctctttcttttgaaacaaactttaaaaaggaaaaaaaagcattttacagggaaaaatacctctcctcatgaaggacttgaaaagtttacaacctgcttggatttttgcccctttttttgtattgagtatagattccggctcatgggttgccatagagtctaggaacaaggagtatagtttctttatcttccaagagggtgctggggaggagaaagaggtgtgtttctcaaggttaacaggctgtagttctgcagggagagcctgaagtcctggtatgggctcttgattctgtgacaatttttttgatccatctatttctctcactcctggctttctagccacattctgcacctccttcctgctttcctagagcctcggtatgctttccctcaaccgaccctggctcaggaggttgatgccatgggaacctgaacctgaaacacttcatggtagtaatttcctgttttccttgcctttttttttttttttttttttttttttctgagacagggtcttactctgtcgcccagactggaatgtggtggcatgaacatagctcactgttaccttgaattctgggctcaggtgatccttccgcctcaccctcctgagtagctgggactacaggtgtgcaccaccacacctggctaattcttcttaaaatttttttgtagagacagggtctcactatgttgcccaggctggtctcaaactcctggcctcaggtgatcctcttgtctcagcctcccaaagtgctgggattacaggcatgagccactgtgtccttccctgccttttttgcagcagggatagtactcaggaccagagttaagctgataccttaggcacacaggttggacttacatagaggaaagaaagcaagaaatgccctatgtacatgaggttttacctcctccattcctgaccaataaccacccataactacggcattctctgtgacttccttaaacagcagtgatgggaagggatccaatagtatcttcaaggccttggggaaacttgcagtgggtcagtggtctgtgccaaccaaacgatagccccatccaagccagctgagaacctaggaaggagtagtaggaatatggttgattagattggatctcccaagttttaattgaaaggagactgaacgaaaacctttctgctttctgtccgttaaagagctcctcatctgatcttgcagctagaccctttgagacttaagagctgcatcccaggatcagaagccagggctaattggggtaggacaatattcccagcccctaagctctgtagataatgcataagaagcaccaagtcaggctcagatgcaactaaaacacatctttgagccttttctttttcccttctcccctttctaaacaaaaaccttcctaggatggcatcttttgctctaactgggagacagtcataattggttgtagtcaattctactaagcagtgttggggtggttggaaagtctcttttttgtaatttgtttttgcaaatcattgtgaggccactttttctttctttctttctttctttctttctttctttcgttctttcgttctttcgttctttctttctttctttctttctctttctttcttttgctttccttctttcatctcttttttgtaatttgttgttgcaaatcattgtgaggccacttttctttccccttccttccttcctttttttctgttttttttttttttttttcccagagtcttgctctgtcgcccaggttggagtgcagtggcacgatctcggctcactgcaccctctgcctcttgggttcaagcgattctcctgcctcagcctcccaagtagctgggattacaggcatacaccaccacgccccactaattttttgtatttttggtagggcggggtttcaccatgatggccaggttggttttgaactcctgacctcaagtaatctgcccacctcggcctcccaaagtgctaggattacaggagtgagccactgcgcctggcccacttttctttctttccttcttattttgttatgctggcagccatttgcccctgcatggtatgggatcaaagaggacagcctttcctccctcaccttctccaaatctaggtgaaatcacagagtacaaaacgtgagaatgctgaatgtgtaaagttgcagagggatccctaatttgaagactttgacacagaactaacttcttttgacttaaatgaatttaaaatgagccaaaggaccctgaaaagaagacatgttgatttcccactcctagatgctaaagagacttggcaccagctttgttcaaactgtaaaaatagcaatttgcccctactcgctcagagtgggacagtagtgaacagagctgggattccatgcgacagcttgaatgctgaccttcagacatgagacatagggatttggaggccccttagaatgggtagatggtgttatgttccctttctggcatagcattcacttggtgctttggagattaggtgagggccctataggtagttggcctgttggcagaatttatttaggaacagcccttttgaaagtgtcccagtaacaaagcacccagctgcagcaaggaggtggggaaggagggcaccccaaaggacagcgccttcttctcttccacccatgcacggccttgggtgatggaggcgggttccctgtggctgcgtggatcccataggatcaagcccttctttgcatgaagcagtgttgtgactcttctctctccccttcctctgcacttcctttctgtaatccctactgttcttcttagtcccagcttctgcccagggaggcttctacccagacttcttttgcaatttgtccctgggaagagggggtctcccagtgcccccagcttcatcccagcagaaccagcaggatcctcctggtctctcactggccttcctccacacttggtttctatcctcaggggtagaagctcagagctttttatggcccaggagaaaatgtagaccctgagaaacctgtccctgcagaaaggttcccttgggccatgctttgggccctctgctctttatatgtttattctattctccatttttccaccccgtccttaccctaggcctaaacacaggtacagatatgtgcatgctcagggcagctcctaggcctggactgagctctcaggggggaattagataaatattccaacatcctcatgcctggcccatttagtttcatcctttagttacccaggccagtagctttgggttatcccttcctgtagctccaaacccagcacttggagcagcaaaatagggcactgacaggagatgaaactctctcctatctcagaatttgccaacttctgggctgggctcctaggaggtagttttcttgaaggggactgcatcctagttgacctgaattttccagaccaggagggactgctgtgctctcccttctcgccatcatactgtttggctagattcattcagcagtagaagctgtttgatctgttgaccccagcatactgctgtttcttcaccagcttcattgtgtcacagtagcttcctttgggaggatgatgtgatagaacactcagagagagggagggagaagagagatagtgggtatgcttctctagctccccatcttccaggtccacctcttgacttcctgttcccctaaacctgagcacatcacgccaggcctctttgctgccaggacagcatcagctcactcctcagcaataatctagggtatgtgggaaggtcagggctgtggtaaggaatagaatcaaagaggggagtgatacggggtgggggcacttggccgcctgctaaacttggacattaattttatatcatgacccccttttaagccagtgagctgggcttcagtttttcccaggccatgcacatttaatttatttcagagaaactctaattgtattttcactgcagtatcttgtattttttatttgtgatttaagaaatgtgaagagaaaatacacagacacaataatggctaacattgtttctttcattccttgttctagagctaaccactctaaaattgtttggtaatgtcacttagtgtaattaattgtaacatattcttttaaataaattgatttattgatcaaaca

SEQ ID NO: 371117 - DNA, 6346 bp, Homo sapiens
aattccagctcggtatcctccactgtgttcaatacgagtaattggtgagagtgacatcatgcaggaattcctatcagaatccgatgagaactacaatggtgtgtccgacgtagagctgagagtagcattaccagatggaacaacggttacagtcagggttaaaaagaacagtactacagaccaagtatatcaggctatcgcagcaaaggttggcatggacagtacgacagtgaattactttgccttatttgaagtgatcagtcactcctttgtacgtaaattggcacctaatgagtttcctcacaaactctacattcagaattatacatcagctgtgccaggcacctgcttgaccattcgaaagtggctttttacaacagaagaagaaattctcttaaatgacaatgaccttgctgttacctacttctttcatcaggcagtcgatgatgtgaagaaaggttacatcaaagcagaagaaaagtcctatcaattacagaagctatacgaacaaagaaaaatggtcatgtacctcaacatgctaaggacttgtgagggctacaatgaaatcatctttccccactgtgcctgtgactccaggaggaaggggcacgttatcacagccatcagcatcacgcactttaaactgcatgcctgcactgaagaaggacagctggagaaccaggtaattgcatttgaatgggatgagatgcagcgatgggacacagatgaagaagggatggccttctgtttcgaatatgcacgaggagagaagaagccccgatgggttaaaatcttcacgccatatttcaattacatgcatgagtgcttcgagagggtgttctgcgagctcaagtggagaaaagaggaatattagttagagactgattatctcatgtgagccaggacattcttccagcaaggttggcctctggatggtgaacgggctgtgcaaaaaagccctgcttcttcccttgtctagagggtggacattggctacaggctcttccatctctcatgacttcatggaccctcctctgccagttttttaaatcagatcaccctccatgttgttcctgacccacaggggaagctgtcctcagttgtagccgtcttgactggatgagtcctggcagtctttctaggcgaaccaagaatgtttgtgtgagggaaggtgtttgctgttgctttactgctgtctgtatgtgccagtgctggaacagaatttggaagattctgaataattagttacttattctcaaagaaaatctttgaaagaatcaggaggtcaagtcaagaacatgaaaatttatattttagtacagtagaaagaacattgggctctgggaattttatctgggttttctcctggcttttttttccctctgtgtaattttgggtaaatcagcctccctagctttcagttttctcttctgtgaaacaggaagactgaaccacgtaattaatatccaaggtcccttccggctctaaaaggctatgattctagatgagaagttatatcaagaaagatgtggccaatcagattgagtcatccaggcatacctttttagcttctgtttgtggagttgtctccagataagaggagatgtgccttcccaataactctttttttttttcctttcagaacattttccagatggcgaggtcacagcagagagatgtggccacctagcctttccttatccccttcccttcccttcacccccatcctcttactcctttcatgtcccatttcagacagagtaaccattaacaaaaaagaagagaaaaagttaaagtcgttatattcaaaagccctaaactaaatattattaataaccccctctgaatttcatgtctctggaattgaggtggtagtgaacagcagatcggtcagcaccagaagtcaactgagttaaggcaggaaaagaaataagcccaaccaacttgccaaaggtatctttgtcctttcacctgggcctcataccaacagcctctccttgtactatatttttaaaactggaactatgaacttcatccatttgcactgttcagacatatatatgtatgtatgtaaaaattatatatacacaaattagctgcacgtatatacatatatatatttctttttaaatttcatattgatggcagtaccttttttagcttgtgtttttacacacctttcactagaatccatgacctccctcgtgctctctttcttttgaaacaaactttaaaaaggaaaaaaaagcattttacagggaaaaatacctctcctcatgaaggacttgaaaagtttacaacctgcttggatttttgcccctttttttgtattgagtatagattccggctcatgggttgccatagagtctaggaacaaggagtatagtttctttatcttccaagagggtgctggggaggagaaagaggtgtgtttctcaaggttaacaggctgtagttctgcagggagagcctgaagtcctggtatgggctcttgattctgtgacaatttttttgatccatctatttctctcactcctggctttctagccacattctgcacctccttcctgctttcctagagcctcggtatgctttccctcaaccgaccctggctcaggaggttgatgccatgggaacctgaacctgaaacacttcatggtagtaatttcctgttttccttgcctttttttttttttttttttttttttttctgagacagggtcttactctgtcgcccagactggaatgtggtggcatgaacatagctcactgttaccttgaattctgggctcaggtgatccttccgcctcaccctcctgagtagctgggactacaggtgtgcaccaccacacctggctaattcttcttaaaatttttttgtagagacagggtctcactatgttgcccaggctggtctcaaactcctggcctcaggtgatcctcttgtctcagcctcccaaagtgctgggattacaggcatgagccactgtgtccttccctgccttttttgcagcagggatagtactcaggaccagagttaagctgataccttaggcacacaggttggacttacatagaggaaagaaagcaagaaatgccctatgtacatgaggttttacctcctccattcctgaccaataaccacccataactacggcattctctgtgacttccttaaacagcagtgatgggaagggatccaatagtatcttcaaggccttggggaaacttgcagtgggtcagtggtctgtgccaaccaaacgatagccccatccaagccagctgagaacctaggaaggagtagtaggaatatggttgattagattggatctcccaagttttaattgaaaggagactgaacgaaaacctttctgctttctgtccgttaaagagctcctcatctgatcttgcagctagaccctttgagacttaagagctgcatcccaggatcagaagccagggctaattggggtaggacaatattcccagcccctaagctctgtagataatgcataagaagcaccaagtcaggctcagatgcaactaaaacacatctttgagccttttctttttcccttctcccctttctaaacaaaaaccttcctaggatggcatcttttgctctaactgggagacagtcataattggttgtagtcaattctactaagcagtgttggggtggttggaaagtctcttttttgtaatttgtttttgcaaatcattgtgaggccactttttctttctttctttctttctttctttctttctttcgttctttcgttctttcgttctttctttctttctttctttctctttctttcttttgctttccttctttcatctcttttttgtaatttgttgttgcaaatcattgtgaggccacttttctttccccttccttccttcctttttttctgttttttttttttttttttcccagagtcttgctctgtcgcccaggttggagtgcagtggcacgatctcggctcactgcaccctctgcctcttgggttcaagcgattctcctgcctcagcctcccaagtagctgggattacaggcatacaccaccacgccccactaattttttgtatttttggtagggcggggtttcaccatgatggccaggttggttttgaactcctgacctcaagtaatctgcccacctcggcctcccaaagtgctaggattacaggagtgagccactgcgcctggcccacttttctttctttccttcttattttgttatgctggcagccatttgcccctgcatggtatgggatcaaagaggacagcctttcctccctcaccttctccaaatctaggtgaaatcacagagtacaaaacgtgagaatgctgaatgtgtaaagttgcagagggatccctaatttgaagactttgacacagaactaacttcttttgacttaaatgaatttaaaatgagccaaaggaccctgaaaagaagacatgttgatttcccactcctagatgctaaagagacttggcaccagctttgttcaaactgtaaaaatagcaatttgcccctactcgctcagagtgggacagtagtgaacagagctgggattccatgcgacagcttgaatgctgaccttcagacatgagacatagggatttggaggccccttagaatgggtagatggtgttatgttccctttctggcatagcattcacttggtgctttggagattaggtgagggccctataggtagttggcctgttggcagaatttatttaggaacagcccttttgaaagtgtcccagtaacaaagcacccagctgcagcaaggaggtggggaaggagggcaccccaaaggacagcgccttcttctcttccacccatgcacggccttgggtgatggaggcgggttccctgtggctgcgtggatcccataggatcaagcccttctttgcatgaagcagtgttgtgactcttctctctccccttcctctgcacttcctttctgtaatccctactgttcttcttagtcccagcttctgcccagggaggcttctacccagacttcttttgcaatttgtccctgggaagagggggtctcccagtgcccccagcttcatcccagcagaaccagcaggatcctcctggtctctcactggccttcctccacacttggtttctatcctcaggggtagaagctcagagctttttatggcccaggagaaaatgtagaccctgagaaacctgtccctgcagaaaggttcccttgggccatgctttgggccctctgctctttatatgtttattctattctccatttttccaccccgtccttaccctaggcctaaacacaggtacagatatgtgcatgctcagggcagctcctaggcctggactgagctctcaggggggaattagataaatattccaacatcctcatgcctggcccatttagtttcatcctttagttacccaggccagtagctttgggttatcccttcctgtagctccaaacccagcacttggagcagcaaaatagggcactgacaggagatgaaactctctcctatctcagaatttgccaacttctgggctgggctcctaggaggtagttttcttgaaggggactgcatcctagttgacctgaattttccagaccaggagggactgctgtgctctcccttctcgccatcatactgtttggctagattcattcagcagtagaagctgtttgatctgttgaccccagcatactgctgtttcttcaccagcttcattgtgtcacagtagcttcctttgggaggatgatgtgatagaacactcagagagagggagggagaagagagatagtgggtatgcttctctagctccccatcttccaggtccacctcttgacttcctgttcccctaaacctgagcacatcacgccaggcctctttgctgccaggacagcatcagctcactcctcagcaataatctagggtatgtgggaaggtcagggctgtggtaaggaatagaatcaaagaggggagtgatacggggtgggggcacttggccgcctgctaaacttggacattaattttatatcatgacccccttttaagccagtgagctgggcttcagtttttcccaggccatgcacatttaatttatttcagagaaactctaattgtattttcactgcagtatcttgtattttttatttgtgatttaagaaatgtgaagagaaaatacacagacacaataatggctaacattgtttctttcattccttgttctagagctaaccactctaaaattgtttggtaatgtcacttagtgtaattaattgtaacatattcttttaaataaattgatttattgatcaaaca

SEQ ID NO: 371118 - DNA, 6726 bp, Homo sapiens
atgggattgtctttttccctttttccccttaggaaccacgtgaatgttgagggggcgacacacaagcaggtggtggacctgattcgagcaggcgagaaggaattgatcttgacagtgttatctgtacctcctcatgaggcagataacctagatcccagtgacgactcgttgggacaatcattttatgattacacagaaaagcaagcagtgcccatatcggtccccagatacaaacatgtggagcagaatggtgagaagtttgtggtatataatgtttacatggcagggaggcagctgtgttctaagcggtaccgggagtttgctatcctacaccagaacctgaagagagagtttgccaactttacatttcctcgactcccagggaagtggccattttcattatcagaacaacaattagatgcccgacgtcggggattggaagaatatctagaaaaagtgtgttcaatacgagtaattggtgagagtgacatcatgcaggaattcctatcagaatccgatgagaactacaatggtgtgtccgacgtagagctgagagtagcattaccagatggaacaacggttacagtcagggttaaaaagaacagtactacagaccaagtatatcaggctatcgcagcaaaggttggcatggacagtacgacagtgaattactttgccttatttgaagtgatcagtcactcctttgtacgtaaattggcacctaatgagtttcctcacaaactctacattcagaattatacatcagctgtgccaggcacctgcttgaccattcgaaagtggctttttacaacagaagaagaaattctcttaaatgacaatgaccttgctgttacctacttctttcatcaggcagtcgatgatgtgaagaaaggttacatcaaagcagaagaaaagtcctatcaattacagaagctatacgaacaaagaaaaatggtcatgtacctcaacatgctaaggacttgtgagggctacaatgaaatcatctttccccactgtgcctgtgactccaggaggaaggggcacgttatcacagccatcagcatcacgcactttaaactgcatgcctgcactgaagaaggacagctggagaaccaggtaattgcatttgaatgggatgagatgcagcgatgggacacagatgaagaagggatggccttctgtttcgaatatgcacgaggagagaagaagccccgatgggttaaaatcttcacgccatatttcaattacatgcatgagtgcttcgagagggtgttctgcgagctcaagtggagaaaagaggaatattagttagagactgattatctcatgtgagccaggacattcttccagcaaggttggcctctggatggtgaacgggctgtgcaaaaaagccctgcttcttcccttgtctagagggtggacattggctacaggctcttccatctctcatgacttcatggaccctcctctgccagttttttaaatcagatcaccctccatgttgttcctgacccacaggggaagctgtcctcagttgtagccgtcttgactggatgagtcctggcagtctttctaggcgaaccaagaatgtttgtgtgagggaaggtgtttgctgttgctttactgctgtctgtatgtgccagtgctggaacagaatttggaagattctgaataattagttacttattctcaaagaaaatctttgaaagaatcaggaggtcaagtcaagaacatgaaaatttatattttagtacagtagaaagaacattgggctctgggaattttatctgggttttctcctggcttttttttccctctgtgtaattttgggtaaatcagcctccctagctttcagttttctcttctgtgaaacaggaagactgaaccacgtaattaatatccaaggtcccttccggctctattgagtcatccaggcatacctttttagcttctgtttgtggagttgtctccagataagaggagatgtgccttcccaataactctttttttttttcctttcagaacattttccagatggcgaggtcacagcagagagatgtggccacctagcctttccttatccccttcccttcccttcacccccatcctcttactcctttcatgtcccatttcagacagagtaaccattaacaaaaaagaagagaaaaagttaaagtcgttatattcaaaagccctaaactaaatattattaataaccccctctgaatttcatgtctctggaattgaggtggtagtgaacagcagatcggtcagcaccagaagtcaactgagttaaggcaggaaaagaaataagcccaaccaacttgccaaaggtatctttgtcctttcacctgggcctcataccaacagcctctccttgtactatatttttaaaactggaactatgaacttcatccatttgcactgttcagacatatatatgtatgtatgtaaaaattatatatacacaaattagctgcacgtatatacatatatatatttctttttaaatttcatattgatggcagtaccttttttagcttgtgtttttacacacctttcactagaatccatgacctccctcgtgctctctttcttttgaaacaaactttaaaaaggaaaaaaaagcattttacagggaaaaatacctctcctcatgaaggacttgaaaagtttacaacctgcttggatttttgcccctttttttgtattgagtatagattccggctcatgggttgccatagagtctaggaacaaggagtatagtttctttatcttccaagagggtgctggggaggagaaagaggtgtgtttctcaaggttaacaggctgtagttctgcagggagagcctgaagtcctggtatgggctcttgattctgtgacaatttttttgatccatctatttctctcactcctggctttctagccacattctgcacctccttcctgctttcctagagcctcggtatgctttccctcaaccgaccctggctcaggaggttgatgccatgggaacctgaacctgaaacacttcatggtagtaatttcctgttttccttgcctttttttttttttttttttttttttttctgagacagggtcttactctgtcgcccagactggaatgtggtggcatgaacatagctcactgttaccttgaattctgggctcaggtgatccttccgcctcaccctcctgagtagctgggactacaggtgtgcaccaccacacctggctaattcttcttaaaatttttttgtagagacagggtctcactatgttgcccaggctggtctcaaactcctggcctcaggtgatcctcttgtctcagcctcccaaagtgctgggattacaggcatgagccactgtgtccttccctgccttttttgcagcagggatagtactcaggaccagagttaagctgataccttaggcacacaggttggacttacatagaggaaagaaagcaagaaatgccctatgtacatgaggttttacctcctccattcctgaccaataaccacccataactacggcattctctgtgacttccttaaacagcagtgatgggaagggatccaatagtatcttcaaggccttggggaaacttgcagtgggtcagtggtctgtgccaaccaaacgatagccccatccaagccagctgagaacctaggaaggagtagtaggaatatggttgattagattggatctcccaagttttaattgaaaggagactgaacgaaaacctttctgctttctgtccgttaaagagctcctcatctgatcttgcagctagaccctttgagacttaagagctgcatcccaggatcagaagccagggctaattggggtaggacaatattcccagcccctaagctctgtagataatgcataagaagcaccaagtcaggctcagatgcaactaaaacacatctttgagccttttctttttcccttctcccctttctaaacaaaaaccttcctaggatggcatcttttgctctaactgggagacagtcataattggttgtagtcaattctactaagcagtgttggggtggttggaaagtctcttttttgtaatttgtttttgcaaatcattgtgaggccactttttctttctttctttctttctttctttctttctttcgttctttcgttctttcgttctttctttctttctttctttctctttctttcttttgctttccttctttcatctcttttttgtaatttgttgttgcaaatcattgtgaggccacttttctttccccttccttccttcctttttttctgttttttttttttttttttcccagagtcttgctctgtcgcccaggttggagtgcagtggcacgatctcggctcactgcaccctctgcctcttgggttcaagcgattctcctgcctcagcctcccaagtagctgggattacaggcatacaccaccacgccccactaattttttgtatttttggtagggcggggtttcaccatgatggccaggttggttttgaactcctgacctcaagtaatctgcccacctcggcctcccaaagtgctaggattacaggagtgagccactgcgcctggcccacttttctttctttccttcttattttgttatgctggcagccatttgcccctgcatggtatgggatcaaagaggacagcctttcctccctcaccttctccaaatctaggtgaaatcacagagtacaaaacgtgagaatgctgaatgtgtaaagttgcagagggatccctaatttgaagactttgacacagaactaacttcttttgacttaaatgaatttaaaatgagccaaaggaccctgaaaagaagacatgttgatttcccactcctagatgctaaagagacttggcaccagctttgttcaaactgtaaaaatagcaatttgcccctactcgctcagagtgggacagtagtgaacagagctgggattccatgcgacagcttgaatgctgaccttcagacatgagacatagggatttggaggccccttagaatgggtagatggtgttatgttccctttctggcatagcattcacttggtgctttggagattaggtgagggccctataggtagttggcctgttggcagaatttatttaggaacagcccttttgaaagtgtcccagtaacaaagcacccagctgcagcaaggaggtggggaaggagggcaccccaaaggacagcgccttcttctcttccacccatgcacggccttgggtgatggaggcgggttccctgtggctgcgtggatcccataggatcaagcccttctttgcatgaagcagtgttgtgactcttctctctccccttcctctgcacttcctttctgtaatccctactgttcttcttagtcccagcttctgcccagggaggcttctacccagacttcttttgcaatttgtccctgggaagagggggtctcccagtgcccccagcttcatcccagcagaaccagcaggatcctcctggtctctcactggccttcctccacacttggtttctatcctcaggggtagaagctcagagctttttatggcccaggagaaaatgtagaccctgagaaacctgtccctgcagaaaggttcccttgggccatgctttgggccctctgctctttatatgtttattctattctccatttttccaccccgtccttaccctaggcctaaacacaggtacagatatgtgcatgctcagggcagctcctaggcctggactgagctctcaggggggaattagataaatattccaacatcctcatgcctggcccatttagtttcatcctttagttacccaggccagtagctttgggttatcccttcctgtagctccaaacccagcacttggagcagcaaaatagggcactgacaggagatgaaactctctcctatctcagaatttgccaacttctgggctgggctcctaggaggtagttttcttgaaggggactgcatcctagttgacctgaattttccagaccaggagggactgctgtgctctcccttctcgccatcatactgtttggctagattcattcagcagtagaagctgtttgatctgttgaccccagcatactgctgtttcttcaccagcttcattgtgtcacagtagcttcctttgggaggatgatgtgatagaacactcagagagagggagggagaagagagatagtgggtatgcttctctagctccccatcttccaggtccacctcttgacttcctgttcccctaaacctgagcacatcacgccaggcctctttgctgccaggacagcatcagctcactcctcagcaataatctagggtatgtgggaaggtcagggctgtggtaaggaatagaatcaaagaggggagtgatacggggtgggggcacttggccgcctgctaaacttggacattaattttatatcatgacccccttttaagccagtgagctgggcttcagtttttcccaggccatgcacatttaatttatttcagagaaactctaattgtattttcactgcagtatcttgtattttttatttgtgatttaagaaatgtgaagagaaaatacacagacacaataatggctaacattgtttctttcattccttgttctagagctaaccactctaaaattgtttggtaatgtcacttagtgtaattaattgtaacatattcttttaaataaattgatttattgatcaaaca

SEQ ID NO: 371119 - DNA, 7432 bp, Homo sapiens
cagcagctcggtggccgagtcggtcccgcggccggcggatcgggcgcgcgcgtcgggggtcgtccggctgccaggcagggcgagcacgcgccggggtgcgcaagggggaccgcatcctggaggtgtgagtatcggggctacccgccgccccatcctccccgcgcctccatgcccctgcatgtccttcgctacccttgtcatcccccatagccgtagcgtcccctcgatgctcctgacgtccggctcgcctgctcgcaagatggcggacgaggacggggaagggattcatccctcagcccctcacaggaacggaggtggcggcggcggcggggggtctgggctccactgcgccgggaacggcggcgggggaggcggcggcccgcgggtcgtgcgcatcgtcaagtccgagtccggctacggcttcaacgtgcggggccaagtgagcgagggcgggcaactgcggagcatcaacggggagctgtacgcgccgctgcagcatgtgagcgccgtgctgcccgggggggcggccgatcgggccggggtgcgcaagggggaccgcatcctggaggtgaaccacgtgaatgttgagggggcgacacacaagcaggtggtggacctgattcgagcaggcgagaaggaattgatcttgacagtgttatctgtacctcctcatgaggcagataacctagatcccagtgacgactcgttgggacaatcattttatgattacacagaaaagcaagcagtgcccatatcggtccccagatacaaacatgtggagcagaatggtgagaagtttgtggtatataatgtttacatggcagggaggcagctgtgttctaagcggtaccgggagtttgctatcctacaccagaacctgaagagagagtttgccaactttacatttcctcgactcccagggaagtggccattttcattatcagaacaacaattagatgcccgacgtcggggattggaagaatatctagaaaaagtgtgttcaatacgagtaattggtgagagtgacatcatgcaggaattcctatcagaatccgatgagaactacaatggtgtgtccgacgtagagctgagagtagcattaccagatggaacaacggttacagtcagggttaaaaagaacagtactacagaccaagtatatcaggctatcgcagcaaaggttggcatggacagtacgacagtgaattactttgccttatttgaagtgatcagtcactcctttgtacgtaaattggcacctaatgagtttcctcacaaactctacattcagaattatacatcagctgtgccaggcacctgcttgaccattcgaaagtggctttttacaacagaagaagaaattctcttaaatgacaatgaccttgctgttacctacttctttcatcaggcagtcgatgatgtgaagaaaggttacatcaaagcagaagaaaagtcctatcaattacagaagctatacgaacaaagaaaaatggtcatgtacctcaacatgctaaggacttgtgagggctacaatgaaatcatctttccccactgtgcctgtgactccaggaggaaggggcacgttatcacagccatcagcatcacgcactttaaactgcatgcctgcactgaagaaggacagctggagaaccaggtaattgcatttgaatgggatgagatgcagcgatgggacacagatgaagaagggatggccttctgtttcgaatatgcacgaggagagaagaagccccgatgggttaaaatcttcacgccatatttcaattacatgcatgagtgcttcgagagggtgttctgcgagctcaagtggagaaaagaggtaattctgaacagtccttgaattgaccttttcatctttttgtttctttaaaatttataggcctgtggccaaatacctgggaccctcacctccatctctgtctttctaggaatagaatattagttagagactgattatctcatgtgagccaggacattcttccagcaaggttggcctctggatggtgaacgggctgtgcaaaaaagccctgcttcttcccttgtctagagggtggacattggctacaggctcttccatctctcatgacttcatggaccctcctctgccagttttttaaatcagatcaccctccatgttgttcctgacccacaggggaagctgtcctcagttgtagccgtcttgactggatgagtcctggcagtctttctaggcgaaccaagaatgtttgtgtgagggaaggtgtttgctgttgctttactgctgtctgtatgtgccagtgctggaacagaatttggaagattctgaataattagttacttattctcaaagaaaatctttgaaagaatcaggaggtcaagtcaagaacatgaaaatttatattttagtacagtagaaagaacattgggctctgggaattttatctgggttttctcctggcttttttttccctctgtgtaattttgggtaaatcagcctccctagctttcagttttctcttctgtgaaacaggaagactgaaccacgtaattaatatccaaggtcccttccggctctaaaaggctatgattctagatgagaagttatatcaagaaagatgtggccaatcagattgagtcatccaggcatacctttttagcttctgtttgtggagttgtctccagataagaggagatgtgccttcccaataactctttttttttttcctttcagaacattttccagatggcgaggtcacagcagagagatgtggccacctagcctttccttatccccttcccttcccttcacccccatcctcttactcctttcatgtcccatttcagacagagtaaccattaacaaaaaagaagagaaaaagttaaagtcgttatattcaaaagccctaaactaaatattattaataaccccctctgaatttcatgtctctggaattgaggtggtagtgaacagcagatcggtcagcaccagaagtcaactgagttaaggcaggaaaagaaataagcccaaccaacttgccaaaggtatctttgtcctttcacctgggcctcataccaacagcctctccttgtactatatttttaaaactggaactatgaacttcatccatttgcactgttcagacatatatatgtatgtatgtaaaaattatatatacacaaattagctgcacgtatatacatatatatatttctttttaaatttcatattgatggcagtaccttttttagcttgtgtttttacacacctttcactagaatccatgacctccctcgtgctctctttcttttgaaacaaactttaaaaaggaaaaaaaagcattttacagggaaaaatacctctcctcatgaaggacttgaaaagtttacaacctgcttggatttttgcccctttttttgtattgagtatagattccggctcatgggttgccatagagtctaggaacaaggagtatagtttctttatcttccaagagggtgctggggaggagaaagaggtgtgtttctcaaggttaacaggctgtagttctgcagggagagcctgaagtcctggtatgggctcttgattctgtgacaatttttttgatccatctatttctctcactcctggctttctagccacattctgcacctccttcctgctttcctagagcctcggtatgctttccctcaaccgaccctggctcaggaggttgatgccatgggaacctgaacctgaaacacttcatggtagtaatttcctgttttccttgcctttttttttttttttttttttttttttctgagacagggtcttactctgtcgcccagactggaatgtggtggcatgaacatagctcactgttaccttgaattctgggctcaggtgatccttccgcctcaccctcctgagtagctgggactacaggtgtgcaccaccacacctggctaattcttcttaaaatttttttgtagagacagggtctcactatgttgcccaggctggtctcaaactcctggcctcaggtgatcctcttgtctcagcctcccaaagtgctgggattacaggcatgagccactgtgtccttccctgccttttttgcagcagggatagtactcaggaccagagttaagctgataccttaggcacacaggttggacttacatagaggaaagaaagcaagaaatgccctatgtacatgaggttttacctcctccattcctgaccaataaccacccataactacggcattctctgtgacttccttaaacagcagtgatgggaagggatccaatagtatcttcaaggccttggggaaacttgcagtgggtcagtggtctgtgccaaccaaacgatagccccatccaagccagctgagaacctaggaaggagtagtaggaatatggttgattagattggatctcccaagttttaattgaaaggagactgaacgaaaacctttctgctttctgtccgttaaagagctcctcatctgatcttgcagctagaccctttgagacttaagagctgcatcccaggatcagaagccagggctaattggggtaggacaatattcccagcccctaagctctgtagataatgcataagaagcaccaagtcaggctcagatgcaactaaaacacatctttgagccttttctttttcccttctcccctttctaaacaaaaaccttcctaggatggcatcttttgctctaactgggagacagtcataattggttgtagtcaattctactaagcagtgttggggtggttggaaagtctcttttttgtaatttgtttttgcaaatcattgtgaggccactttttctttctttctttctttctttctttctttctttcgttctttcgttctttcgttctttctttctttctttctttctctttctttcttttgctttccttctttcatctcttttttgtaatttgttgttgcaaatcattgtgaggccacttttctttccccttccttccttcctttttttctgttttttttttttttttttcccagagtcttgctctgtcgcccaggttggagtgcagtggcacgatctcggctcactgcaccctctgcctcttgggttcaagcgattctcctgcctcagcctcccaagtagctgggattacaggcatacaccaccacgccccactaattttttgtatttttggtagggcggggtttcaccatgatggccaggttggttttgaactcctgacctcaagtaatctgcccacctcggcctcccaaagtgctaggattacaggagtgagccactgcgcctggcccacttttctttctttccttcttattttgttatgctggcagccatttgcccctgcatggtatgggatcaaagaggacagcctttcctccctcaccttctccaaatctaggtgaaatcacagagtacaaaacgtgagaatgctgaatgtgtaaagttgcagagggatccctaatttgaagactttgacacagaactaacttcttttgacttaaatgaatttaaaatgagccaaaggaccctgaaaagaagacatgttgatttcccactcctagatgctaaagagacttggcaccagctttgttcaaactgtaaaaatagcaatttgcccctactcgctcagagtgggacagtagtgaacagagctgggattccatgcgacagcttgaatgctgaccttcagacatgagacatagggatttggaggccccttagaatgggtagatggtgttatgttccctttctggcatagcattcacttggtgctttggagattaggtgagggccctataggtagttggcctgttggcagaatttatttaggaacagcccttttgaaagtgtcccagtaacaaagcacccagctgcagcaaggaggtggggaaggagggcaccccaaaggacagcgccttcttctcttccacccatgcacggccttgggtgatggaggcgggttccctgtggctgcgtggatcccataggatcaagcccttctttgcatgaagcagtgttgtgactcttctctctccccttcctctgcacttcctttctgtaatccctactgttcttcttagtcccagcttctgcccagggaggcttctacccagacttcttttgcaatttgtccctgggaagagggggtctcccagtgcccccagcttcatcccagcagaaccagcaggatcctcctggtctctcactggccttcctccacacttggtttctatcctcaggggtagaagctcagagctttttatggcccaggagaaaatgtagaccctgagaaacctgtccctgcagaaaggttcccttgggccatgctttgggccctctgctctttatatgtttattctattctccatttttccaccccgtccttaccctaggcctaaacacaggtacagatatgtgcatgctcagggcagctcctaggcctggactgagctctcaggggggaattagataaatattccaacatcctcatgcctggcccatttagtttcatcctttagttacccaggccagtagctttgggttatcccttcctgtagctccaaacccagcacttggagcagcaaaatagggcactgacaggagatgaaactctctcctatctcagaatttgccaacttctgggctgggctcctaggaggtagttttcttgaaggggactgcatcctagttgacctgaattttccagaccaggagggactgctgtgctctcccttctcgccatcatactgtttggctagattcattcagcagtagaagctgtttgatctgttgaccccagcatactgctgtttcttcaccagcttcattgtgtcacagtagcttcctttgggaggatgatgtgatagaacactcagagagagggagggagaagagagatagtgggtatgcttctctagctccccatcttccaggtccacctcttgacttcctgttcccctaaacctgagcacatcacgccaggcctctttgctgccaggacagcatcagctcactcctcagcaataatctagggtatgtgggaaggtcagggctgtggtaaggaatagaatcaaagaggggagtgatacggggtgggggcacttggccgcctgctaaacttggacattaattttatatcatgacccccttttaagccagtgagctgggcttcagtttttcccaggccatgcacatttaatttatttcagagaaactctaattgtattttcactgcagtatcttgtattttttatttgtgatttaagaaatgtgaagagaaaatacacagacacaataatggctaacattgtttctttcattccttgttctagagctaaccactctaaaattgtttggtaatgtcacttagtgtaattaattgtaacatattcttttaaataaattgatttattgatcaaaca

SEQ ID NO: 371120 - DNA, 6541 bp, Homo sapiens
cagcagctcggtggccgagtcggtcccgcggccggcggatcgggcgcgcgcgtcgggggtcgtccggctgccaggcagggcgagcacgcgccggggtgcgcaagggggaccgcatcctggaggtgtgagtatcggggctacccgccgccccatcctccccgcgcctccatgcccctgcatgtccttcgctacccttgtcatcccccatagccgtagcgtcccctcgatgctcctgacgtccggctcgcctgctcgcaagatggcggacgaggacggggaagggattcatccctcagcccctcacaggaacggaggtggcggcggcggcggggggtctgggctccactgcgccgggaacggcggcgggggaggcggcggcccgcgggtcgtgcgcatcgtcaagtccgagtccggctacggcttcaacgtgcggggccaagtgagcgagggcgggcaactgcggagcatcaacggggagctgtacgcgccgctgcagcatgtgagcgccgtgctgcccgggggggcggccgatcgggccggggtgcgcaagggggaccgcatcctggaggtgaaccacgtgaatgttgagggggcgacacacaagcaggtggtggacctgattcgagcaggcgagaaggaattgatcttgacagtgttatctgtacctcctcatgaggcagataacctagatcccagtgacgactcgttgggacaatcattttatgattacacagaaaagcaagcagtgcccatatcggtccccagatacaaacatgtggagcagaatggtgagaagtttgtggtatataatgtttacatggcagggaggcagctgtgttctaagcggtaccgggagtttgctatcctacaccagaacctgaagagagagtttgccaactttacatttcctcgactcccagggaagtggccattttcattatcagaacaacaattagatgcccgacgtcggggattggaagaatatctagaaaaagtgtgttcaatacgagtaattggtgagagtgacatcatgcaggaattcctatcagaatccgatgagaactacaatggtgtgtccgacgtagagctgagagtagcattaccagatggaacaacggttacagtcagggttaaaaagaacagtactacagaccaagtatatcaggctatcgcagcaaaggttggcatggacagtacgacagtgaattactttgccttatttgaagtgatcagtcactcctttgtacgtaaattggcacctaatgagtttcctcacaaactctacattcagaattatacatcagctgtgccaggcacctgcttgaccattcgaaagtggctttttacaacagaagaagaaattctcttaaatgacaatgaccttgctgttacctacttctttcatcaggcagtcgatgatgtgaagaaaggttacatcaaagcagaagaaaagtcctatcaattacagaagctatacgaacaaagaaaaatggtcatgtacctcaacatgctaaggacttgtgagggctacaatgaaatcatctttccccactgtgcctgtgactccaggaggaaggggcacgttatcacagccatcagcatcacgcactttaaactgcatgcctgcactgaagaaggacagctggagaaccaggtaattgcatttgaatgggatgagatgcagcgatgggacacagatgaagaagggatggccttctgtttcgaatatgcacgaggagagaagaagccccgatgggttaaaatcttcacgccatatttcaattacatgcatgagtgcttcgagagggtgttctgcgagctcaagtggagaaaagagaacattttccagatggcgaggtcacagcagagagatgtggccacctagcctttccttatccccttcccttcccttcacccccatcctcttactcctttcatgtcccatttcagacagagtaaccattaacaaaaaagaagagaaaaagttaaagtcgttatattcaaaagccctaaactaaatattattaataaccccctctgaatttcatgtctctggaattgaggtggtagtgaacagcagatcggtcagcaccagaagtcaactgagttaaggcaggaaaagaaataagcccaaccaacttgccaaaggtatctttgtcctttcacctgggcctcataccaacagcctctccttgtactatatttttaaaactggaactatgaacttcatccatttgcactgttcagacatatatatgtatgtatgtaaaaattatatatacacaaattagctgcacgtatatacatatatatatttctttttaaatttcatattgatggcagtaccttttttagcttgtgtttttacacacctttcactagaatccatgacctccctcgtgctctctttcttttgaaacaaactttaaaaaggaaaaaaaagcattttacagggaaaaatacctctcctcatgaaggacttgaaaagtttacaacctgcttggatttttgcccctttttttgtattgagtatagattccggctcatgggttgccatagagtctaggaacaaggagtatagtttctttatcttccaagagggtgctggggaggagaaagaggtgtgtttctcaaggttaacaggctgtagttctgcagggagagcctgaagtcctggtatgggctcttgattctgtgacaatttttttgatccatctatttctctcactcctggctttctagccacattctgcacctccttcctgctttcctagagcctcggtatgctttccctcaaccgaccctggctcaggaggttgatgccatgggaacctgaacctgaaacacttcatggtagtaatttcctgttttccttgcctttttttttttttttttttttttttttctgagacagggtcttactctgtcgcccagactggaatgtggtggcatgaacatagctcactgttaccttgaattctgggctcaggtgatccttccgcctcaccctcctgagtagctgggactacaggtgtgcaccaccacacctggctaattcttcttaaaatttttttgtagagacagggtctcactatgttgcccaggctggtctcaaactcctggcctcaggtgatcctcttgtctcagcctcccaaagtgctgggattacaggcatgagccactgtgtccttccctgccttttttgcagcagggatagtactcaggaccagagttaagctgataccttaggcacacaggttggacttacatagaggaaagaaagcaagaaatgccctatgtacatgaggttttacctcctccattcctgaccaataaccacccataactacggcattctctgtgacttccttaaacagcagtgatgggaagggatccaatagtatcttcaaggccttggggaaacttgcagtgggtcagtggtctgtgccaaccaaacgatagccccatccaagccagctgagaacctaggaaggagtagtaggaatatggttgattagattggatctcccaagttttaattgaaaggagactgaacgaaaacctttctgctttctgtccgttaaagagctcctcatctgatcttgcagctagaccctttgagacttaagagctgcatcccaggatcagaagccagggctaattggggtaggacaatattcccagcccctaagctctgtagataatgcataagaagcaccaagtcaggctcagatgcaactaaaacacatctttgagccttttctttttcccttctcccctttctaaacaaaaaccttcctaggatggcatcttttgctctaactgggagacagtcataattggttgtagtcaattctactaagcagtgttggggtggttggaaagtctcttttttgtaatttgtttttgcaaatcattgtgaggccactttttctttctttctttctttctttctttctttctttcgttctttcgttctttcgttctttctttctttctttctttctctttctttcttttgctttccttctttcatctcttttttgtaatttgttgttgcaaatcattgtgaggccacttttctttccccttccttccttcctttttttctgttttttttttttttttttcccagagtcttgctctgtcgcccaggttggagtgcagtggcacgatctcggctcactgcaccctctgcctcttgggttcaagcgattctcctgcctcagcctcccaagtagctgggattacaggcatacaccaccacgccccactaattttttgtatttttggtagggcggggtttcaccatgatggccaggttggttttgaactcctgacctcaagtaatctgcccacctcggcctcccaaagtgctaggattacaggagtgagccactgcgcctggcccacttttctttctttccttcttattttgttatgctggcagccatttgcccctgcatggtatgggatcaaagaggacagcctttcctccctcaccttctccaaatctaggtgaaatcacagagtacaaaacgtgagaatgctgaatgtgtaaagttgcagagggatccctaatttgaagactttgacacagaactaacttcttttgacttaaatgaatttaaaatgagccaaaggaccctgaaaagaagacatgttgatttcccactcctagatgctaaagagacttggcaccagctttgttcaaactgtaaaaatagcaatttgcccctactcgctcagagtgggacagtagtgaacagagctgggattccatgcgacagcttgaatgctgaccttcagacatgagacatagggatttggaggccccttagaatgggtagatggtgttatgttccctttctggcatagcattcacttggtgctttggagattaggtgagggccctataggtagttggcctgttggcagaatttatttaggaacagcccttttgaaagtgtcccagtaacaaagcacccagctgcagcaaggaggtggggaaggagggcaccccaaaggacagcgccttcttctcttccacccatgcacggccttgggtgatggaggcgggttccctgtggctgcgtggatcccataggatcaagcccttctttgcatgaagcagtgttgtgactcttctctctccccttcctctgcacttcctttctgtaatccctactgttcttcttagtcccagcttctgcccagggaggcttctacccagacttcttttgcaatttgtccctgggaagagggggtctcccagtgcccccagcttcatcccagcagaaccagcaggatcctcctggtctctcactggccttcctccacacttggtttctatcctcaggggtagaagctcagagctttttatggcccaggagaaaatgtagaccctgagaaacctgtccctgcagaaaggttcccttgggccatgctttgggccctctgctctttatatgtttattctattctccatttttccaccccgtccttaccctaggcctaaacacaggtacagatatgtgcatgctcagggcagctcctaggcctggactgagctctcaggggggaattagataaatattccaacatcctcatgcctggcccatttagtttcatcctttagttacccaggccagtagctttgggttatcccttcctgtagctccaaacccagcacttggagcagcaaaatagggcactgacaggagatgaaactctctcctatctcagaatttgccaacttctgggctgggctcctaggaggtagttttcttgaaggggactgcatcctagttgacctgaattttccagaccaggagggactgctgtgctctcccttctcgccatcatactgtttggctagattcattcagcagtagaagctgtttgatctgttgaccccagcatactgctgtttcttcaccagcttcattgtgtcacagtagcttcctttgggaggatgatgtgatagaacactcagagagagggagggagaagagagatagtgggtatgcttctctagctccccatcttccaggtccacctcttgacttcctgttcccctaaacctgagcacatcacgccaggcctctttgctgccaggacagcatcagctcactcctcagcaataatctagggtatgtgggaaggtcagggctgtggtaaggaatagaatcaaagaggggagtgatacggggtgggggcacttggccgcctgctaaacttggacattaattttatatcatgacccccttttaagccagtgagctgggcttcagtttttcccaggccatgcacatttaatttatttcagagaaactctaattgtattttcactgcagtatcttgtattttttatttgtgatttaagaaatgtgaagagaaaatacacagacacaataatggctaacattgtttctttcattccttgttctagagctaaccactctaaaattgtttggtaatgtcacttagtgtaattaattgtaacatattcttttaaataaattgatttattgatcaaaca

SEQ ID NO: 371121 - DNA, 6373 bp, Homo sapiens
cagcagctcggtggccgagtcggtcccgcggccggcggatcgggcgcgcgcgtcgggggtcgtccggctgccaggcagggcgagcacgcgccgggaggccttggaggcgtagggggcgggggtacggctcgcctgctcgcaagatggcggacgaggacggggaagggattcatccctcagcccctcacaggaacggaggtggcggcggcggcggggggtctgggctccactgcgccgggaacggcggcgggggaggcggcggcccgcgggtcgtgcgcatcgtcaagtccgagtccggctacggcttcaacgtgcggggccaagaaccacgtgaatgttgagggggcgacacacaagcaggtggtggacctgattcgagcaggcgagaaggaattgatcttgacagtgttatctgtacctcctcatgaggcagataacctagatcccagtgacgactcgttgggacaatcattttatgattacacagaaaagcaagcagtgcccatatcggtccccagatacaaacatgtggagcagaatggtgagaagtttgtggtatataatgtttacatggcagggaggcagctgtgttctaagcggtaccgggagtttgctatcctacaccagaacctgaagagagagtttgccaactttacatttcctcgactcccagggaagtggccattttcattatcagaacaacaattagatgcccgacgtcggggattggaagaatatctagaaaaagtgtgttcaatacgagtaattggtgagagtgacatcatgcaggaattcctatcagaatccgatgagaactacaatggtgtgtccgacgtagagctgagagtagcattaccagatggaacaacggttacagtcagggttaaaaagaacagtactacagaccaagtatatcaggctatcgcagcaaaggttggcatggacagtacgacagtgaattactttgccttatttgaagtgatcagtcactcctttgtacgtaaattggcacctaatgagtttcctcacaaactctacattcagaattatacatcagctgtgccaggcacctgcttgaccattcgaaagtggctttttacaacagaagaagaaattctcttaaatgacaatgaccttgctgttacctacttctttcatcaggcagtcgatgatgtgaagaaaggttacatcaaagcagaagaaaagtcctatcaattacagaagctatacgaacaaagaaaaatggtcatgtacctcaacatgctaaggacttgtgagggctacaatgaaatcatctttccccactgtgcctgtgactccaggaggaaggggcacgttatcacagccatcagcatcacgcactttaaactgcatgcctgcactgaagaaggacagctggagaaccaggtaattgcatttgaatgggatgagatgcagcgatgggacacagatgaagaagggatggccttctgtttcgaatatgcacgaggagagaagaagccccgatgggttaaaatcttcacgccatatttcaattacatgcatgagtgcttcgagagggtgttctgcgagctcaagtggagaaaagaggaatattagttagagactgattatctcatgtgagccaggacattcttccagcaaggttggcctctggatggtgaacgggctgtgcaaaaaagccctgcttcttcccttgtctagagggtggacattggctacaggctcttccatctctcatgacttcatggaccctcctctgccagttttttaaatcagatcaccctccatgttgttcctgacccacaggggaagctgtcctcagttgtagccgtcttgactggatgagtcctggcagtctttctaggcgaaccaagaatgtttgtgtgagggaaggtgtttgctgttgctttactgctgtctgtatgtgccagtgctggaacagaatttggaagattctgaataattagttacttattctcaaagaaaatctttgaaagaatcaggaggtcaagtcaagaacatgaaaatttatattttagtacagtagaaagaacattgggctctgggaattttatctgggttttctcctggcttttttttccctctgtgtaattttgggtaaatcagcctccctagctttcagttttctcttctgtgaaacaggaagactgaaccacgtaattaatatccaaggtcccttccggctctaaaaggctatgattctagatgagaagttatatcaagaaagatgtggccaatcagattgagtcatccaggcatacctttttagcttctgtttgtggagttgtctccagataagaggagatgtgccttcccaataactctttttttttttcctttcagaacattttccagatggcgaggtcacagcagagagatgtggccacctagcctttccttatccccttcccttcccttcacccccatcctcttactcctttcatgtcccatttcagacagagtaaccattaacaaaaaagaagagaaaaagttaaagtcgttatattcaaaagccctaaactaaatattattaataaccccctctgaatttcatgtctctggaattgaggtggtagtgaacagcagatcggtcagcaccagaagtcaactgagttaaggcaggaaaagaaataagcccaaccaacttgccaaaggtatctttgtcctttcacctgggcctcataccaacagcctctccttgtactatatttttaaaactggaactatgaacttcatccatttgcactgttcagacatatatatgtatgtatgtaaaaattatatatacacaaattagctgcacgtatatacatatatatatttctttttaaatttcatattgatggcagtaccttttttagcttgtgtttttacacacctttcactagaatccatgacctccctcgtgctctctttcttttgaaacaaactttaaaaaggaaaaaaaagcattttacagggaaaaatacctctcctcatgaaggacttgaaaagtttacaacctgcttggatttttgcccctttttttgtattgagtatagattccggctcatgggttgccatagagtctaggaacaaggagtatagtttctttatcttccaagagggtgctggggaggagaaagaggtgtgtttctcaaggttaacaggctgtagttctgcagggagagcctgaagtcctggtatgggctcttgattctgtgacaatttttttgatccatctatttctctcactcctggctttctagccacattctgcacctccttcctgctttcctagagcctcggtatgctttccctcaaccgaccctggctcaggaggttgatgccatgggaacctgaacctgaaacacttcatggtagtaatttcctgttttccttgcctttttttttttttttttttttttttttctgagacagggtcttactctgtcgcccagactggaatgtggtggcatgaacatagctcactgttaccttgaattctgggctcaggtgatccttccgcctcaccctcctgagtagctgggactacaggtgtgcaccaccacacctggctaattcttcttaaaatttttttgtagagacagggtctcactatgttgcccaggctggtctcaaactcctggcctcaggtgatcctcttgtctcagcctcccaaagtgctgggattacaggcatgagccactgtgtccttccctgccttttttgcagcagggatagtactcaggaccagagttaagctgataccttaggcacacaggttggacttacatagaggaaagaaagcaagaaatgccctatgtacatgaggttttacctcctccattcctgaccaataaccacccataactacggcattctctgtgacttccttaaacagcagtgatgggaagggatccaatagtatcttcaaggccttggggaaacttgcagtgggtcagtggtctgtgccaaccaaacgatagccccatccaagccagctgagaacctaggaaggagtagtaggaatatggttgattagattggatctcccaagttttaattgaaaggagactgaacgaaaacctttctgctttctgtccgttaaagagctcctcatctgatcttgcagctagaccctttgagacttaagagctgcatcccaggatcagaagccagggctaattggggtaggacaatattcccagcccctaagctctgtagataatgcataagaagcaccaagtcaggctcagatgcaactaaaacacatctttgagccttttctttttcccttctcccctttctaaacaaaaaccttcctaggatggcatcttttgctctaactgggagacagtcataattggttgtagtcaattctactaagcagtgttggggtggttggaaagtctcttttttgtaatttgtttttgcaaatcattgtgaggccactttttctttctttctttctttctttctttctttctttcgttctttcgttctttcgttctttctttctttctttctttctctttctttcttttgctttccttctttcatctcttttttgtaatttgttgttgcaaatcattgtgaggccacttttctttccccttccttccttcctttttttctgttttttttttttttttttcccagagtcttgctctgtcgcccaggttggagtgcagtggcacgatctcggctcactgcaccctctgcctcttgggttcaagcgattctcctgcctcagcctcccaagtagctgggattacaggcatacaccaccacgccccactaattttttgtatttttggtagggcggggtttcaccatgatggccaggttggttttgaactcctgacctcaagtaatctgcccacctcggcctcccaaagtgctaggattacaggagtgagccactgcgcctggcccacttttctttctttccttcttattttgttatgctggcagccatttgcccctgcatggtatgggatcaaagaggacagcctttcctccctcaccttctccaaatctaggtgaaatcacagagtacaaaacgtgagaatgctgaatgtgtaaagttgcagagggatccctaatttgaagactttgacacagaactaacttcttttgacttaaatgaatttaaaatgagccaaaggaccctgaaaagaagacatgttgatttcccactcctagatgctaaagagacttggcaccagctttgttcaaactgtaaaaatagcaatttgcccctactcgctcagagtgggacagtagtgaacagagctgggattccatgcgacagcttgaatgctgaccttcagacatgagacatagggatttggaggccccttagaatgggtagatggtgttatgttccctttctggcatagcattcacttggtgctttggagattaggtgagggccctataggtagttggcctgttggcagaatttatttaggaacagcccttttgaaagtgtcccagtaacaaagcacccagctgcagcaaggaggtggggaaggagggcaccccaaaggacagcgccttcttctcttccacccatgcacggccttgggtgatggaggcgggttccctgtggctgcgtggatcccataggatcaagcccttctttgcatgaagcagtgttgtgactcttctctctccccttcctctgcacttcctttctgtaatccctactgttcttcttagtcccagcttctgcccagggaggcttctacccagacttcttttgcaatttgtccctgggaagagggggtctcccagtgcccccagcttcatcccagcagaaccagcaggatcctcctggtctctcactggccttcctccacacttggtttctatcctcaggggtagaagctcagagctttttatggcccaggagaaaatgtagaccctgagaaacctgtccctgcagaaaggttcccttgggccatgctttgggccctctgctctttatatgtttattctattctccatttttccaccccgtccttaccctaggcctaaacacaggtacagatatgtgcatgctcagggcagctcctaggcctggactgagctctcaggggggaattagataaatattccaacatcctcatgcctggcccatttagtttcatcctttagttacccaggccagtagctttgggttatcccttcctgtagctccaaacccagcacttggagcagcaaaatagggcactgacaggagatgaaactctctcctatctcagaatttgccaacttctgggctgggctcctaggaggtagttttcttgaaggggactgcatcctagttgacctggtctctcactggccttccctcgtgcca

SEQ ID NO: 371122 - DNA, 3132 bp, Homo sapiens
cggcccgagttacttccgcagtctgactcctcaccttccttctttctctttctctttctttcgaaagaaagagaaagaaggaaggagtagtaggaatatggttgattagattggatctcccaagttttaattgaaaggagactgaacgaaaacctttctgctttctgtccgttaaagagctcctcatctgatcttgcagctagaccctttgagacttaagagctgcatcccaggatcagaagccagggctaattggggtaggacaatattcccagcccctaagctctgtagataatgcataagaagcaccaagtcaggctcagatgcaactaaaacacatctttgagccttttctttttcccttctcccctttctaaacaaaaaccttcctaggatggcatcttttgctctaactgggagacagtcataattggttgtagtcaattctactaagcagtgttggggtggttggaaagtctcttttttgtaatttgtttttgcaaatcattgtgaggccactttttctttctttctttctttctttctttctttctttcgttctttcgttctttcgttctttctttctttctttctttctctttctttcttttgctttccttctttcatctcttttttgtaatttgttgttgcaaatcattgtgaggccacttttctttccccttccttccttcctttttttctgttttttttttttttttttcccagagtcttgctctgtcgcccaggttggagtgcagtggcacgatctcggctcactgcaccctctgcctcttgggttcaagcgattctcctgcctcagcctcccaagtagctgggattacaggcatacaccaccacgccccactaattttttgtatttttggtagggcggggtttcaccatgatggccaggttggttttgaactcctgacctcaagtaatctgcccacctcggcctcccaaagtgctaggattacaggagtgagccactgcgcctggcccacttttctttctttccttcttattttgttatgctggcagccatttgcccctgcatggtatgggatcaaagaggacagcctttcctccctcaccttctccaaatctaggtgaaatcacagagtacaaaacgtgagaatgctgaatgtgtaaagttgcagagggatccctaatttgaagactttgacacagaactaacttcttttgacttaaatgaatttaaaatgagccaaaggaccctgaaaagaagacatgttgatttcccactcctagatgctaaagagacttggcaccagctttgttcaaactgtaaaaatagcaatttgcccctactcgctcagagtgggacagtagtgaacagagctgggattccatgcgacagcttgaatgctgaccttcagacatgagacatagggatttggaggccccttagaatgggtagatggtgttatgttccctttctggcatagcattcacttggtgctttggagattaggtgagggccctataggtagttggcctgttggcagaatttatttaggaacagcccttttgaaagtgtcccagtaacaaagcacccagctgcagcaaggaggtggggaaggagggcaccccaaaggacagcgccttcttctcttccacccatgcacggccttgggtgatggaggcgggttccctgtggctgcgtggatcccataggatcaagcccttctttgcatgaagcagtgttgtgactcttctctctccccttcctctgcacttcctttctgtaatccctactgttcttcttagtcccagcttctgcccagggaggcttctacccagacttcttttgcaatttgtccctgggaagagggggtctcccagtgcccccagcttcatcccagcagaaccagcaggatcctcctggtctctcactggccttcctccacacttggtttctatcctcaggggtagaagctcagagctttttatggcccaggagaaaatgtagaccctgagaaacctgtccctgcagaaaggttcccttgggccatgctttgggccctctgctctttatatgtttattctattctccatttttccaccccgtccttaccctaggcctaaacacaggtacagatatgtgcatgctcagggcagctcctaggcctggactgagctctcaggggggaattagataaatattccaacatcctcatgcctggcccatttagtttcatcctttagttacccaggccagtagctttgggttatcccttcctgtagctccaaacccagcacttggagcagcaaaatagggcactgacaggagatgaaactctctcctatctcagaatttgccaacttctgggctgggctcctaggaggtagttttcttgaaggggactgcatcctagttgacctgaattttccagaccaggagggactgctgtgctctcccttctcgccatcatactgtttggctagattcattcagcagtagaagctgtttgatctgttgaccccagcatactgctgtttcttcaccagcttcattgtgtcacagtagcttcctttgggaggatgatgtgatagaacactcagagagagggagggagaagagagatagtgggtatgcttctctagctccccatcttccaggtccacctcttgacttcctgttcccctaaacctgagcacatcacgccaggcctctttgctgccaggacagcatcagctcactcctcagcaataatctagggtatgtgggaaggtcagggctgtggtaaggaatagaatcaaagaggggagtgatacggggtgggggcacttggccgcctgctaaacttggacattaattttatatcatgacccccttttaagccagtgagctgggcttcagtttttcccaggccatgcacatttaatttatttcagagaaactctaattgtattttcactgcagtatcttgtattttttatttgtgatttaagaaatgtgaagagaaaatacacagacacaataatggctaacattgtttctttcattccttgttctagagctaaccactctaaaattgtttggtaatgtcacttagtgtaattaattgtaacatattcttttaaataaattgatttattgatcaaaca

SEQ ID NO: 371123 - DNA, 6010 bp, Homo sapiens
cagcagctcggtggccgagtcggtcccgcggccggcggatcgggcgcgcgcgtcgggggtcgtccggctgccaggcagggcgagcacgcgccgggaggccttggaggcgtagggggcgggggtacggctcgcctgctcgcaagatggcggacgaggacggggaagggattcatccctcagcccctcacaggaacggaggtggcggcggcggcggggggtctgggctccactgcgccgggaacggcggcgggggaggcggcggcccgcgggtcgtgcgcatcgtcaagtccgagtccggctacggcttcaacgtgcggggccaagaaccacgtgaatgttgagggggcgacacacaagcaggtggtggacctgattcgagcaggcgagaaggaattgatcttgacagtgttatctgtacctcctcatgaggcagataacctagatcccagtgacgactcgttgggacaatcattttatgattacacagaaaagcaagcagtgcccatatcggtccccagatacaaacatgtggagcagaatggtgagaagtttgtggtatataatgtttacatggcagggaggcagctgtgttctaagcggtaccgggagtttgctatcctacaccagaacctgaagagagagtttgccaactttacatttcctcgactcccagggaagtggccattttcattatcagaacaacaattagatgcccgacgtcggggattggaagaatatctagaaaaagtgtgttcaatacgagtaattggtgagagtgacatcatgcaggaattcctatcagaatccgatgagaactacaatggtgtgtccgacgtagagctgagagtagcattaccagatggaacaacggttacagtcagggttaaaaagaacagtactacagaccaagtatatcaggctatcgcagcaaaggttggcatggacagtacgacagtgaattactttgccttatttgaagtgatcagtcactcctttgtacgtaaattggcacctaatgagtttcctcacaaactctacattcagaattatacatcagctgtgccaggcacctgcttgaccattcgaaagtggctttttacaacagaagaagaaattctcttaaatgacaatgaccttgctgttacctacttctttcatcaggcagtcgatgatgtgaagaaaggttacatcaaagcagaagaaaagtcctatcaattacagaagctatacgaacaaagaaaaatggtcatgtacctcaacatgctaaggacttgtgagggctacaatgaaatcatctttccccactgtgcctgtgactccaggaggaaggggcacgttatcacagccatcagcatcacgcactttaaactgcatgcctgcactgaagaaggacagctggagaaccaggtaattgcatttgaatgggatgagatgcagcgatgggacacagatgaagaagggatggccttctgtttcgaatatgcacgaggagagaagaagccccgatgggttaaaatcttcacgccatatttcaattacatgcatgagtgcttcgagagggtgttctgcgagctcaagtggagaaaagaggaatattagttagagactgattatctcatgtgagccaggacattcttccagcaaggttggcctctggatggtgaacgggctgtgcaaaaaagccctgcttcttcccttgtctagagggtggacattggctacaggctcttccatctctcatgacttcatggaccctcctctgccagttttttaaatcagatcaccctccatgttgttcctgacccacaggggaagctgtcctcagttgtagccgtcttgactggatgagtcctggcagtctttctaggcgaaccaagaatgtttgtgtgagggaaggtgtttgctgttgctttactgctgtctgtatgtgccagtgctggaacagaatttggaagattctgaataattagttacttattctcaaagaaaatctttgaaagaatcaggaggtcaagtcaagaacatgaaaatttatattttagtacagtagaaagaacattgggctctgggaattttatctgggttttctcctggcttttttttccctctgtgtaattttgggtaaatcagcctccctagctttcagttttctcttctgtgaaacaggaagactgaaccacgtaattaatatccaaggtcccttccggctctaaaaggctatgattctagatgagaagttatatcaagaaagatgtggccaatcagattgagtcatccaggcatacctttttagcttctgtttgtggagttgtctccagataagaggagatgtgccttcccaataactctttttttttttcctttcagaacattttccagatggcgaggtcacagcagagagatgtggccacctagcctttccttatccccttcccttcccttcacccccatcctcttactcctttcatgtcccatttcagacagagtaaccattaacaaaaaagaagagaaaaagttaaagtcgttatattcaaaagccctaaactaaatattattaataaccccctctgaatttcatgtctctggaattgaggtggtagtgaacagcagatcggtcagcaccagaagtcaactgagttaaggcaggaaaagaaataagcccaaccaacttgccaaaggtatctttgtcctttcacctgggcctcataccaacagcctctccttgtactatatttttaaaactggaactatgaacttcatccatttgcactgttcagacatatatatgtatgtatgtaaaaattatatatacacaaattagctgcacgtatatacatatatatatttctttttaaatttcatattgatggcagtaccttttttagcttgtgtttttacacacctttcactagaatccatgacctccctcgtgctctctttcttttgaaacaaactttaaaaaggaaaaaaaagcattttacagggaaaaatacctctcctcatgaaggacttgaaaagtttacaacctgcttggatttttgcccctttttttgtattgagtatagattccggctcatgggttgccatagagtctaggaacaaggagtatagtttctttatcttccaagagggtgctggggaggagaaagaggtgtgtttctcaaggttaacaggctgtagttctgcagggagagcctgaagtcctggtatgggctcttgattctgtgacaatttttttgatccatctatttctctcactcctggctttctagccacattctgcacctccttcctgctttcctagagcctcggtatgctttccctcaaccgaccctggctcaggaggttgatgccatgggaacctgaacctgaaacacttcatggtagtaatttcctgttttccttgcctttttttttttttttttttttttttttctgagacagggtcttactctgtcgcccagactggaatgtggtggcatgaacatagctcactgttaccttgaattctgggctcaggtgatccttccgcctcaccctcctgagtagctgggactacaggtgtgcaccaccacacctggctaattcttcttaaaatttttttgtagagacagggtctcactatgttgcccaggctggtctcaaactcctggcctcaggtgatcctcttgtctcagcctcccaaagtgctgggattacaggcatgagccactgtgtccttccctgccttttttgcagcagggatagtactcaggaccagagttaagctgataccttaggcacacaggttggacttacatagaggaaagaaagcaagaaatgccctatgtacatgaggttttacctcctccattcctgaccaataaccacccataactacggcattctctgtgacttccttaaacagcagtgatgggaagggatccaatagtatcttcaaggccttggggaaacttgcagtgggtcagtggtctgtgccaaccaaacgatagccccatccaagccagctgagaacctaggaaggagtagtaggaatatggttgattagattggatctcccaagttttaattgaaaggagactgaacgaaaacctttctgctttctgtccgttaaagagctcctcatctgatcttgcagctagaccctttgagacttaagagctgcatcccaggatcagaagccagggctaattggggtaggacaatattcccagcccctaagctctgtagataatgcataagaagcaccaagtcaggctcagatgcaactaaaacacatctttgagccttttctttttcccttctcccctttctaaacaaaaaccttcctaggatggcatcttttgctctaactgggagacagtcataattggttgtagtcaattctactaagcagtgttggggtggttggaaagtctcttttttgtaatttgtttttgcaaatcattgtgaggccactttttctttctttctttctttctttctttctttctttcgttctttcgttctttcgttctttctttctttctttctttctctttctttcttttgctttccttctttcatctcttttttgtaatttgttgttgcaaatcattgtgaggccacttttctttccccttccttccttcctttttttctgttttttttttttttttttcccagagtcttgctctgtcgcccaggttggagtgcagtggcacgatctcggctcactgcaccctctgcctcttgggttcaagcgattctcctgcctcagcctcccaagtagctgggattacaggcatacaccaccacgccccactaattttttgtatttttggtagggcggggtttcaccatgatggccaggttggttttgaactcctgacctcaagtaatctgcccacctcggcctcccaaagtgctaggattacaggagtgagccactgcgcctggcccacttttctttctttccttcttattttgttatgctggcagccatttgcccctgcatggtatgggatcaaagaggacagcctttcctccctcaccttctccaaatctaggtgaaatcacagagtacaaaacgtgagaatgctgaatgtgtaaagttgcagagggatccctaatttgaagactttgacacagaactaacttcttttgacttaaatgaatttaaaatgagccaaaggaccctgaaaagaagacatgttgatttcccactcctagatgctaaagagacttggcaccagctttgttcaaactgtaaaaatagcaatttgcccctactcgctcagagtgggacagtagtgaacagagctgggattccatgcgacagcttgaatgctgaccttcagacatgagacatagggatttggaggccccttagaatgggtagatggtgttatgttccctttctggcatagcattcacttggtgctttggagattaggtgagggccctataggtagttggcctgttggcagaatttatttaggaacagcccttttgaaagtgtcccagtaacaaagcacccagctgcagcaaggaggtggggaaggagggcaccccaaaggacagcgccttcttctcttccacccatgcacggccttgggtgatggaggcgggttccctgtggctgcgtggatcccataggatcaagcccttctttgcatgaagcagtgttgtgactcttctctctccccttcctctgcacttcctttctgtaatccctactgttcttcttagtcccagcttctgcccagggaggcttctacccagacttcttttgcaatttgtccctgggaagagggggtctcccagtgcccccagcttcatcccagcagaaccagcaggatcctcctggtctctcactggccttcctccacacttggtttctatcctcaggggtagaagctcagagctttttatggcccaggaggctttgtgccctctgggctttatatgggtccatgtttcaatttttcccccccggcttttcctttggcttaacacacgggccgttgtg

SEQ ID NO: 371124 - DNA, 3084 bp, Homo sapiens
ggcgcgaattcactagtgattagagactgcgagaaggagtagtaggaatatggttgattagattggatctcccaagttttaattgaaaggagactgaacgaaaacctttctgctttctgtccgttaaagagctcctcatctgatcttgcagctagaccctttgagacttaagagctgcatcccaggatcagaagccagggctaattggggtaggacaatattcccagcccctaagctctgtagataatgcataagaagcaccaagtcaggctcagatgcaactaaaacacatctttgagccttttctttttcccttctcccctttctaaacaaaaaccttcctaggatggcatcttttgctctaactgggagacagtcataattggttgtagtcaattctactaagcagtgttggggtggttggaaagtctcttttttgtaatttgtttttgcaaatcattgtgaggccactttttctttctttctttctttctttctttctttctttcgttctttcgttctttcgttctttctttctttctttctttctctttctttcttttgctttccttctttcatctcttttttgtaatttgttgttgcaaatcattgtgaggccacttttctttccccttccttccttcctttttttctgttttttttttttttttttcccagagtcttgctctgtcgcccaggttggagtgcagtggcacgatctcggctcactgcaccctctgcctcttgggttcaagcgattctcctgcctcagcctcccaagtagctgggattacaggcatacaccaccacgccccactaattttttgtatttttggtagggcggggtttcaccatgatggccaggttggttttgaactcctgacctcaagtaatctgcccacctcggcctcccaaagtgctaggattacaggagtgagccactgcgcctggcccacttttctttctttccttcttattttgttatgctggcagccatttgcccctgcatggtatgggatcaaagaggacagcctttcctccctcaccttctccaaatctaggtgaaatcacagagtacaaaacgtgagaatgctgaatgtgtaaagttgcagagggatccctaatttgaagactttgacacagaactaacttcttttgacttaaatgaatttaaaatgagccaaaggaccctgaaaagaagacatgttgatttcccactcctagatgctaaagagacttggcaccagctttgttcaaactgtaaaaatagcaatttgcccctactcgctcagagtgggacagtagtgaacagagctgggattccatgcgacagcttgaatgctgaccttcagacatgagacatagggatttggaggccccttagaatgggtagatggtgttatgttccctttctggcatagcattcacttggtgctttggagattaggtgagggccctataggtagttggcctgttggcagaatttatttaggaacagcccttttgaaagtgtcccagtaacaaagcacccagctgcagcaaggaggtggggaaggagggcaccccaaaggacagcgccttcttctcttccacccatgcacggccttgggtgatggaggcgggttccctgtggctgcgtggatcccataggatcaagcccttctttgcatgaagcagtgttgtgactcttctctctccccttcctctgcacttcctttctgtaatccctactgttcttcttagtcccagcttctgcccagggaggcttctacccagacttcttttgcaatttgtccctgggaagagggggtctcccagtgcccccagcttcatcccagcagaaccagcaggatcctcctggtctctcactggccttcctccacacttggtttctatcctcaggggtagaagctcagagctttttatggcccaggagaaaatgtagaccctgagaaacctgtccctgcagaaaggttcccttgggccatgctttgggccctctgctctttatatgtttattctattctccatttttccaccccgtccttaccctaggcctaaacacaggtacagatatgtgcatgctcagggcagctcctaggcctggactgagctctcaggggggaattagataaatattccaacatcctcatgcctggcccatttagtttcatcctttagttacccaggccagtagctttgggttatcccttcctgtagctccaaacccagcacttggagcagcaaaatagggcactgacaggagatgaaactctctcctatctcagaatttgccaacttctgggctgggctcctaggaggtagttttcttgaaggggactgcatcctagttgacctgaattttccagaccaggagggactgctgtgctctcccttctcgccatcatactgtttggctagattcattcagcagtagaagctgtttgatctgttgaccccagcatactgctgtttcttcaccagcttcattgtgtcacagtagcttcctttgggaggatgatgtgatagaacactcagagagagggagggagaagagagatagtgggtatgcttctctagctccccatcttccaggtccacctcttgacttcctgttcccctaaacctgagcacatcacgccaggcctctttgctgccaggacagcatcagctcactcctcagcaataatctagggtatgtgggaaggtcagggctgtggtaaggaatagaatcaaagaggggagtgatacggggtgggggcacttggccgcctgctaaacttggacattaattttatatcatgacccccttttaagccagtgagctgggcttcagtttttcccaggccatgcacatttaatttatttcagagaaactctaattgtattttcactgcagtatcttgtattttttatttgtgatttaagaaatgtgaagagaaaatacacagacacaataatggctaacattgtttctttcattccttgttctagagctaaccactctaaaattgtttggtaatgtcacttagtgtaattaattgtaacatattcttttaaataaattgatttattgatcaaaca

SEQ ID NO: 371125 - DNA, 841 bp, Homo sapiens
ctaggatgcagttcccattcaatgaaaactacctcctaggagcccagcccagaagttggcaaaattctgagataggaggtagttttcttgaaggggactgcatcctagttgacctgaattttccagaccaggagggactgctgtgctctcccttctcgccatcatactgtttggctagattcattcagcagtagaagctgtttgatctgttgaccccagcatactgctgtttcttcaccagcttcattgtgtcacagtagcttcctttgggaggatgatgtgatagaacactcagagagagggagggagaagagagatagtgggtatgcttctctagctccccatcttccaggtccacctcttgacttcctgttcccctaaacctgagcacatcacgccaggcctctttgctgccaggacagcatcagctcactcctcagcaataatctagggtatgtgggaaggtcagggctgtggtaaggaatagaatcaaagaggggagtgatacggggtgggggcacttggccgcctgctaaacttggacattaattttatatcatgacccccttttaagccagtgagctgggcttcagtttttcccaggccatgcacatttaatttatttcagagaaactctaattgtattttcactgcagtatcttgtattttttatttgtgatttaagaaatgtgaagagaaaatacacagacacaataatggctaacattgtttctttcattccttgttctagagctaaccactctaaaattgtttggtaatgtcacttagtgtaattaattgtaacatattcttttaaataaattgatttattgatcaaaca

SEQ ID NO: 371126 - DNA, 5599 bp, Homo sapiens
atgaggtgtcagtggccaagagaggtgctcgtcgaaaccgggagagacccgaggtaaactccccaatcatcagcagagctcgaggttctcggctcaagggagaagaggatatagtagggaatattagttagagactgattatctcatgtgagccaggacattcttccagcaaggttggcctctggatggtgaacgggctgtgcaaaaaagccctgcttcttcccttgtctagagggtggacattggctacaggctcttccatctctcatgacttcatggaccctcctctgccagttttttaaatcagatcaccctccatgttgttcctgacccacaggggaagctgtcctcagttgtagccgtcttgactggatgagtcctggcagtctttctaggcgaaccaagaatgtttgtgtgagggaaggtgtttgctgttgctttactgctgtctgtatgtgccagtgctggaacagaatttggaagattctgaataattagttacttattctcaaagaaaatctttgaaagaatcaggaggtcaagtcaagaacatgaaaatttatattttagtacagtagaaagaacattgggctctgggaattttatctgggttttctcctggcttttttttccctctgtgtaattttgggtaaatcagcctccctagctttcagttttctcttctgtgaaacaggaagactgaaccacgtaattaatatccaaggtcccttccggctctaaaaggctatgattctagatgagaagttatatcaagaaagatgtggccaatcagattgagtcatccaggcatacctttttagcttctgtttgtggagttgtctccagataagaggagatgtgccttcccaataactctttttttttttcctttcagaacattttccagatggcgaggtcacagcagagagatgtggccacctagcctttccttatccccttcccttcccttcacccccatcctcttactcctttcatgtcccatttcagacagagtaaccattaacaaaaaagaagagaaaaagttaaagtcgttatattcaaaagccctaaactaaatattattaataaccccctctgaatttcatgtctctggaattgaggtggtagtgaacagcagatcggtcagcaccagaagtcaactgagttaaggcaggaaaagaaataagcccaaccaacttgccaaaggtatctttgtcctttcacctgggcctcataccaacagcctctccttgtactatatttttaaaactggaactatgaacttcatccatttgcactgttcagacatatatatgtatgtatgtaaaaattatatatacacaaattagctgcacgtatatacatatatatatttctttttaaatttcatattgatggcagtaccttttttagcttgtgtttttacacacctttcactagaatccatgacctccctcgtgctctctttcttttgaaacaaactttaaaaaggaaaaaaaagcattttacagggaaaaatacctctcctcatgaaggacttgaaaagtttacaacctgcttggatttttgcccctttttttgtattgagtatagattccggctcatgggttgccatagagtctaggaacaaggagtatagtttctttatcttccaagagggtgctggggaggagaaagaggtgtgtttctcaaggttaacaggctgtagttctgcagggagagcctgaagtcctggtatgggctcttgattctgtgacaatttttttgatccatctatttctctcactcctggctttctagccacattctgcacctccttcctgctttcctagagcctcggtatgctttccctcaaccgaccctggctcaggaggttgatgccatgggaacctgaacctgaaacacttcatggtagtaatttcctgttttccttgcctttttttttttttttttttttttttttctgagacagggtcttactctgtcgcccagactggaatgtggtggcatgaacatagctcactgttaccttgaattctgggctcaggtgatccttccgcctcaccctcctgagtagctgggactacaggtgtgcaccaccacacctggctaattcttcttaaaatttttttgtagagacagggtctcactatgttgcccaggctggtctcaaactcctggcctcaggtgatcctcttgtctcagcctcccaaagtgctgggattacaggcatgagccactgtgtccttccctgccttttttgcagcagggatagtactcaggaccagagttaagctgataccttaggcacacaggttggacttacatagaggaaagaaagcaagaaatgccctatgtacatgaggttttacctcctccattcctgaccaataaccacccataactacggcattctctgtgacttccttaaacagcagtgatgggaagggatccaatagtatcttcaaggccttggggaaacttgcagtgggtcagtggtctgtgccaaccaaacgatagccccatccaagccagctgagaacctaggaaggagtagtaggaatatggttgattagattggatctcccaagttttaattgaaaggagactgaacgaaaacctttctgctttctgtccgttaaagagctcctcatctgatcttgcagctagaccctttgagacttaagagctgcatcccaggatcagaagccagggctaattggggtaggacaatattcccagcccctaagctctgtagataatgcataagaagcaccaagtcaggctcagatgcaactaaaacacatctttgagccttttctttttcccttctcccctttctaaacaaaaaccttcctaggatggcatcttttgctctaactgggagacagtcataattggttgtagtcaattctactaagcagtgttggggtggttggaaagtctcttttttgtaatttgtttttgcaaatcattgtgaggccactttttctttctttctttctttctttctttctttctttcgttctttcgttctttcgttctttctttctttctttctttctctttctttcttttgctttccttctttcatctcttttttgtaatttgttgttgcaaatcattgtgaggccacttttctttccccttccttccttcctttttttctgttttttttttttttttttcccagagtcttgctctgtcgcccaggttggagtgcagtggcacgatctcggctcactgcaccctctgcctcttgggttcaagcgattctcctgcctcagcctcccaagtagctgggattacaggcatacaccaccacgccccactaattttttgtatttttggtagggcggggtttcaccatgatggccaggttggttttgaactcctgacctcaagtaatctgcccacctcggcctcccaaagtgctaggattacaggagtgagccactgcgcctggcccacttttctttctttccttcttattttgttatgctggcagccatttgcccctgcatggtatgggatcaaagaggacagcctttcctccctcaccttctccaaatctaggtgaaatcacagagtacaaaacgtgagaatgctgaatgtgtaaagttgcagagggatccctaatttgaagactttgacacagaactaacttcttttgacttaaatgaatttaaaatgagccaaaggaccctgaaaagaagacatgttgatttcccactcctagatgctaaagagacttggcaccagctttgttcaaactgtaaaaatagcaatttgcccctactcgctcagagtgggacagtagtgaacagagctgggattccatgcgacagcttgaatgctgaccttcagacatgagacatagggatttggaggccccttagaatgggtagatggtgttatgttccctttctggcatagcattcacttggtgctttggagattaggtgagggccctataggtagttggcctgttggcagaatttatttaggaacagcccttttgaaagtgtcccagtaacaaagcacccagctgcagcaaggaggtggggaaggagggcaccccaaaggacagcgccttcttctcttccacccatgcacggccttgggtgatggaggcgggttccctgtggctgcgtggatcccataggatcaagcccttctttgcatgaagcagtgttgtgactcttctctctccccttcctctgcacttcctttctgtaatccctactgttcttcttagtcccagcttctgcccagggaggcttctacccagacttcttttgcaatttgtccctgggaagagggggtctcccagtgcccccagcttcatcccagcagaaccagcaggatcctcctggtctctcactggccttcctccacacttggtttctatcctcaggggtagaagctcagagctttttatggcccaggagaaaatgtagaccctgagaaacctgtccctgcagaaaggttcccttgggccatgctttgggccctctgctctttatatgtttattctattctccatttttccaccccgtccttaccctaggcctaaacacaggtacagatatgtgcatgctcagggcagctcctaggcctggactgagctctcaggggggaattagataaatattccaacatcctcatgcctggcccatttagtttcatcctttagttacccaggccagtagctttgggttatcccttcctgtagctccaaacccagcacttggagcagcaaaatagggcactgacaggagatgaaactctctcctatctcagaatttgccaacttctgggctgggctcctaggaggtagttttcttgaaggggactgcatcctagttgacctgaattttccagaccaggagggactgctgtgctctcccttctcgccatcatactgtttggctagattcattcagcagtagaagctgtttgatctgttgaccccagcatactgctgtttcttcaccagcttcattgtgtcacagtagcttcctttgggaggatgatgtgatagaacactcagagagagggagggagaagagagatagtgggtatgcttctctagctccccatcttccaggtccacctcttgacttcctgttcccctaaacctgagcacatcacgccaggcctctttgctgccaggacagcatcagctcactcctcagcaataatctagggtatgtgggaaggtcagggctgtggtaaggaatagaatcaaagaggggagtgatacggggtgggggcacttggccgcctgctaaacttggacattaattttatatcatgacccccttttaagccagtgagctgggcttcagtttttcccaggccatgcacatttaatttatttcagagaaactctaattgtattttcactgcagtatcttgtattttttatttgtgatttaagaaatgtgaagagaaaatacacagacacaataatggctaacattgtttctttcattccttgttctagagctaaccactctaaaattgtttggtaatgtcacttagtgtaattaattgtaacatattcttttaaataaattgatttattgatcaaaca

SEQ ID NO: 371127 - DNA, 4534 bp, Homo sapiens
cagcagctcggtggccgagtcggtcccgcggccggcggatcgggcgcgcgcgtcgggggtcgtccggctgccaggcagggcgagcacgcgccgggaggccttggaggcgtagggggcgggggtacggctcgcctgctcgcaagatggcggacgaggacggggaagggattcatccctcagcccctcacaggaacggaggtggcggcggcggcggggggtctgggctccactgcgccgggaacggcggcgggggaggcggcggcccgcgggtcgtgcgcatcgtcaagtccgagtccggctacggcttcaacgtgcggggccaagaaccacgtgaatgttgagggggcgacacacaagcaggtggtggacctgattcgagcaggcgagaaggaattgatcttgacagtgttatctgtacctcctcatgaggcagataacctagatcccagtgacgactcgttgggacaatcattttatgattacacagaaaagcaagcagtgcccatatcggtccccagatacaaacatgtggagcagaatggtgagaagtttgtggtatataatgtttacatggcagggaggcagctgtgttctaagcggtaccgggagtttgctatcctacaccagaacctgaagagagagtttgccaactttacatttcctcgactcccagggaagtggccattttcattatcagaacaacaattagatgcccgacgtcggggattggaagaatatctagaaaaagtgtgttcaatacgagtaattggtgagagtgacatcatgcaggaattcctatcagaatccgatgagaactacaatggtgtgtccgacgtagagctgagagtagcattaccagatggaacaacggttacagtcagggttaaaaagaacagtactacagaccaagtatatcaggctatcgcagcaaaggttggcatggacagtacgacagtgaattactttgccttatttgaagtgatcagtcactcctttgtacgtaaattggcacctaatgagtttcctcacaaactctacattcagaattatacatcagctgtgccaggcacctgcttgaccattcgaaagtggctttttacaacagaagaagaaattctcttaaatgacaatgaccttgctgttacctacttctttcatcaggcagtcgatgatgtgaagaaaggttacatcaaagcagaagaaaagtcctatcaattacagaagctatacgaacaaagaaaaatggtcatgtacctcaacatgctaaggacttgtgagggctacaatgaaatcatctttccccactgtgcctgtgactccaggaggaaggggcacgttatcacagccatcagcatcacgcactttaaactgcatgcctgcactgaagaaggacagctggagaaccaggtaattgcatttgaatgggatgagatgcagcgatgggacacagatgaagaagggatggccttctgtttcgaatatgcacgaggagagaagaagccccgatgggttaaaatcttcacgccatatttcaattacatgcatgagtgcttcgagagggtgttctgcgagctcaagtggagaaaagaggaatattagttagagactgattatctcatgtgagccaggacattcttccagcaaggttggcctctggatggtgaacgggctgtgcaaaaaagccctgcttcttcccttgtctagagggtggacattggctacaggctcttccatctctcatgacttcatggaccctcctctgccagttttttaaatcagatcaccctccatgttgttcctgacccacaggggaagctgtcctcagttgtagccgtcttgactggatgagtcctggcagtctttctaggcgaaccaagaatgtttgtgtgagggaaggtgtttgctgttgctttactgctgtctgtatgtgccagtgctggaacagaatttggaagattctgaataattagttacttattctcaaagaaaatctttgaaagaatcaggaggtcaagtcaagaacatgaaaatttatattttagtacagtagaaagaacattgggctctgggaattttatctgggttttctcctggcttttttttccctctgtgtaattttgggtaaatcagcctccctagctttcagttttctcttctgtgaaacaggaagactgaaccacgtaattaatatccaaggtcccttccggctctaaaaggctatgattctagatgagaagttatatcaagaaagatgtggccaatcagattgagtcatccaggcatacctttttagcttctgtttgtggagttgtctccagataagaggagatgtgccttcccaataactctttttttttttcctttcagaacattttccagatggcgaggtcacagcagagagatgtggccacctagcctttccttatccccttcccttcccttcacccccatcctcttactcctttcatgtcccatttcagacagagtaaccattaacaaaaaagaagagaaaaagttaaagtcgttatattcaaaagccctaaactaaatattattaataaccccctctgaatttcatgtctctggaattgaggtggtagtgaacagcagatcggtcagcaccagaagtcaactgagttaaggcaggaaaagaaataagcccaaccaacttgccaaaggtatctttgtcctttcacctgggcctcataccaacagcctctccttgtactatatttttaaaactggaactatgaacttcatccatttgcactgttcagacatatatatgtatgtatgtaaaaattatatatacacaaattagctgcacgtatatacatatatatatttctttttaaatttcatattgatggcagtaccttttttagcttgtgtttttacacacctttcactagaatccatgacctccctcgtgctctctttcttttgaaacaaactttaaaaaggaaaaaaaagcattttacagggaaaaatacctctcctcatgaaggacttgaaaagtttacaacctgcttggatttttgcccctttttttgtattgagtatagattccggctcatgggttgccatagagtctaggaacaaggagtatagtttctttatcttccaagagggtgctggggaggagaaagaggtgtgtttctcaaggttaacaggctgtagttctgcagggagagcctgaagtcctggtatgggctcttgattctgtgacaatttttttgatccatctatttctctcactcctggctttctagccacattctgcacctccttcctgctttcctagagcctcggtatgctttccctcaaccgaccctggctcaggaggttgatgccatgggaacctgaacctgaaacacttcatggtagtaatttcctgttttccttgcctttttttttttttttttttttttttttctgagacagggtcttactctgtcgcccagactggaatgtggtggcatgaacatagctcactgttaccttgaattctgggctcaggtgatccttccgcctcaccctcctgagtagctgggactacaggtgtgcaccaccacacctggctaattcttcttaaaatttttttgtagagacagggtctcactatgttgcccaggctggtctcaaactcctggcctcaggtgatcctcttgtctcagcctcccaaagtgctgggattacaggcatgagccactgtgtccttccctgccttttttgcagcagggatagtactcaggaccagagttaagctgataccttaggcacacaggttggacttacatagaggaaagaaagcaagaaatgccctatgtacatgaggttttacctcctccattcctgaccaataaccacccataactacggcattctctgtgacttccttaaacagcagtgatgggaagggatccaatagtatcttcaaggccttggggaaacttgcagtgggtcagtggtctgtgccaaccaaacgatagccccatccaagccagctgagaacctaggaaggagtagtaggaatatggttgattagattggatctcccaagttttaattgaaaggagactgaacgaaaacctttctgctttctgtccgttaaagagctcctcatctgatcttgcagctagaccctttgagacttaagagctgcatcccaggatcagaagccagggctaattggggtaggacaatattcccagcccctaagctctgtagataatgcataagaagcaccaagtcaggctcagatgcaactaaaacacatctttgagccttttctttttcccttctcccctttcacccctccctttcacaggggtctgggtgcctcacagggtgggggccggcgcctgctaacctcattaccactgatcccttgatcccgtgggctgctccagtgggcaggggtagctagcgtgtgccaggcagatcctctggacacgtaacctatgtcagacactacatgatgactcaaggccaataataaagacatttcctacctgcacaaaacacaaaaaaa

SEQ ID NO: 371128 - DNA, 2551 bp, Homo sapiens
ggctgcggcgctagatgcggacacctggaccgccgcgccgaggctcccggcgctcgctgctcccgcggcccgcgccatgccctcctacacggtcaccgtggccactggcagccagtggttcgccggcactgacgactacatctacctcagcctcgtgggctcggcgggctgcagcgagaagcacctgctggacaagcccttctacaacgacttcgagcgtggcgcggtggattcatacgacgtgactgtggacgaggaactgggcgagatccagctggtcagaatcgagaagcgcaagtactggctgaatgacgactggtacctgaagtacatcacgctgaagacgccccacggggactacatcgagttcccctgctaccgctggatcaccggcgatgtcgaggttgtcctgagggatggacgcgcaaagttggcccgagatgaccaaattcacattctcaagcaacaccgacgtaaagaactggaaacacggcaaaaacaatatcgatggatggagtggaaccctggcttccccttgagcatcgatgccaaatgccacaaggatttaccccgtgatatccagtttgatagtgaaaaaggagtggactttgttctgaattactccaaagcgatggagaacctgttcatcaaccgcttcatgcacatgttccagtcttcttggaatgacttcgccgactttgagaaaatctttgtcaagatcagcaacactatttctgagcgggtcatgaatcactggcaggaagacctgatgtttggctaccagttcctgaatggctgcaaccctgtgttgatccggcgctgcacagagctgcccgagaagctcccggtgaccacggagatggtagagtgcagcctggagcggcagctcagcttggagcaggaggtccagcaagggaacattttcatcgtggactttgagctgctggatggcatcgatgccaacaaaacagacccctgcacactccagttcctggccgctcccatctgcttgctgtataagaacctggccaacaagattgtccccattgccatccagctcaaccaaatcccgggagatgagaaccctattttcctcccttcggatgcaaaatacgactggcttttggccaaaatctgggtgcgttccagtgacttccacgtccaccagaccatcacccaccttctgcgaacacatctggtgtctgaggtttttggcattgcaatgtaccgccagctgcctgctgtgcaccccattttcaagctgctggtggcacacgtgagattcaccattgcaatcaacaccaaggcccgtgagcagctcatctgcgagtgtggcctctttgacaaggccaacgccacagggggcggtgggcacgtgcagatggtgcagagggccatgaaggacctgacctatgcctccctgtgctttcccgaggccatcaaggcccggggcatggagagcaaagaagacatcccctactacttctaccgggacgacgggctcctggtgtgggaagccatcaggacgttcacggccgaggtggtagacatctactacgagggcgaccaggtggtggaggaggacccggagctgcaggacttcgtgaacgatgtctacgtgtacggcatgcggggccgcaagtcctcaggcttccccaagtcggtcaagagccgggagcagctgtcggagtacctgaccgtggtgatcttcaccgcctccgcccagcacgccgcggtcaacttcggccagtacgactggtgctcctggatccccaatgcgcccccaaccatgcgagccccgccaccgactgccaagggcgtggtgaccattgagcagatcgtggacacgctgcccgaccgcggccgctcctgctggcatctgggtgcagtgtgggcgctgagccagttccaggaaaacgagctgttcctgggcatgtacccagaagagcattttatcgagaagcctgtgaaggaagccatggcccgattccgcaagaacctcgaggccattgtcagcgtgattgctgagcgcaacaagaagaagcagctgccatattactacttgtccccagaccggattccgaacagtgtggccatctgagcacactgccagtctcactgtgggaaggccagctgccccagccagatggactccagcctgcctggcaggctgtctggccaggcctcttggcagtcacatctcttcctccgaggccagtacctttccatttattctttgatcttcagggaactgcatagattgatcaaagtgtaaacaccatagggacccattctacacagagcaggactgcacagcgtcctgtccacacccagctcagcatttccacaccaagcagcaacagcaaatcacgaccactgatagatgtctattcttgttggagacatgggatgattattttctgttctatttgtgcttagtccaattccttgcacatagtaggtacccaattcaattactattgaatgaattaagaattggttgccataaaaataaatcagttcatttaaaatgggtcttgttccatgtgtt

SEQ ID NO: 371129 - DNA, 2730 bp, Homo sapiens
ggctgcggcgctagatgcggacacctggaccgccgcgccgaggctcccggcgctcgctgctcccgcggcccgcgccatgccctcctacacggtcaccgtggccactggcagccagtggttcgccggcactgacgactacatctacctcagcctcgtgggctcggcgggctgcagcgagaagcacctgctggacaagcccttctacaacgacttcgagcgtggcgcggtggattcatacgacgtgactgtggacgaggaactgggcgagatccagctggtcagaatcgagaagcgcaagtactggctgaatgacgactggtacctgaagtacatcacgctgaagacgccccacggggactacatcgagttcccctgctaccgctggatcaccggcgatgtcgaggttgtcctgagggatggacgcgcaaagttggcccgagatgaccaaattcacattctcaagcaacaccgacgtaaagaactggaaacacggcaaaaacaatatcgatggatggagtggaaccctggcttccccttgagcatcgatgccaaatgccacaaggatttaccccgtgatatccagtttgatagtgaaaaaggagtggactttgttctgaattactccaaagcgatggagaacctgttcatcaaccgcttcatgcacatgttccagtcttcttggaatgacttcgccgactttgagaaaatctttgtcaagatcagcaacactatttctgagcgggtcatgaatcactggcaggaagacctgatgtttggctaccagttcctgaatggctgcaaccctgtgttgatccggcgctgcacagagctgcccgagaagctcccggtgaccacggagatggtagagtgcagcctggagcggcagctcagcttggagcaggaggtccagcaagggaacattttcatcgtggactttgagctgctggatggcatcgatgccaacaaaacagacccctgcacactccagttcctggccgctcccatctgcttgctgtataagaacctggccaacaagattgtccccattgccatccagctcaaccaaatcccgggagatgagaaccctattttcctcccttcggatgcaaaatacgactggcttttggccaaaatctgggtgcgttccagtgacttccacgtccaccagaccatcacccaccttctgcgaacacatctggtgtctgaggtttttggcattgcaatgtaccgccagctgcctgctgtgcaccccattttcaagctgctggtggcacacgtgagattcaccattgcaatcaacaccaaggcccgtgagcagctcatctgcgagtgtggcctctttgacaaggccaacgccacagggggcggtgggcacgtgcagatggtgcagagggccatgaaggacctgacctatgcctccctgtgctttcccgaggccatcaaggcccggggcatggagagcaaagaagacatcccctactacttctaccgggacgacgggctcctggtgtgggaagccatcaggacgtgagcgcccgcggggcggtggtcctgggggaggagccgggacccctgcctgactacctggggcgggcctggcccctccaccgctagcgctgaatggggacggggtgggggagtcccagcgtccgtgagggggttgccgccgggcaccgctccgcagacctggctgggtcgcccaccccggctgcgccccctgagccaggttcacggccgaggtggtagacatctactacgagggcgaccaggtggtggaggaggacccggagctgcaggacttcgtgaacgatgtctacgtgtacggcatgcggggccgcaagtcctcaggcttccccaagtcggtcaagagccgggagcagctgtcggagtacctgaccgtggtgatcttcaccgcctccgcccagcacgccgcggtcaacttcggccagtacgactggtgctcctggatccccaatgcgcccccaaccatgcgagccccgccaccgactgccaagggcgtggtgaccattgagcagatcgtggacacgctgcccgaccgcggccgctcctgctggcatctgggtgcagtgtgggcgctgagccagttccaggaaaacgagctgttcctgggcatgtacccagaagagcattttatcgagaagcctgtgaaggaagccatggcccgattccgcaagaacctcgaggccattgtcagcgtgattgctgagcgcaacaagaagaagcagctgccatattactacttgtccccagaccggattccgaacagtgtggccatctgagcacactgccagtctcactgtgggaaggccagctgccccagccagatggactccagcctgcctggcaggctgtctggccaggcctcttggcagtcacatctcttcctccgaggccagtacctttccatttattctttgatcttcagggaactgcatagattgatcaaagtgtaaacaccatagggacccattctacacagagcaggactgcacagcgtcctgtccacacccagctcagcatttccacaccaagcagcaacagcaaatcacgaccactgatagatgtctattcttgttggagacatgggatgattattttctgttctatttgtgcttagtccaattccttgcacatagtaggtacccaattcaattactattgaatgaattaagaattggttgccataaaaataaatcagttcatttaaaa

SEQ ID NO: 371130 - DNA, 2810 bp, Homo sapiens
ttcatgggcgaaagcctacagatttctttaatacaagttgtacgtggcatgggagccctcttaaaaagatgaagaccccaagaagcagttagagtcaatcccccttagatactgcattgaatgaatcatcgtgagatgtgataaggccaaggggcttgggctagggcaggtaactgggcagggaagtgactcgggaggtaagcgttcattgtacaagatctgtttgtatggatttcctttggcttcaacttcccaaccttgatgaaaagagtgttactttccttttggtatagtgaggacatctttcataggggactttcatctcctgcttctaagaaacagcacgaatgtcagagtatcttgcacctgctgtttttttaagtgcttttcattcaacgtagtccctgtgccacagcagcataccttggggtgacaaattcttaacacctccagaacaaaggctcaggagaccacgcatggcctgattgcctgttctccttcccaggtggattcatacgacgtgactgtggacgaggaactgggcgagatccagctggtcagaatcgagaagcgcaagtactggctgaatgacgactggtacctgaagtacatcacgctgaagacgccccacggggactacatcgagttcccctgctaccgctggatcaccggcgatgtcgaggttgtcctgagggatggacgcgcaaagttggcccgagatgaccaaattcacattctcaagcaacaccgacgtaaagaactggaaacacggcaaaaacaatatcgatggatggagtggaaccctggcttccccttgagcatcgatgccaaatgccacaaggatttaccccgtgatatccagtttgatagtgaaaaaggagtggactttgttctgaattactccaaagcgatggagaacctgttcatcaaccgcttcatgcacatgttccagtcttcttggaatgacttcgccgactttgagaaaatctttgtcaagatcagcaacactatttctgagcgggtcatgaatcactggcaggaagacctgatgtttggctaccagttcctgaatggctgcaaccctgtgttgatccggcgctgcacagagctgcccgagaagctcccggtgaccacggagatggtagagtgcagcctggagcggcagctcagcttggagcaggaggtccagcaagggaacattttcatcgtggactttgagctgctggatggcatcgatgccaacaaaacagacccctgcacactccagttcctggccgctcccatctgcttgctgtataagaacctggccaacaagattgtccccattgccatccagctcaaccaaatcccgggagatgagaaccctattttcctcccttcggatgcaaaatacgactggcttttggccaaaatctgggtgcgttccagtgacttccacgtccaccagaccatcacccaccttctgcgaacacatctggtgtctgaggtttttggcattgcaatgtaccgccagctgcctgctgtgcaccccattttcaagctgctggtggcacacgtgagattcaccattgcaatcaacaccaaggcccgtgagcagctcatctgcgagtgtggcctctttgacaaggccaacgccacagggggcggtgggcacgtgcagatggtgcagagggccatgaaggacctgacctatgcctccctgtgctttcccgaggccatcaaggcccggggcatggagagcaaagaagacatcccctactacttctaccgggacgacgggctcctggtgtgggaagccatcaggacgttcacggccgaggtggtagacatctactacgagggcgaccaggtggtggaggaggacccggagctgcaggacttcgtgaacgatgtctacgtgtacggcatgcggggccgcaagtcctcaggcttccccaagtcggtcaagagccgggagcagctgtcggagtacctgaccgtggtgatcttcaccgcctccgcccagcacgccgcggtcaacttcggccagtacgactggtgctcctggatccccaatgcgcccccaaccatgcgagccccgccaccgactgccaagggcgtggtgaccattgagcagatcgtggacacgctgcccgaccgcggccgctcctgctggcatctgggtgcagtgtgggcgctgagccagttccaggaaaacgagctgttcctgggcatgtacccagaagagcattttatcgagaagcctgtgaaggaagccatggcccgattccgcaagaacctcgaggccattgtcagcgtgattgctgagcgcaacaagaagaagcagctgccatattactacttgtccccagaccggattccgaacagtgtggccatctgagcacactgccagtctcactgtgggaaggccagctgccccagccagatggactccagcctgcctggcaggctgtctggccaggcctcttggcagtcacatctcttcctccgaggccagtacctttccatttattctttgatcttcagggaactgcatagattgatcaaagtgtaaacaccatagggacccattctacacagagcaggactgcacagcgtcctgtccacacccagctcagcatttccacaccaagcagcaacagcaaatcacgaccactgatagatgtctattcttgttggagacatgggatgattattttctgttctatttgtgcttagtccaattccttgcacatagtaggtacccaattcaattactattgaatgaattaagaattggttgccataaaaataaatcagttcatttaaaa

SEQ ID NO: 371131 - DNA, 2429 bp, Homo sapiens
tccaggatcttagggaatcgtggtgctgctctagtcggtatgcctaccatggtgaccacgggtgacggggaatcagaagcacctgctggacaagcccttctacaacgacttcgagcgtggcgcggtggattcatacgacgtgactgtggacgaggaactgggcgagatccagctggtcagaatcgagaagcgcaagtactggctgaatgacgactggtacctgaagtacatcacgctgaagacgccccacggggactacatcgagttcccctgctaccgctggatcaccggcgatgtcgaggttgtcctgagggatggacgcgcaaagttggcccgagatgaccaaattcacattctcaagcaacaccgacgtaaagaactggaaacacggcaaaaacaatatcgatggatggagtggaaccctggcttccccttgagcatcgatgccaaatgccacaaggatttaccccgtgatatccagtttgatagtgaaaaaggagtggactttgttctgaattactccaaagcgatggagaacctgttcatcaaccgcttcatgcacatgttccagtcttcttggaatgacttcgccgactttgagaaaatctttgtcaagatcagcaacactatttctgagcgggtcatgaatcactggcaggaagacctgatgtttggctaccagttcctgaatggctgcaaccctgtgttgatccggcgctgcacagagctgcccgagaagctcccggtgaccacggagatggtagagtgcagcctggagcggcagctcagcttggagcaggaggtccagcaagggaacattttcatcgtggactttgagctgctggatggcatcgatgccaacaaaacagacccctgcacactccagttcctggccgctcccatctgcttgctgtataagaacctggccaacaagattgtccccattgccatccagctcaaccaaatcccgggagatgagaaccctattttcctcccttcggatgcaaaatacgactggcttttggccaaaatctgggtgcgttccagtgacttccacgtccaccagaccatcacccaccttctgcgaacacatctggtgtctgaggtttttggcattgcaatgtaccgccagctgcctgctgtgcaccccattttcaagctgctggtggcacacgtgagattcaccattgcaatcaacaccaaggcccgtgagcagctcatctgcgagtgtggcctctttgacaaggccaacgccacagggggcggtgggcacgtgcagatggtgcagagggccatgaaggacctgacctatgcctccctgtgctttcccgaggccatcaaggcccggggcatggagagcaaagaagacatcccctactacttctaccgggacgacgggctcctggtgtgggaagccatcaggacgttcacggccgaggtggtagacatctactacgagggcgaccaggtggtggaggaggacccggagctgcaggacttcgtgaacgatgtctacgtgtacggcatgcggggccgcaagtcctcaggcttccccaagtcggtcaagagccgggagcagctgtcggagtacctgaccgtggtgatcttcaccgcctccgcccagcacgccgcggtcaacttcggccagtacgactggtgctcctggatccccaatgcgcccccaaccatgcgagccccgccaccgactgccaagggcgtggtgaccattgagcagatcgtggacacgctgcccgaccgcggccgctcctgctggcatctgggtgcagtgtgggcgctgagccagttccaggaaaacgagctgttcctgggcatgtacccagaagagcattttatcgagaagcctgtgaaggaagccatggcccgattccgcaagaacctcgaggccattgtcagcgtgattgctgagcgcaacaagaagaagcagctgccatattactacttgtccccagaccggattccgaacagtgtggccatctgagcacactgccagtctcactgtgggaaggccagctgccccagccagatggactccagcctgcctggcaggctgtctggccaggcctcttggcagtcacatctcttcctccgaggccagtacctttccatttattctttgatcttcagggaactgcatagattgatcaaagtgtaaacaccatagggacccattctacacagagcaggactgcacagcgtcctgtccacacccagctcagcatttccacaccaagcagcaacagcaaatcacgaccactgatagatgtctattcttgttggagacatgggatgattattttctgttctatttgtgcttagtccaattccttgcacatagtaggtacccaattcaattactattgaatgaattaagaattggttgccataaaaataaatcagttcatttaaaa

SEQ ID NO: 371132 - DNA, 2818 bp, Homo sapiens
ggctgcggcgctagatgcggacacctggaccgccgcgccgaggctcccggcgctcgctgctcccgcggcccgcgccatgccctcctacacggtcaccgtggccactggcagccagtggttcgccggcactgacgactacatctacctcagcctcgtgggctcggcgggctgcagcgagaagcacctgctggacaagcccttctacaacgacttcgagcgtggcgcggtggattcatacgacgtgactgtggacgaggaactgggcgagatccagctggtcagaatcgagaagcgcaagtactggctgaatgacgactggtacctgaagtacatcacgctgaagacgccccacggggactacatcgagttcccctgctaccgctggatcaccggcgatgtcgaggttgtcctgagggatggacgcgcaaagttggcccgagatgaccaaattcacattctcaagcaacaccgacgtaaagaactggaaacacggcaaaaacaatatcgatggatggagtggaaccctggcttccccttgagcatcgatgccaaatgccacaaggatttaccccgtgatatccagtttgatagtgaaaaaggagtggactttgttctgaattactccaaagcgatggagaacctgttcatcaaccgcttcatgcacatgttccagtcttcttggaatgacttcgccgactttgagaaaatctttgtcaagatcagcaacactatttctgagcgggtcatgaatcactggcaggaagacctgatgtttggctaccagttcctgaatggctgcaaccctgtgttgatccggcgctgcacagagctgcccgagaagctcccggtgaccacggagatggtagagtgcagcctggagcggcagctcagcttggagcaggaggtccagcaagggaacattttcatcgtggactttgagctgctggatggcatcgatgccaacaaaacagacccctgcacactccagttcctggccgctcccatctgcttgctgtataagaacctggccaacaagattgtccccattgccatccagctcaaccaaatcccgggagatgagaaccctattttcctcccttcggatgcaaaatacgactggcttttggccaaaatctgggtgcgttccagtgacttccacgtccaccagaccatcacccaccttctgcgaacacatctggtgtctgaggtttttggcattgcaatgtaccgccagctgcctgctgtgcaccccattttcaagctgctggtggcacacgtgagattcaccattgcaatcaacaccaaggcccgtgagcagctcatctgcgagtgtggcctctttgacaaggccaacgccacagggggcggtgggcacgtgcagatggtgcagagggccatgaaggacctgacctatgcctccctgtgctttcccgaggccatcaaggcccggggcatggagagcaaagaagacatcccctactacttctaccgggacgacgggctcctggtgtgggaagccatcaggacgttcacggccgaggtggtagacatctactacgagggcgaccaggtggtggaggaggacccggagctgcaggacttcgtgaacgatgtctacgtgtacggcatgcggggccgcaagtcctcaggcttccccaagtcggtcaagagccgggagcagctgtcggagtacctgaccgtggtgatcttcaccgcctccgcccagcacgccgcggtcaacttcggccaggtaggcagggccgggcccgctgggcagggctcccttctcaaggccgctgcctcctcccccgccccggttctgcacgcgtactgcaccctcggacagcctcggggcctggcacgggacttgcaggatggattctgcccgctcagccaagggcgctggccgcggggaaagaggatggacggactgcagggcccgctggagttggggggcacggggaggacggggcccagggggcagctgggcagcagggcttcgggggtgcccacgcttgctggcggtcgtctccgcagtacgactggtgctcctggatccccaatgcgcccccaaccatgcgagccccgccaccgactgccaagggcgtggtgaccattgagcagatcgtggacacgctgcccgaccgcggccgctcctgctggcatctgggtgcagtgtgggcgctgagccagttccaggaaaacgagctgttcctgggcatgtacccagaagagcattttatcgagaagcctgtgaaggaagccatggcccgattccgcaagaacctcgaggccattgtcagcgtgattgctgagcgcaacaagaagaagcagctgccatattactacttgtccccagaccggattccgaacagtgtggccatctgagcacactgccagtctcactgtgggaaggccagctgccccagccagatggactccagcctgcctggcaggctgtctggccaggcctcttggcagtcacatctcttcctccgaggccagtacctttccatttattctttgatcttcagggaactgcatagattgatcaaagtgtaaacaccatagggacccattctacacagagcaggactgcacagcgtcctgtccacacccagctcagcatttccacaccaagcagcaacagcaaatcacgaccactgatagatgtctattcttgttggagacatgggatgattattttctgttctatttgtgcttagtccaattccttgcacatagtaggtacccaattcaattactattgaatgaattaagaattggttgccataaaaataaatcagttcatttaaaa

SEQ ID NO: 371133 - DNA, 945 bp, Homo sapiens
ccaggctggtaccggccgcaggtcctatgatcgtgtacggcatgcggggccgcaagtcctcaggcttccccaagtcggtcaagagccgggagcagctgtcggagtacctgaccgtggtgatcttcaccgcctccgcccagcacgccgcggtcaacttcggccagtacgactggtgctcctggatccccaatgcgcccccaaccatgcgagccccgccaccgactgccaagggcgtggtgaccattgagcagatcgtggacacgctgcccgaccgcggccgctcctgctggcatctgggtgcagtgtgggcgctgagccagttccaggaaaacgagctgttcctgggcatgtacccagaagagcattttatcgagaagcctgtgaaggaagccatggcccgattccgcaagaacctcgaggccattgtcagcgtgattgctgagcgcaacaagaagaagcagctgccatattactacttgtccccagaccggattccgaacagtgtggccatctgagcacactgccagtctcactgtgggaaggccagctgccccagccagatggactccagcctgcctggcaggctgtctggccaggcctcttggcagtcacatctcttcctccgaggccagtacctttccatttattctttgatcttcagggaactgcatagattgatcaaagtgtaaacaccatagggacccattctacacagagcaggactgcacagcgtcctgtccacacccagctcagcatttccacaccaagcagcaacagcaaatcacgaccactgatagatgtctattcttgttggagacatgggatgattattttctgttctatttgtgcttagtccaattccttgcacatagtaggtacccaattcaattactattgaatgaattaagaattggttgccataaaaataaatcagttcatttaaaa

SEQ ID NO: 371134 - DNA, 1503 bp, Homo sapiens
ggctgcggcgctagatgcggacacctggaccgccgcgccgaggctcccggcgctcgctgctcccgcggcccgcgccatgccctcctacacggtcaccgtggccactggcagccagtggttcgccggcactgacgactacatctacctcagcctcgtgggctcggcgggctgcagcgagaagcacctgctggacaagcccttctacaacgacttcgagcgtggcgcggtggattcatacgacgtgactgtggacgaggaactgggcgagatccagctggtcagaatcgagaagcgcaagtactggctgaatgacgactggtacctgaagtacatcacgctgaagacgccccacggggactacatcgagttcccctgctaccgctggatcaccggcgatgtcgaggttgtcctgagggatggacgcgcaaagttggcccgagatgaccaaattcacattctcaagcaacaccgacgtaaagaactggaaacacggcaaaaacaatatcgatggatggagtggaaccctggcttccccttgagcatcgatgccaaatgccacaaggatttaccccgtgatatccagtttgatagtgaaaaaggagtggactttgttctgaattactccaaagcgatggagaacctgttcatcaaccgcttcatgcacatgttccagtcttcttggaatgacttcgccgactttgagaaaatctttgtcaagatcagcaacactatttctgagcgggtcatgaatcactggcaggaagacctgatgtttggctaccagttcctgaatggctgcaaccctgtgttgatccggcgctgcacagagctgcccgagaagctcccggtgaccacggagatggtagagtgcagcctggagcggcagctcagcttggagcaggaggtccagcaagggaacattttcatcgtggactttgagctgctggatggcatcgatgccaacaaaacagacccctgcacactccagttcctggccgctcccatctgcttgctgtataagaacctggccaacaagattgtccccattgccatccagctcaaccaaatcccgggagatgagaaccctattttcctcccttcggatgcaaaatacgactggcttttggccaaaatctgggtgcgttccagtgacttccacgtccaccagaccatcacccaccttctgcgaacacatctggtgtctgaggtttttggcattgcaatgtaccgccagctgcctgctgtgcaccccattttcaagctgctggtggcacacgtgagattcaccattgcaatcaacaccaaggcccgtgagcagctcatctgcgagtgtggcctctttgacaaggtgggtgccctcctaccctacttgttgcctggaagagcccagcctggccgccttcactccctatctgagatctagacaccctttcaggaggcctggaagggtgaaggctggagtctgctcagagcactggctccagcatcctcctgatgtctcca

SEQ ID NO: 371135 - DNA, 947 bp, Homo sapiens
ggctgcggcgctagatgcggacacctggaccgccgcgccgaggctcccggcgctcgctgctcccgcggcccgcgccatgccctcctacacggtcaccgtggccactggcagccagtggttcgccggcactgacgactacatctacctcagcctcgtgggctcggcgggctgcagcgagaagcacctgctggacaagcccttctacaacgacttcgagcgtggcgcggtggattcatacgacgtgactgtggacgaggaactgggcgagatccagctggtcagaatcgagaagcgcaagtactggctgaatgacgactggtacctgaagtacatcacgctgaagacgccccacggggactacatcgagttcccctgctaccgctggatcaccggcgatgtcgaggttgtcctgagggatggacgcgcaaagttggcccgagatgaccaaattcacattctcaagcaacaccgacgtaaagaactggaaacacggcaaaaacaatatcgatggatggagtggaaccctggcttccccttgagcatcgatgccaaatgccacaaggatttaccccgtgatatccagtttgatagtgaaaaaggagtggactttgttctgaattactccaaagcgatggagaacctgttcatcaaccgcttcatgcacatgttccagtcttcttggaatgacttcgccgactttgagaaaatctttgtcaagatcagcaacactatttctgagcgggtcatgaatcactggcaggaagacctgatgtttggctaccagttcctgaatggctgcaaccctgtgttgatccggcgctgcacagagctgcccgagaagctcccggtgaccacggagatggtagagtgcagcctggagcggcagctcagcttggagcaggaggtccagcctgatttttggtccatctgacccatcgtaacctgaa

SEQ ID NO: 371136 - DNA, 1051 bp, Homo sapiens
ggctgcggcgctagatgcggacacctggaccgccgcgccgaggctcccggcgctcgctgctcccgcggcccgcgccatgccctcctacacggtcaccgtggccactggcagccagtggttcgccggcactgacgactacatctacctcagcctcgtgggctcggcgggctgcagcgagaagcacctgctggacaagcccttctacaacgacttcgagcgtggcgcggtggattcatacgacgtgactgtggacgaggaactgggcgagatccagctggtcagaatcgagaagcgcaagtactggctgaatgacgactggtacctgaagtacatcacgctgaagacgccccacggggactacatcgagttcccctgctaccgctggatcaccggcgatgtcgaggttgtcctgagggatggacgcgcaaagttggcccgagatgaccaaattcacattctcaagcaacaccgacgtaaagaactggaaacacggcaaaaacaatatcgatggatggagtggaaccctggcttccccttgagcatcgatgccaaatgccacaaggatttaccccgtgatatccagtttgatagtgaaaaaggagtggactttgttctgaattactccaaagcgatggagaacctgttcatcaaccgcttcatgcacatgttccagtcttcttggaatgacttcgccgactttgagaaaatctttgtcaagatcagcaacactatttctgagcgggtcatgaatcactggcaggaagacctgatgtttggctaccagttcctgaatggctgcaaccctgtgttgatccggcgctgcacagagctgcccgagaagctcccggtgaccacggagatggtagagtgcagcctggagcggcagctcagcttggagcaggaggtccagtcaagcaggtttcagacaccacaaatgccgaatgagctgctgccattccttcatcttaccccgaactgccacaacctgtgaacaccttccatgtgaatcaatcagccttggagtcagaggagagaagtacacattctgagc

SEQ ID NO: 371137 - DNA, 2531 bp, Homo sapiens
ggctgcggcgctagatgcggacacctggaccgccgcgccgaggctcccggcgctcgctgctcccgcggcccgcgccatgccctcctacacggtcaccgtggccactggcagccagtggttcgccggcactgacgactacatctacctcagcctcgtgggctcggcgggctgcagcgagaagcacctgctggacaagcccttctacaacgacttcgagcgtggcgcggtggattcatacgacgtgactgtggacgaggaactgggcgagatccagctggtcagaatcgagaagcgcaagtactggctgaatgacgactggtacctgaagtacatcacgctgaagacgccccacggggactacatcgagttcccctgctaccgctggatcaccggcgatgtcgaggttgtcctgagggatggacgcgcaaagttggcccgagatgaccaaattcacattctcaagcaacaccgacgtaaagaactggaaacacggcaaaaacaatatcgatggatggagtggaaccctggcttccccttgagcatcgatgccaaatgccacaaggatttaccccgtgatatccagtttgatagtgaaaaaggagtggactttgttctgaattactccaaagcgatggagaacctgttcatcaaccgcttcatgcacatgttccagtcttcttggaatgacttcgccgactttgagaaaatctttgtcaagatcagcaacactatttctgagcgggtcatgaatcactggcaggaagacctgatgtttggctaccagttcctgaatggctgcaaccctgtgttgatccggcgctgcacagagctgcccgagaagctcccggtgaccacggagatggtagagtgcagcctggagcggcagctcagcttggagcaggaggtccagcaagggaacattttcatcgtggactttgagctgctggatggcatcgatgccaacaaaacagacccctgcacactccagttcctggccgctcccatctgcttgctgtataagaacctggccaacaagattgtccccattgccatccagctcaaccaaatcccgggagatgagaaccctattttcctcccttcggatgcaaaatacgactggcttttggccaaaatctgggtgcgttccagtgacttccacgtccaccagaccatcacccaccttctgcgaacacatctggtgtctgaggtttttggcattgcaatgtaccgccagctgcctgctgtgcaccccattttcaagctgctggtggcacacgtgagattcaccattgcaatcaacaccaaggcccgtgagcagctcatctgcgagtgtggcctctttgacaaggccaacgccacagggggcggtgggcacgtgcagatggtgcagagggccatgaaggacctgacctatgcctccctgtgctttcccgaggccatcaaggcccggggcatggagagcaaagaagacatcccctactacttctaccgggacgacgggctcctggtgtgggaagccatcaggacgttcacggccgaggtggtagacatctactacgagggcgaccaggtggtggaggaggacccggagctgcaggacttcgtgaacgatgtctacgtgtacggcatgcggggccgcaagtcctcaggcttccccaagtcggtcaagagccgggagcagctgtcggagtacctgaccgtggtgatcttcaccgcctccgcccagcacgccgcggtcaacttcggccagtacgactggtgctcctggatccccaatgcgcccccaaccatgcgagccccgccaccgactgccaagggcgtggtgaccattgagcagatcgtggacacgctgcccgaccgcggccgctcctgctggcatctgggtgcagtgtgggcgctgagccagttccaggaaaacgagctgttcctgggcatgtacccagaagagcattttatcgagaagcctgtgaaggaagccatggcccgattccgcaagaacctcgaggccattgtcagcgtgattgctgagcgcaacaagaagaagcagctgccatattactacttgtccccagaccggattccgaacagtgtggccatctgagcacactgccagtctcactgtgggaaggccagctgccccagccagatggactccagcctgcctggcaggctgtctggccaggcctcttggcagtcacatctcttcctccgaggccagtacctttccatttattctttgatcttcagggaactgcatagattgatcaaagtgtaaacaccatagggacccattctacacagagcaggactgcacagcgtcctgtccacacccagctcagcatttccacaccaagcagcaacagcaaatcacgaccactgatagatgtctattcttgttggagacatgggatgattattttctgttctatttgtgcttagtccaattccttgcacatagtaggtacccaattcaattactattgaatgaattaagaattggttgccataaaaataaatcagttcatttaaaa

SEQ ID NO: 371138 - DNA, 2757 bp, Homo sapiens
ggctgcggcgctagatgcggacacctggaccgccgcgccgaggctcccggcgctcgctgctcccgcggcccgcgccatgccctcctacacggtcaccgtggccactggcagccagtggttcgccggcactgacgactacatctacctcagcctcgtgggctcggcgggctgcagcgagaagcacctgctggacaagcccttctacaacgacttcgagcgtggcgcggtggattcatacgacgtgactgtggacgaggaactgggcgagatccagctggtcagaatcgagaagcgcaagtactggctgaatgacgactggtacctgaagtacatcacgctgaagacgccccacggggactacatcgagttcccctgctaccgctggatcaccggcgatgtcgaggttgtcctgagggatggacgcgcaaagttggcccgagatgaccaaattcacattctcaagcaacaccgacgtaaagaactggaaacacggcaaaaacaatatcgatggatggagtggaaccctggcttccccttgagcatcgatgccaaatgccacaaggatttaccccgtgatatccagtttgatagtgaaaaaggagtggactttgttctgaattactccaaagcgatggagaacctgttcatcaaccgcttcatgcacatgttccagtcttcttggaatgacttcgccgactttgagaaaatctttgtcaagatcagcaacactatttctgagcgggtcatgaatcactggcaggaagacctgatgtttggctaccagttcctgaatggctgcaaccctgtgttgatccggcgctgcacagagctgcccgagaagctcccggtgaccacggagatggtagagtgcagcctggagcggcagctcagcttggagcaggaggtccagcaagggaacattttcatcgtggactttgagctgctggatggcatcgatgccaacaaaacagacccctgcacactccagttcctggccgctcccatctgcttgctgtataagaacctggccaacaagattgtccccattgccatccagctcaaccaaatcccgggagatgagaaccctattttcctcccttcggatgcaaaatacgactggcttttggccaaaatctgggtgcgttccagtgacttccacgtccaccagaccatcacccaccttctgcgaacacatctggtgtctgaggtttttggcattgcaatgtaccgccagctgcctgctgtgcaccccattttcaagctgctggtggcacacgtgagattcaccattgcaatcaacaccaaggcccgtgagcagctcatctgcgagtgtggcctctttgacaaggccaacgccacagggggcggtgggcacgtgcagatggtgcagagggccatgaaggacctgacctatgcctccctgtgctttcccgaggccatcaaggcccggggcatggagagcaaagaagacatcccctactacttctaccgggacgacgggctcctggtgtgggaagccatcaggacgttcacggccgaggtggtagacatctactacgagggcgaccaggtggtggaggaggacccggagctgcaggacttcgtgaacgatgtctacgtgtacggcatgcggggccgcaagtcctcaggcttccccaagtcggtcaagagccgggagcagctgtcggagtacctgaccgtggtgatcttcaccgcctccgcccagcacgccgcggtcaacttcggccagtacgactggtgctcctggatccccaatgcgcccccaaccatgcgagccccgccaccgactgccaagggcgtggtgaccattgagcagatcgtggacacgctgcccgaccgcggccgctcctgctggcatctgggtgcagtgtgggcgctgagccagttccaggaaaacgagctgttcctgggcatgtacccagaagagcattttatcgagaagcctgtgaaggaagccatggcccgattccgcaagaacctcgaggccattgtcagcgtgattgctgagcgcaacaagaagaagcagctgccatattactacttgtccccagaccggattccgaacagtgtggccatctgagcacactgccagtctcactgtgggaaggccagctgccccagccagatggactccagcctgcctggcaggctgtctggccaggcctcttggcagtcacatctcttcctccgaggccagtacctttccatttattctttgatcttcagggaactgcatagattgatcaaagtgtaaacaccatagggacccattctacacagagcaggactgcacagcgtcctgtccacacccagctcagcatttccacaccaagcagcaacagcaaatcacgaccactgatagatgtctattcttgttggagacatgggatgattattttctgttctatttgtgcttagtccaattccttgcacatagtaggtacccaattcaattactattgaatgaattaagaattggttgccataaaaataaatcagttcatttaaaaaaaaaaaaaaaaaaaaaaaaaaaaaaaaaaataaaaaaaaaaaaaaaaaataaacaaaaaattataaaaataaaaaactaattaaaattaaatatccctgggggggggccccgggcccaattcccccatttgggggggggtataaaataacattggcccgctttttataaactggggaaaaaggagaaaactccttggggtttcccacaaatatataatttgcctg

SEQ ID NO: 371139 - DNA, 2523 bp, Homo sapiens
  misc_feature (6)..(6): n is a, c, g, or t
  misc_feature (10)..(11): n is a, c, g, or t
  misc_feature (16)..(16): n is a, c, g, or t
  misc_feature (34)..(34): n is a, c, g, or t
  misc_feature (41)..(41): n is a, c, g, or t
  misc_feature (49)..(49): n is a, c, g, or t
  misc_feature (52)..(53): n is a, c, g, or t
  misc_feature (87)..(87): n is a, c, g, or t
  misc_feature (90)..(91): n is a, c, g, or t
  misc_feature (105)..(105): n is a, c, g, or t
  misc_feature (107)..(108): n is a, c, g, or t
  misc_feature (114)..(114): n is a, c, g, or t
cctgtngcgnngggtncgatcgtcgcggtgtctngcttgtnccgagcgncgnngtgcctggcctcgcatacatgggtgctgctgtgntcnnttgcgcttcctagntnnttctcngcgcgcgtgacgactacatctacctcagcctcgtgggctcggcgggctgcagcgagaagcacctgctggacaagcccttctacaacgacttcgagcgtggcgcggtggattcatacgacgtgactgtggacgaggaactgggcgagatccagctggtcagaatcgagaagcgcaagtactggctgaatgacgactggtacctgaagtacatcacgctgaagacgccccacggggactacatcgagttcccctgctaccgctggatcaccggcgatgtcgaggttgtcctgagggatggacgcgcaaagttggcccgagatgaccaaattcacattctcaagcaacaccgacgtaaagaactggaaacacggcaaaaacaatatcgatggatggagtggaaccctggcttccccttgagcatcgatgccaaatgccacaaggatttaccccgtgatatccagtttgatagtgaaaaaggagtggactttgttctgaattactccaaagcgatggagaacctgttcatcaaccgcttcatgcacatgttccagtcttcttggaatgacttcgccgactttgagaaaatctttgtcaagatcagcaacactatttctgagcgggtcatgaatcactggcaggaagacctgatgtttggctaccagttcctgaatggctgcaaccctgtgttgatccggcgctgcacagagctgcccgagaagctcccggtgaccacggagatggtagagtgcagcctggagcggcagctcagcttggagcaggaggtccagcaagggaacattttcatcgtggactttgagctgctggatggcatcgatgccaacaaaacagacccctgcacactccagttcctggccgctcccatctgcttgctgtataagaacctggccaacaagattgtccccattgccatccagctcaaccaaatcccgggagatgagaaccctattttcctcccttcggatgcaaaatacgactggcttttggccaaaatctgggtgcgttccagtgacttccacgtccaccagaccatcacccaccttctgcgaacacatctggtgtctgaggtttttggcattgcaatgtaccgccagctgcctgctgtgcaccccattttcaagctgctggtggcacacgtgagattcaccattgcaatcaacaccaaggcccgtgagcagctcatctgcgagtgtggcctctttgacaaggccaacgccacagggggcggtgggcacgtgcagatggtgcagagggccatgaaggacctgacctatgcctccctgtgctttcccgaggccatcaaggcccggggcatggagagcaaagaagacatcccctactacttctaccgggacgacgggctcctggtgtgggaagccatcaggacgttcacggccgaggtggtagacatctactacgagggcgaccaggtggtggaggaggacccggagctgcaggacttcgtgaacgatgtctacgtgtacggcatgcggggccgcaagtcctcaggcttccccaagtcggtcaagagccgggagcagctgtcggagtacctgaccgtggtgatcttcaccgcctccgcccagcacgccgcggtcaacttcggccagtacgactggtgctcctggatccccaatgcgcccccaaccatgcgagccccgccaccgactgccaagggcgtggtgaccattgagcagatcgtggacacgctgcccgaccgcggccgctcctgctggcatctgggtgcagtgtgggcgctgagccagttccaggaaaacgagctgttcctgggcatgtacccagaagagcattttatcgagaagcctgtgaaggaagccatggcccgattccgcaagaacctcgaggccattgtcagcgtgattgctgagcgcaacaagaagaagcagctgccatattactacttgtccccagaccggattccgaacagtgtggccatctgagcacactgccagtctcactgtgggaaggccagctgccccagccagatggactccagcctgcctggcaggctgtctggccaggcctcttggcagtcacatctcttcctccgaggccagtacctttccatttattctttgatcttcagggaactgcatagattgatcaaagtgtaaacaccatagggacccattctacacagagcaggactgcacagcgtcctgtccacacccagctcagcatttccacaccaagcagcaacagcaaatcacgaccactgatagatgtctattcttgttggagacatgggatgattattttctgttctatttgtgcttagtccaattccttgcacatagtaggtacccaattcaattactattgaatgaattaagaattggttgccataaaaataaatcagttcatttaaaa

SEQ ID NO: 371140 - DNA, 3750 bp, Homo sapiens
ggctgcggcgctagatgcggacacctggaccgccgcgccgaggctcccggcgctcgctgctcccgcggcccgcgccatgccctcctacacggtcaccgtggccactggcagccagtggttcgccggcactgacgactacatctacctcagcctcgtgggctcggcgggctgcagcgagaagcacctgctggacaagcccttctacaacgacttcgagcgtggcgcggtggattcatacgacgtgactgtggacgaggaactgggcgagatccagctggtcagaatcgagaagcgcaagtactggctgaatgacgactggtacctgaagtacatcacgctgaagacgccccacggggactacatcgagttcccctgctaccgctggatcaccggcgatgtcgaggttgtcctgagggatggacgcgcaaagttggcccgagatgaccaaattcacattctcaagcaacaccgacgtaaagaactggaaacacggcaaaaacaatatcgatggatggagtggaaccctggcttccccttgagcatcgatgccaaatgccacaaggatttaccccgtgatatccagtttgatagtgaaaaaggagtggactttgttctgaattactccaaagcgatggagaacctgttcatcaaccgcttcatgcacatgttccagtcttcttggaatgacttcgccgactttgagaaaatctttgtcaagatcagcaacactatttctgagcgggtcatgaatcactggcaggaagacctgatgtttggctaccagttcctgaatggctgcaaccctgtgttgatccggcgctgcacagagctgcccgagaagctcccggtgaccacggagatggtagagtgcagcctggagcggcagctcagcttggagcaggaggtccagcaagggaacattttcatcgtggactttgagctgctggatggcatcgatgccaacaaaacagacccctgcacactccagttcctggccgctcccatctgcttgctgtataagaacctggccaacaagattgtccccattgccatccagctcaaccaaatcccgggagatgagaaccctattttcctcccttcggatgcaaaatacgactggcttttggccaaaatctgggtgcgttccagtgacttccacgtccaccagaccatcacccaccttctgcgaacacatctggtgtctgaggtttttggcattgcaatgtaccgccagctgcctgctgtgcaccccattttcaagctgctggtggcacacgtgagattcaccattgcaatcaacaccaaggcccgtgagcagctcatctgcgagtgtggcctctttgacaaggccaacgccacagggggcggtgggcacgtgcagatggtgcagagggccatgaaggacctgacctatgcctccctgtgctttcccgaggccatcaaggcccggggcatggagagcaaagaagacatcccctactacttctaccgggacgacgggctcctggtgtgggaagccatcaggacgttcacggccgaggtggtagacatctactacgagggcgaccaggtggtggaggaggacccggagctgcaggacttcgtgaacgatgtctacgtgtacggcatgcggggccgcaagtcctcaggcttccccaagtcggtcaagagccgggagcagctgtcggagtacctgaccgtggtgatcttcaccgcctccgcccagcacgccgcggtcaacttcggccagtacgactggtgctcctggatccccaatgcgcccccaaccatgcgagccccgccaccgactgccaagggcgtggtgaccattgagcagatcgtggacacgctgcccgaccgcggccgctcctgctggcatctgggtgcagtgtgggcgctgagccagttccaggaaaacgaggtgaagctgggcagggcggggcacagcccaggtcaccccaggttaagcggttcctcagcctcagggctttgtgactcgggccccaaggctcacttggagcaaaggaatcctgacttccaaggctggaagggcccagaaggctgcagccgccaccaggtcccccggcctcagcctggacagagctcagggtgtgcagggcaggagagcacacagcccaggctttgctcactgtcaccagagggtcgtgtgtgacgccccctccccccagctattgacaaagttcttgcacatgtgttttaccctggtactccagagggaatgaccaagagtttcctgggttccttccggacacgtgcatctcatttaacctaacaactgaatccggtgtgtcttcgtggatgcacccgctttggggtagctcagtactgcatagaatggccggaccagtccaacctgctccagactgctgggtgtctgagttgttcccggccaatgtgttggtccctcactggacatccttgtttttgtggcttgcacatgtgttcagtatgaccgcacacattcctagcagacaaattccttggtcaaagaatattgatactgaattgccctccacaaactaaattcaaaatcccattatcaatagcctatgtttcttggacctttccagctcagaagctttgtgatcttaatccaatacagtatttttttaaaatgatatctagctctgccccgcagacatctgtgtgagaatgcaaataagcacaggaccccaacagggcagccaccccttcaggctccctggcccgctttctgccttcctgggctggagaggccagtgctggccccagcgcccctgatgggaggtgagagtgctgcgcaggggtggcccaagacagcaggataccatggctgcaaacaccagcagcccccagcttcatctgcatcatctcgtaaccacttggcagcaggcagttattttcccacttatccatgaagccccagccctggagccttccttagagaagcaggttggaggcgacgacacttgccttcccgaggccctcttgtcaggcagcagagggtgaatatggggaggtgaatagatgctccctccttcatctcccaaacggtggctggccccttgggatgagacaggcctgtcagtttacacgggtagtggattgacctatgtgtgtgtccatgtctgggccctcagctgttcctgggcatgtacccagaagagcattttatcgagaagcctgtgaaggaagccatggcccgattccgcaagaacctcgaggccattgtcagcgtgattgctgagcgcaacaagaagaagcagctgccatattactacttgtccccagaccggattccgaacagtgtggccatctgagcacactgccagtctcactgtgggaaggccagctgccccagccagatggactccagcctgcctggcaggctgtctggccaggcctcttggcagtcacatctcttcctccgaggccagtacctttccatttattctttgatcttcagggaactgcatagattgatcaaagtgtaaacaccatagggacccattctacacagagcaggactgcacagcgtcctgtccacacccagctcagcatttccacaccaagcagcaacagcaaatcacgaccactgatagatgtctattcttgttggagacatgggatgattattttctgttctatttgtgcttagtccaattccttgcacatagtaggtacccaattcaattactattgaatgaattaagaattggttgccataaaaataaatcagttcatttaaaa

SEQ ID NO: 371141 - DNA, 2290 bp, Homo sapiens
ggctgcggcgctagatgcggacacctggaccgccgcgccgaggctcccggcgctcgctgctcccgcggcccgcgccatgccctcctacacggtcaccgtggccactggcagccagtggttcgccggcactgacgactacatctacctcagcctcgtgggctcggcgggctgcagcgagaagcacctgctggacaagcccttctacaacgacttcgagcgtggcgcggtggattcatacgacgtgactgtggacgaggaactgggcgagatccagctggtcagaatcgagaagcgcaagtactggctgaatgacgactggtacctgaagtacatcacgctgaagacgccccacggggactacatcgagttcccctgctaccgctggatcaccggcgatgtcgaggttgtcctgagggatggacgcgcaaagttggcccgagatgaccaaattcacattctcaagcaacaccgacgtaaagaactggaaacacggcaaaaacaatatcgatggatggagtggaaccctggcttccccttgagcatcgatgccaaatgccacaaggatttaccccgtgatatccagtttgatagtgaaaaaggagtggactttgttctgaattactccaaagcgatggagaacctgttcatcaaccgcttcatgcacatgttccagtcttcttggaatgacttcgccgactttgagaaaatctttgtcaagatcagcaacactatttctgagcgggtcatgaatcactggcaggaagacctgatgtttggctaccagttcctgaatggctgcaaccctgtgttgatccggcgctgcacagagctgcccgagaagctcccggtgaccacggagatggtagagtgcagcctggagcggcagctcagcttggagcaggaggtccagcaagggaacattttcatcgtggactttgagctgctggatggcatcgatgccaacaaaacagacccctgcacactccagttcctggccgctcccatctgcttgctgtataagaacctggccaacaagattgtccccattgccatccagctcaaccaaatcccgggagatgagaaccctattttcctcccttcggatgcaaaatacgactggcttttggccaaaatctgggtgcgttccagtgacttccacgtccaccagaccatcacccaccttctgcgaacacatctggtgtctgaggtttttggcattgcaatgtaccgccagctgcctgctgtgcaccccattttcaagctgctggtggcacacgtgagattcaccattgcaatcaacaccaaggcccgtgagcagctcatctgcgagtgtggcctctttgacaaggccaacgccacagggggcggtgggcacgtgcagatggtgcagagggccatgaaggacctgacctatgcctccctgtgctttcccgaggccatcaaggcccggggcatggagagcaaagaagacatcccctactacttctaccgggacgacgggctcctggtgtgggaagccatcaggacgttcacggccgaggtggtagacatctactacgagggcgacctgccaagggcgtggtgaccattgagcagatcgtggacacgctgcccgaccgcggccgctcctgctggcatctgggtgcagtgtgggcgctgagccagttccaggaaaacgagctgttcctgggcatgtacccagaagagcattttatcgagaagcctgtgaaggaagccatggcccgattccgcaagaacctcgaggccattgtcagcgtgattgctgagcgcaacaagaagaagcagctgccatattactacttgtccccagaccggattccgaacagtgtggccatctgagcacactgccagtctcactgtgggaaggccagctgccccagccagatggactccagcctgcctggcaggctgtctggccaggcctcttggcagtcacatctcttcctccgaggccagtacctttccatttattctttgatcttcagggaactgcatagattgatcaaagtgtaaacaccatagggacccattctacacagagcaggactgcacagcgtcctgtccacacccagctcagcatttccacaccaagcagcaacagcaaatcacgaccactgatagatgtctattcttgttggagacatgggatgattattttctgttctatttgtgcttagtccaattccttgcacatagtaggtacccaattcaattactattgaatgaattaagaattggttgccataaaaataaatcagttcatttaaaa

SEQ ID NO: 371142 - DNA, 839 bp, Homo sapiens
  misc_feature (27)..(27): n is a, c, g, or t
  misc_feature (31)..(31): n is a, c, g, or t
  misc_feature (36)..(36): n is a, c, g, or t
  misc_feature (39)..(39): n is a, c, g, or t
cggggcgggggagagcggggccggcancgcncagcncgncgcggtcaacttcggccagtacgactggtgctcctggatccccaatgcgcccccaaccatgcgagccccgccaccgactgccaagggcgtggtgaccattgagcagatcgtggacacgctgcccgaccgcggccgctcctgctggcatctgggtgcagtgtgggcgctgagccagttccaggaaaacgagctgttcctgggcatgtacccagaagagcattttatcgagaagcctgtgaaggaagccatggcccgattccgcaagaacctcgaggccattgtcagcgtgattgctgagcgcaacaagaagaagcagctgccatattactacttgtccccagaccggattccgaacagtgtggccatctgagcacactgccagtctcactgtgggaaggccagctgccccagccagatggactccagcctgcctggcaggctgtctggccaggcctcttggcagtcacatctcttcctccgaggccagtacctttccatttattctttgatcttcagggaactgcatagattgatcaaagtgtaaacaccatagggacccattctacacagagcaggactgcacagcgtcctgtccacacccagctcagcatttccacaccaagcagcaacagcaaatcacgaccactgatagatgtctattcttgttggagacatgggatgattattttctgttctatttgtgcttagtccaattccttgcacatagtaggtacccaattcaattactattgaatgaattaagaattggttgccataaaaataaatcagttcatttaaaa

SEQ ID NO: 371143 - DNA, 1234 bp, Homo sapiens
ggctgcggcgctagatgcggacacctggaccgccgcgccgaggctcccggcgctcgctgctcccgcggcccgcgccatgccctcctacacggtcaccgtggccactggcagccagtggttcgccggcactgacgactacatctacctcagcctcgtgggctcggcgggctgcagcgagaagcacctgctggacaagcccttctacaacgacttcgagcgtggcgcggtggattcatacgacgtgactgtggacgaggaactgggcgagatccagctggtcagaatcgagaagcgcaagtactggctgaatgacgactggtacctgaagtacatcacgctgaagacgccccacggggactacatcgagttcccctgctaccgctggatcaccggcgatgtcgaggttgtcctgagggatggacgcgcaaagttggcccgagatgaccaaattcacattctcaagcaacaccgacgtaaagaactggaaacacggcaaaaacaatatcgatggatggagtggaaccctggcttccccttgagcatcgatgccaaatgccacaaggatttaccccgtgatatccagtttgatagtgaaaaaggagtggactttgttctgaattactccaaagcgatggagaacctgttcatcaaccgcttcatgcacatgttccagtcttcttggaatgacttcgccgactttgagaaaatctttgtcaagatcagcaacactatttctgagcgggtcatgaatcactggcaggaagacctgatgtttggctaccagttcctgaatggctgcaaccctgtgttgatccggcgctgcacagagctgcccgagaagctcccggtgaccacggagatggtagagtgcagcctggagcggcagctcagcttggagcaggaggtccaggtaggggttgatgggctggggaagtggccaaggtcacagtctgtcaggtggaagccagttcctcctggccagtgctcataggccaccaagacgctaactgcaggcccatctggcctacagcagccgcttccttttcctggcagcagtgtcagccagggtcctgggcattatgcagactgtcttgtgcaacatcagaggaggaattgcggggaatgtttctccatgatgctcgagtctgggaacataatgtcaatattttcactatcagtatcaataattacaggagcgtaatcccgtagagcgtaatcccgtctaggagtaatc

SEQ ID NO: 371144 - DNA, 405 bp, Homo sapiens
atcttaccccgaactgccacaacctgtgaacaccttccatgtgaatcaatcagccttggagtcagaggagagaagtacacattctgagctccgctgagtcgcaggaaagggagaggggtgcccagaggtcatcactctttccccaggcctgatttttggtccgtctgctgagcctgatttggacacatctctctgcctcctgcagcaagggaacattttcatcgtggactttgagctgctggatggcatcgatgccaacaaaacagacccctgcacactccagttcctggccgctcccatctgcttgctgtataagaacctggccaacaagattgtccccattgccatccaggtaggctgctggggggcacacctttctgagcagctcagtcctctgcgatccag

SEQ ID NO: 371145 - DNA, 1074 bp, Homo sapiens
atagccatcacctaggctggatgcagtggctcacgcctgtaatcccagcgctttgggaggccgaggcaggctgattatgaggtcaggagttcaagaccatcctggccaacatggtgaaaccctgtctctactaaaaatacaaaaatttagctgggcgtggtggcaggcacctgtaatcccagctacttgggaggttgaggcaagagaatcgcttgaacccgggaggcggagattacagtgagccgagaccgcgccactacactccagcctgggcaacagagcaagactgtctcaaaaacaaacaaacagaaaatacacacactacacgacagcagcgcatcgagctatcctgggtctaaggagataatatacctgtggtaatgtgtgatcctcccaggtttacaggtcttgactcagtacttcatcagcaataggttgtggtcacaggaaatggaagctgcctcaggacctgtagcaacttgcctgcatgctgggttatgttatcttttgagtggtgcccaatacgaggtgtctaggggaaagtcttaagtggttggagcccatgacatttgggtatgatgactagattctttgtacagctgagcctcaataaactcatgcgtacacttgtgagaactcaaatcagaaatggcacagaaatggattacatttctgtgctctgaaatcccacagagttcataaaaatacatttgttgcttttgtgtatacatgtgtaagttacattttattatggaaattgatattagtgaaattgacagctttctatggttaaagattatcctgtaggtgagccaaggttctctgtttttctgatttctcttattcattccctataatttcagcattttcgttctcattgacttaatattcctgagggtattattgtgaatgtctttgtttatgttaactccatacttcaatactttatgtagttttctaataacaccttcagtatgtgttctaatgaaaattttagcagagcacctgccctttctgggtaggtaattatttttttttgttatgaacttttcctatgccatttgaatttctgtg

SEQ ID NO: 371146 - DNA, 372 bp, Homo sapiens
gtttaacttcaacactattgttggttttttgggggaaagtgcagagtgttgttaatgttggcaggcaggagggcaacacttggtctgtccacgaagcctccttcatctctagttctgactgagggttgactgttagccttcggtttcctttgtcactgtattgtaggggttattttaaaatattatcttcaatttatactttattattattatcattattttgaaaagggtcttgctttgtcgcccaggctggagtacagtggtgcaatcacagctcactgcagcctcgacatcctgggctcaagtgatccttccactttggcctcccgagtagccggaactataggtgtgtgccaccatgcccagctaatt

SEQ ID NO: 371147 - DNA, 1724 bp, Homo sapiens
cactaaggaccgagcaccaaataaccaaggaaaaggaagtgagttaaggacgtactcgtcttggtgagagcgtgagctgctgagatttgggagtctgcgctaggcccgcttggagttctgagccgatggaagagttcactcatgtttgcacccgcggtgatgcgtgcttttcgcaagaacaagactctcggctatggagtccccatgttgttgctgattgttggaggttcttttggtcttcgtgagttttctcaaatccgatatgatgctgtgaagagtaaaatggatcctgagcttgaaaaaaaactgaaagagaataaaatatctttagagtcggaatatgagaaaatcaaagactccaagtttgatgactggaagaatattcgaggacccaggccttgggaagatcctgacctcctccaaggaagaaatccagaaagccttaagactaagacaacttgactctgctgattcttttttccttttttttttttttaaataaaaatactattaactggacttcctaatatatacttctatcaagtggaaaggaaattccaggcccatggaaacttggatatgggtaatttgatgacaaataatcttcactaaaggtcatgtacaggtttttatacttcccagctattccatctgtggatgaaagtaacaatgttggccacgtatattttacacctcgaaataaaaaatgtgaatactgctccaaaaacagagtcacgtattccactctccaactacccacatattccttttgcaatagccattagggcatcattttgatatttcattctgatttctgattctctgatttctgattcctaatgaggacagtaggtctggatccaaattctcacagtaaaatcaagcagtaattttctctcatatctattaggggaaagaaaaatgatcacagtctgctaagagtcttgattttctttgtaatgcctcacatagtatgataatcagtctccaaagcatcacatgataattacaatgataccattaacatgtcaaggaaattatattatttatggttgtcaaaaattatgaagtagtgtatgattataagcagatatggcaaatttgtgcagtaaatccatagatgactacattttgagaaatactaagataatactaaaaattatgccttagcataatttgcatgcaaaattgccctctagtgtttttgttttgttttgagacatagtctcgctctgttcgcccaggctggagtgcaggggcacgatctctgctcactgcaagctctgcttcccgggttcacaccattctcctgcctcagcatcctgagtagctgggactacaggcacatgctgtcacacccggctaattttttgtatttagtagagatggggtttcaccacgttagccaggatggtctccatctcctgaccttgtgatccgcccacctcggcctcacaaattgctgggattacaggtgtgagccaccacgcctggccgaaagttagttgttttgaactcattttctcctttttacccctgcctttatcagcttctaccttctggtttcatgctgagttctagttgcctaaagtctccattgaaacactcctgttataattgccataaaatcataaatccactccccctttctcctcctagtcaaaatttgtattcttttcagcaggttggttttaataaaaagtaaattaagttgaaaaaaaaat

SEQ ID NO: 371148 - DNA, 721 bp, Homo sapiens
cactaaggaccgagcaccaaataaccaaggaaaaggaagtgagttaaggacgtactcgtcttggtgagagcgtgagctgctgagatttgggagtctgcgctaggcccgcttggagttctgagccgatggaagagttcactcatgtttgcacccgcggtgatgcgtgcttttcgcaagaacaagactctcggctatggagtccccatgttgttgctgattgttggaggttcttttggtcttcgtgagttttctcaaatccgatatgatgctgtgaagagtaaaatggatcctgagcttgaaaaaaaactgaaagagaataaaatatctttagagtcggaatatgagaaaatcaaagactccaagtttgatgactggaagaatattcgaggacccaggccttgggaagatcctgacctcctccaaggaagaaatccagaaagccttaagactaagacaacttgactctgctgattcttttttccttttttttttttttaaataaaaatacctgggaaaaaaaaaaaaaacacaaaaaaaaaaaaaaaaaaaaaaaaaaccgcgggggggctatttgggggggggcgaaaaaaagagaaaaaaaagggacacaagggcaaagggggtaccgagaccccaattgttgagcacagagggaaagaacgcggggaccccaaaaagagagcgagcaaaacatgagaagaacgaggtaaacccggtatag

SEQ ID NO: 371149 - DNA, 1444 bp, Homo sapiens
ggactcaatctccagactatctccccagagaatcttgtcaaggcttggctttaagctttgttgggaaaatcaaagactccaagtttgatgactggaagaatattcgaggacccaggccttgggaagatcctgacctcctccaaggaagaaatccagaaagccttaagactaagacaacttgactctgctgattcttttttccttttttttttttttaaataaaaatactattaactggacttcctaatatatacttctatcaagtggaaaggaaattccaggcccatggaaacttggatatgggtaatttgatgacaaataatcttcactaaaggtcatgtacaggtttttatacttcccagctattccatctgtggatgaaagtaacaatgttggccacgtatattttacacctcgaaataaaaaatgtgaatactgctccaaaaacagagtcacgtattccactctccaactacccacatattccttttgcaatagccattagggcatcattttgatatttcattctgatttctgattctctgatttctgattcctaatgaggacagtaggtctggatccaaattctcacagtaaaatcaagcagtaattttctctcatatctattaggggaaagaaaaatgatcacagtctgctaagagtcttgattttctttgtaatgcctcacatagtatgataatcagtctccaaagcatcacatgataattacaatgataccattaacatgtcaaggaaattatattatttatggttgtcaaaaattatgaagtagtgtatgattataagcagatatggcaaatttgtgcagtaaatccatagatgactacattttgagaaatactaagataatactaaaaattatgccttagcataatttgcatgcaaaattgccctctagtgtttttgttttgttttgagacatagtctcgctctgttcgcccaggctggagtgcaggggcacgatctctgctcactgcaagctctgcttcccgggttcacaccattctcctgcctcagcatcctgagtagctgggactacaggcacatgctgtcacacccggctaattttttgtatttagtagagatggggtttcaccacgttagccaggatggtctccatctcctgaccttgtgatccgcccacctcggcctcacaaattgctgggattacaggtgtgagccaccacgcctggccgaaagttagttgttttgaactcattttctcctttttacccctgcctttatcagcttctaccttctggtttcatgctgagttctagttgcctaaagtctccattgaaacactcctgttataattgccataaaatcataaatccactccccctttctcctcctagtcaaaatttgtattcttttcagcaggttggttttaataaaaagtaaattaagttgaaaaaaaaat

SEQ ID NO: 371150 - DNA, 1951 bp, Homo sapiens
ctctcttcctgcttctgctatcttcctggcgcaccctgctggcgcaagtagccttgagccttgggactgggcctgagaagggaagagtttttctttcatctccttaagctttcaggccccggggagaatcttacattcctgtctatttggttatagaaaagggaaaagggatgactttctcaataactacttcaggcgtgacataggggtggcgtgggcaccttggaaaaagaaaaccttaattttttgggtattcttgagagacgggctggtgtccaccatgtcgttgtatcaggagcatcatctggattgtctggaaacacatctgtgcctgcaagacagttatgttgagaggacaaggcggtgtggacagggagaggcatggcctcatttgctgcttcacaaatgaaagaccctgtctggattaaggagggaagttgctgattgttggaggttcttttggtcttcgtgagttttctcaaatccgatatgatgctgtgaagagtaaaatggatcctgagcttgaaaaaaaactgaaagagaataaaatatctttagagtcggaatatgagaaaatcaaagactccaagtttgatgactggaagaatattcgaggacccaggccttgggaagatcctgacctcctccaaggaagaaatccagaaagccttaagactaagacaacttgactctgctgattcttttttccttttttttttttttaaataaaaatactattaactggacttcctaatatatacttctatcaagtggaaaggaaattccaggcccatggaaacttggatatgggtaatttgatgacaaataatcttcactaaaggtcatgtacaggtttttatacttcccagctattccatctgtggatgaaagtaacaatgttggccacgtatattttacacctcgaaataaaaaatgtgaatactgctccaaaaacagagtcacgtattccactctccaactacccacatattccttttgcaatagccattagggcatcattttgatatttcattctgatttctgattctctgatttctgattcctaatgaggacagtaggtctggatccaaattctcacagtaaaatcaagcagtaattttctctcatatctattaggggaaagaaaaatgatcacagtctgctaagagtcttgattttctttgtaatgcctcacatagtatgataatcagtctccaaagcatcacatgataattacaatgataccattaacatgtcaaggaaattatattatttatggttgtcaaaaattatgaagtagtgtatgattataagcagatatggcaaatttgtgcagtaaatccatagatgactacattttgagaaatactaagataatactaaaaattatgccttagcataatttgcatgcaaaattgccctctagtgtttttgttttgttttgagacatagtctcgctctgttcgcccaggctggagtgcaggggcacgatctctgctcactgcaagctctgcttcccgggttcacaccattctcctgcctcagcatcctgagtagctgggactacaggcacatgctgtcacacccggctaattttttgtatttagtagagatggggtttcaccacgttagccaggatggtctccatctcctgaccttgtgatccgcccacctcggcctcacaaattgctgggattacaggtgtgagccaccacgcctggccgaaagttagttgttttgaactcattttctcctttttacccctgcctttatcagcttctaccttctggtttcatgctgagttctagttgcctaaagtctccattgaaacactcctgttataattgccataaaatcataaatccactccccctttctcctcctagtcaaaatttgtattcttttcagcaggttggttttaataaaaagtaaattaagttgaaaaaaaaat

SEQ ID NO: 371151 - DNA, 1559 bp, Homo sapiens
tgcccataagagccctactccacaagtttaaatgcatacccacgtcaagggctttttccaacaccaattttgcgaccttaagaccccagtggatttctttaataacgcccccgccccatggatcctgagcttgaaaaaaaactgaaagagaataaaatatctttagagtcggaatatgagaaaatcaaagactccaagtttgatgactggaagaatattcgaggacccaggccttgggaagatcctgacctcctccaaggaagaaatccagaaagccttaagactaagacaacttgactctgctgattcttttttccttttttttttttttaaataaaaatactattaactggacttcctaatatatacttctatcaagtggaaaggaaattccaggcccatggaaacttggatatgggtaatttgatgacaaataatcttcactaaaggtcatgtacaggtttttatacttcccagctattccatctgtggatgaaagtaacaatgttggccacgtatattttacacctcgaaataaaaaatgtgaatactgctccaaaaacagagtcacgtattccactctccaactacccacatattccttttgcaatagccattagggcatcattttgatatttcattctgatttctgattctctgatttctgattcctaatgaggacagtaggtctggatccaaattctcacagtaaaatcaagcagtaattttctctcatatctattaggggaaagaaaaatgatcacagtctgctaagagtcttgattttctttgtaatgcctcacatagtatgataatcagtctccaaagcatcacatgataattacaatgataccattaacatgtcaaggaaattatattatttatggttgtcaaaaattatgaagtagtgtatgattataagcagatatggcaaatttgtgcagtaaatccatagatgactacattttgagaaatactaagataatactaaaaattatgccttagcataatttgcatgcaaaattgccctctagtgtttttgttttgttttgagacatagtctcgctctgttcgcccaggctggagtgcaggggcacgatctctgctcactgcaagctctgcttcccgggttcacaccattctcctgcctcagcatcctgagtagctgggactacaggcacatgctgtcacacccggctaattttttgtatttagtagagatggggtttcaccacgttagccaggatggtctccatctcctgaccttgtgatccgcccacctcggcctcacaaattgctgggattacaggtgtgagccaccacgcctggccgaaagttagttgttttgaactcattttctcctttttacccctgcctttatcagcttctaccttctggtttcatgctgagttctagttgcctaaagtctccattgaaacactcctgttataattgccataaaatcataaatccactccccctttctcctcctagtcaaaatttgtattcttttcagcaggttggttttaataaaaagtaaattaagttgaaaaaaaaat

SEQ ID NO: 371152 - DNA, 1652 bp, Homo sapiens
cactaaggaccgagcaccaaataaccaaggaaaaggaagtgagttaaggacgtactcgtcttggtgagagcgtgagctgctgagatttgggagtctgcgctaggcccgcttggagttctgagccgatggaagagttcactcatgtttgcacccgcggtgatgcgtgcttttcgcaagaacaagactctcggctatggagtccccatgttgatggatcctgagcttgaaaaaaaactgaaagagaataaaatatctttagagtcggaatatgagaaaatcaaagactccaagtttgatgactggaagaatattcgaggacccaggccttgggaagatcctgacctcctccaaggaagaaatccagaaagccttaagactaagacaacttgactctgctgattcttttttccttttttttttttttaaataaaaatactattaactggacttcctaatatatacttctatcaagtggaaaggaaattccaggcccatggaaacttggatatgggtaatttgatgacaaataatcttcactaaaggtcatgtacaggtttttatacttcccagctattccatctgtggatgaaagtaacaatgttggccacgtatattttacacctcgaaataaaaaatgtgaatactgctccaaaaacagagtcacgtattccactctccaactacccacatattccttttgcaatagccattagggcatcattttgatatttcattctgatttctgattctctgatttctgattcctaatgaggacagtaggtctggatccaaattctcacagtaaaatcaagcagtaattttctctcatatctattaggggaaagaaaaatgatcacagtctgctaagagtcttgattttctttgtaatgcctcacatagtatgataatcagtctccaaagcatcacatgataattacaatgataccattaacatgtcaaggaaattatattatttatggttgtcaaaaattatgaagtagtgtatgattataagcagatatggcaaatttgtgcagtaaatccatagatgactacattttgagaaatactaagataatactaaaaattatgccttagcataatttgcatgcaaaattgccctctagtgtttttgttttgttttgagacatagtctcgctctgttcgcccaggctggagtgcaggggcacgatctctgctcactgcaagctctgcttcccgggttcacaccattctcctgcctcagcatcctgagtagctgggactacaggcacatgctgtcacacccggctaattttttgtatttagtagagatggggtttcaccacgttagccaggatggtctccatctcctgaccttgtgatccgcccacctcggcctcacaaattgctgggattacaggtgtgagccaccacgcctggccgaaagttagttgttttgaactcattttctcctttttacccctgcctttatcagcttctaccttctggtttcatgctgagttctagttgcctaaagtctccattgaaacactcctgttataattgccataaaatcataaatccactccccctttctcctcctagtcaaaatttgtattcttttcagcaggttggttttaataaaaagtaaattaagttgaaaaaaaaat

SEQ ID NO: 371153 - DNA, 1733 bp, Homo sapiens
cactaaggaccgagcaccaaataaccaaggaaaaggaagtgagttaaggacgtactcgtcttggtgagagcgtgagctgctgagatttgggagtctgcgctaggcccgcttggagttctgagccgatggaagagttcactcatgtttgcacccgcggtgatgcgtgcttttcgcaagaacaagactctcggctatggagtccccatgttggtgtactaggatctgtctgcttgtgagcgtggcgtctttcccatcgtcgaacgcggtcattgttactacccttgattcacaatggatcctgagcttgaaaaaaaactgaaagagaataaaatatctttagagtcggaatatgagaaaatcaaagactccaagtttgatgactggaagaatattcgaggacccaggccttgggaagatcctgacctcctccaaggaagaaatccagaaagccttaagactaagacaacttgactctgctgattcttttttccttttttttttttttaaataaaaatactattaactggacttcctaatatatacttctatcaagtggaaaggaaattccaggcccatggaaacttggatatgggtaatttgatgacaaataatcttcactaaaggtcatgtacaggtttttatacttcccagctattccatctgtggatgaaagtaacaatgttggccacgtatattttacacctcgaaataaaaaatgtgaatactgctccaaaaacagagtcacgtattccactctccaactacccacatattccttttgcaatagccattagggcatcattttgatatttcattctgatttctgattctctgatttctgattcctaatgaggacagtaggtctggatccaaattctcacagtaaaatcaagcagtaattttctctcatatctattaggggaaagaaaaatgatcacagtctgctaagagtcttgattttctttgtaatgcctcacatagtatgataatcagtctccaaagcatcacatgataattacaatgataccattaacatgtcaaggaaattatattatttatggttgtcaaaaattatgaagtagtgtatgattataagcagatatggcaaatttgtgcagtaaatccatagatgactacattttgagaaatactaagataatactaaaaattatgccttagcataatttgcatgcaaaattgccctctagtgtttttgttttgttttgagacatagtctcgctctgttcgcccaggctggagtgcaggggcacgatctctgctcactgcaagctctgcttcccgggttcacaccattctcctgcctcagcatcctgagtagctgggactacaggcacatgctgtcacacccggctaattttttgtatttagtagagatggggtttcaccacgttagccaggatggtctccatctcctgaccttgtgatccgcccacctcggcctcacaaattgctgggattacaggtgtgagccaccacgcctggccgaaagttagttgttttgaactcattttctcctttttacccctgcctttatcagcttctaccttctggtttcatgctgagttctagttgcctaaagtctccattgaaacactcctgttataattgccataaaatcataaatccactccccctttctcctcctagtcaaaatttgtattcttttcagcaggttggttttaataaaaagtaaattaagttgaaaaaaaaat

SEQ ID NO: 371154 - DNA, 1499 bp, Homo sapiens
ctccttgcctcagtcggccgtattctttccgcgccaccgttgttaggaggtaccgaaatggatcctgagcttgaaaaaaaactgaaagagaataaaatatctttagagtcggaatatgagaaaatcaaagactccaagtttgatgactggaagaatattcgaggacccaggccttgggaagatcctgacctcctccaaggaagaaatccagaaagccttaagactaagacaacttgactctgctgattcttttttccttttttttttttttaaataaaaatactattaactggacttcctaatatatacttctatcaagtggaaaggaaattccaggcccatggaaacttggatatgggtaatttgatgacaaataatcttcactaaaggtcatgtacaggtttttatacttcccagctattccatctgtggatgaaagtaacaatgttggccacgtatattttacacctcgaaataaaaaatgtgaatactgctccaaaaacagagtcacgtattccactctccaactacccacatattccttttgcaatagccattagggcatcattttgatatttcattctgatttctgattctctgatttctgattcctaatgaggacagtaggtctggatccaaattctcacagtaaaatcaagcagtaattttctctcatatctattaggggaaagaaaaatgatcacagtctgctaagagtcttgattttctttgtaatgcctcacatagtatgataatcagtctccaaagcatcacatgataattacaatgataccattaacatgtcaaggaaattatattatttatggttgtcaaaaattatgaagtagtgtatgattataagcagatatggcaaatttgtgcagtaaatccatagatgactacattttgagaaatactaagataatactaaaaattatgccttagcataatttgcatgcaaaattgccctctagtgtttttgttttgttttgagacatagtctcgctctgttcgcccaggctggagtgcaggggcacgatctctgctcactgcaagctctgcttcccgggttcacaccattctcctgcctcagcatcctgagtagctgggactacaggcacatgctgtcacacccggctaattttttgtatttagtagagatggggtttcaccacgttagccaggatggtctccatctcctgaccttgtgatccgcccacctcggcctcacaaattgctgggattacaggtgtgagccaccacgcctggccgaaagttagttgttttgaactcattttctcctttttacccctgcctttatcagcttctaccttctggtttcatgctgagttctagttgcctaaagtctccattgaaacactcctgttataattgccataaaatcataaatccactccccctttctcctcctagtcaaaatttgtattcttttcagcaggttggttttaataaaaagtaaattaagttgaaaaaaaaat

SEQ ID NO: 371155 - DNA, 1670 bp, Homo sapiens
cactaaggaccgagcaccaaataaccaaggaaaaggaagtgagttaaggacgtactcgtcttggtgagagcgtgagctgctgagatttgggagtctgcgctaggcccgcttggagttctgagccgatggaagagttcactcatgtttgcacccgcggtgatgcgtgcttttcgcaagaacaagactctcggctatggagtccccatgttgttgctgattgttggaggttcttttggtcttcgtgagttttctcaaatccgatatgatgctgtgaagagtaaaatggatcctgagcttgaaaaaaaactgaaagagaataaaatatctttagagtcggaatatgagtgggaagatcctgacctcctccaaggaagaaatccagaaagccttaagactaagacaacttgactctgctgattcttttttccttttttttttttttaaataaaaatactattaactggacttcctaatatatacttctatcaagtggaaaggaaattccaggcccatggaaacttggatatgggtaatttgatgacaaataatcttcactaaaggtcatgtacaggtttttatacttcccagctattccatctgtggatgaaagtaacaatgttggccacgtatattttacacctcgaaataaaaaatgtgaatactgctccaaaaacagagtcacgtattccactctccaactacccacatattccttttgcaatagccattagggcatcattttgatatttcattctgatttctgattctctgatttctgattcctaatgaggacagtaggtctggatccaaattctcacagtaaaatcaagcagtaattttctctcatatctattaggggaaagaaaaatgatcacagtctgctaagagtcttgattttctttgtaatgcctcacatagtatgataatcagtctccaaagcatcacatgataattacaatgataccattaacatgtcaaggaaattatattatttatggttgtcaaaaattatgaagtagtgtatgattataagcagatatggcaaatttgtgcagtaaatccatagatgactacattttgagaaatactaagataatactaaaaattatgccttagcataatttgcatgcaaaattgccctctagtgtttttgttttgttttgagacatagtctcgctctgttcgcccaggctggagtgcaggggcacgatctctgctcactgcaagctctgcttcccgggttcacaccattctcctgcctcagcatcctgagtagctgggactacaggcacatgctgtcacacccggctaattttttgtatttagtagagatggggtttcaccacgttagccaggatggtctccatctcctgaccttgtgatccgcccacctcggcctcacaaattgctgggattacaggtgtgagccaccacgcctggccgaaagttagttgttttgaactcattttctcctttttacccctgcctttatcagcttctaccttctggtttcatgctgagttctagttgcctaaagtctccattgaaacactcctgttataattgccataaaatcataaatccactccccctttctcctcctagtcaaaatttgtattcttttcagcaggttggttttaataaaaagtaaattaagttgaaaaaaaaat

SEQ ID NO: 371156 - DNA, 1508 bp, Homo sapiens
aagcacacttataatattacgagtagtaacttctcataaaaaagaaagaataaatgctactaggctacctgtagctgtgaaaatgaactgtaaagtagactaaaatatctttagagtcggaatatagagaaaatcaaagactccaagtttgatgactggaagaatattcgaggacccaggccttgggaagatcctgacctcctccaaggaagaaatccagaaagccttaagactaagacaacttgactctgctgattcttttttccttttttttttttttaaataaaaatactattaactggacttcctaatatatacttctatcaagtggaaaggaaattccaggcccatggaaacttggatatgggtaatttgatgacaaataatcttcactaaaggtcatgtacaggtttttatacttcccagctattccatctgtggatgaaagtaacaatgttggccacgtatattttacacctcgaaataaaaaatgtgaatactgctccaaaaacagagtcacgtattccactctccaactacccacatattccttttgcaatagccattagggcatcattttgatatttcattctgatttctgattctctgatttctgattcctaatgaggacagtaggtctggatccaaattctcacagtaaaatcaagcagtaattttctctcatatctattaggggaaagaaaaatgatcacagtctgctaagagtcttgattttctttgtaatgcctcacatagtatgataatcagtctccaaagcatcacatgataattacaatgataccattaacatgtcaaggaaattatattatttatggttgtcaaaaattatgaagtagtgtatgattataagcagatatggcaaatttgtgcagtaaatccatagatgactacattttgagaaatactaagataatactaaaaattatgccttagcataatttgcatgcaaaattgccctctagtgtttttgttttgttttgagacatagtctcgctctgttcgcccaggctggagtgcaggggcacgatctctgctcactgcaagctctgcttcccgggttcacaccattctcctgcctcagcatcctgagtagctgggactacaggcacatgctgtcacacccggctaattttttgtatttagtagagatggggtttcaccacgttagccaggatggtctccatctcctgaccttgtgatccgcccacctcggcctcacaaattgctgggattacaggtgtgagccaccacgcctggccgaaagttagttgttttgaactcattttctcctttttacccctgcctttatcagcttctaccttctggtttcatgctgagttctagttgcctaaagtctccattgaaacactcctgttataattgccataaaatcataaatccactccccctttctcctcctagtcaaaatttgtattcttttcagcaggttggttttaataaaaagtaaattaagttgaaaaaaaaat

SEQ ID NO: 371157 - DNA, 1494 bp, Homo sapiens
  misc_feature (51)..(51): n is a, c, g, or t
aagtacgcgcacgacgatcgctctcagaggatctaacctccccaccttcantatggatcctgagcttgaaaaaaaactgaaagagaataaaatatctttagagtcggaatatgagaaaatcaaagactccaagtttgatgactggaagaatattcgaggacccaggccttgggaagatcctgacctcctccaaggaagaaatccagaaagccttaagactaagacaacttgactctgctgattcttttttccttttttttttttttaaataaaaatactattaactggacttcctaatatatacttctatcaagtggaaaggaaattccaggcccatggaaacttggatatgggtaatttgatgacaaataatcttcactaaaggtcatgtacaggtttttatacttcccagctattccatctgtggatgaaagtaacaatgttggccacgtatattttacacctcgaaataaaaaatgtgaatactgctccaaaaacagagtcacgtattccactctccaactacccacatattccttttgcaatagccattagggcatcattttgatatttcattctgatttctgattctctgatttctgattcctaatgaggacagtaggtctggatccaaattctcacagtaaaatcaagcagtaattttctctcatatctattaggggaaagaaaaatgatcacagtctgctaagagtcttgattttctttgtaatgcctcacatagtatgataatcagtctccaaagcatcacatgataattacaatgataccattaacatgtcaaggaaattatattatttatggttgtcaaaaattatgaagtagtgtatgattataagcagatatggcaaatttgtgcagtaaatccatagatgactacattttgagaaatactaagataatactaaaaattatgccttagcataatttgcatgcaaaattgccctctagtgtttttgttttgttttgagacatagtctcgctctgttcgcccaggctggagtgcaggggcacgatctctgctcactgcaagctctgcttcccgggttcacaccattctcctgcctcagcatcctgagtagctgggactacaggcacatgctgtcacacccggctaattttttgtatttagtagagatggggtttcaccacgttagccaggatggtctccatctcctgaccttgtgatccgcccacctcggcctcacaaattgctgggattacaggtgtgagccaccacgcctggccgaaagttagttgttttgaactcattttctcctttttacccctgcctttatcagcttctaccttctggtttcatgctgagttctagttgcctaaagtctccattgaaacactcctgttataattgccataaaatcataaatccactccccctttctcctcctagtcaaaatttgtattcttttcagcaggttggttttaataaaaagtaaattaagttgaaaaaaaaat

SEQ ID NO: 371158 - DNA, 745 bp, Homo sapiens
  misc_feature (708)..(708): n is a, c, g, or t
cactaaggaccgagcaccaaataaccaaggaaaaggaagtgagttaaggacgtactcgtcttggtgagagcgtgagctgctgagatttgggagtctgcgctaggcccgcttggagttctgagccgatggaagagttcactcatgtttgcacccgcggtgatgcgtgcttttcgcaagaacaagactctcggctatggagtccccatgttgttgctgattgttggaggttcttttggtcttcgtgagttttctcaaatccgatatgatgctgtgaagagtaaaatggatcctgagcttgaaaaaaaactgaaagagaataaaatatctttagagtcggaatatgagaaaatcaaagactccaagtttgatgactggaagaatattcgaggacccaggccttgggaagatcctgacctcctccaaggaagaaatccagaaagccttaagactaagacaacttgactctgctgattcttttttccttttttttttttttaaataaaaatactattaactggacttcctaatatatacttctatcaagtggaaaggaaattccaggcccatggaaacttggatatgggtaatttgatgacaaataatcttcactaaaggtcatgtacaggtttttatacttcccagctattccatctgtggatgaaagtaacaatgttggccacgtatattttacacctcgaaataaaaaantggcctcgttggcctcagcggtggagctctgcggcag

SEQ ID NO: 371159 - DNA, 1495 bp, Homo sapiens
acggcgtacaaagaaaaatacgaggacgaaagcaagccttttaggtaacctggatggatcctgagcttgaaaaaaaactgaaagagaataaaatatctttagagtcggaatatgagaaaatcaaagactccaagtttgatgactggaagaatattcgaggacccaggccttgggaagatcctgacctcctccaaggaagaaatccagaaagccttaagactaagacaacttgactctgctgattcttttttccttttttttttttttaaataaaaatactattaactggacttcctaatatatacttctatcaagtggaaaggaaattccaggcccatggaaacttggatatgggtaatttgatgacaaataatcttcactaaaggtcatgtacaggtttttatacttcccagctattccatctgtggatgaaagtaacaatgttggccacgtatattttacacctcgaaataaaaaatgtgaatactgctccaaaaacagagtcacgtattccactctccaactacccacatattccttttgcaatagccattagggcatcattttgatatttcattctgatttctgattctctgatttctgattcctaatgaggacagtaggtctggatccaaattctcacagtaaaatcaagcagtaattttctctcatatctattaggggaaagaaaaatgatcacagtctgctaagagtcttgattttctttgtaatgcctcacatagtatgataatcagtctccaaagcatcacatgataattacaatgataccattaacatgtcaaggaaattatattatttatggttgtcaaaaattatgaagtagtgtatgattataagcagatatggcaaatttgtgcagtaaatccatagatgactacattttgagaaatactaagataatactaaaaattatgccttagcataatttgcatgcaaaattgccctctagtgtttttgttttgttttgagacatagtctcgctctgttcgcccaggctggagtgcaggggcacgatctctgctcactgcaagctctgcttcccgggttcacaccattctcctgcctcagcatcctgagtagctgggactacaggcacatgctgtcacacccggctaattttttgtatttagtagagatggggtttcaccacgttagccaggatggtctccatctcctgaccttgtgatccgcccacctcggcctcacaaattgctgggattacaggtgtgagccaccacgcctggccgaaagttagttgttttgaactcattttctcctttttacccctgcctttatcagcttctaccttctggtttcatgctgagttctagttgcctaaagtctccattgaaacactcctgttataattgccataaaatcataaatccactccccctttctcctcctagtcaaaatttgtattcttttcagcaggttggttttaataaaaagtaaattaagttgaaaaaaaaat

SEQ ID NO: 371160 - DNA, 4912 bp, Homo sapiens
ctcccaagttgctgggactacaggcacgcaccaccacgccggccatttttttactttttgttgaattttaagggacctcaagtgaaataataatcggtgaattcaggatcaacctttatgtccagagcgtttgttccgtcgtccatttcttgtctagagtagtggtatgagctgaaaacattgctaagtgatcaccacatattgttgatgtaagggctaccggttattacaagagatttttatgactcctgctgtgggggtgccctttctacccggctgagcttggtgggagccaaggctgagtcggatgtatctttatattcccagttctcggtggaacttaaaatgctgtgagacaccagacagacagatactgtgaacttggagctctctaatgaagggataccaaagtcttgtattcaatttttttttccttaaattgtcagccgaaaatgagagcacacctattcagcaactcctggaacacttcctccgccagcttcagagaaaagatccccatggattttttgcttttcctgtcacggatgcaattgctcctggatattcaatgataataaaacatcccatggattttggcaccatgaaagacaaaattgtagctaatgaatacaagtcagttacggaatttaaggcagatttcaagctgatgtgtgataatgcaatgacatacaataggccagataccgtgtactacaagttggcgaagaagatccttcacgcaggctttaagatgatgagcaaacaggcagctcttttgggcaatgaagatacagctgttgaggaacctgtccctgaagttgtaccagtacaagtagaaactgccaagaaatccaaaaagccgagtagagaagttatcagctgcatgtttgagcctgaagggaatgcctgcagcttgacggacagtaccgcagaggagcacgtgctggcgctggtggagcacgcagctgacgaagctcgggacaggatcaaccggttcctcccaggcggcaaggtagtgctctgtggccaccgagagagggtgccacgtggccccagactctctgtgtgcctctccttctgggttggtgctgtgtgatctagcacagccaccgggatccagaggtcagcgtggggccctgacgggaggtccggatcagacacacataaggctggtctcttcagtcggggtccaggtgcctctggcagggctgccgctggtgtttcatgcatcgtggaggccacgtggtcactgacctcatttccttgatggaggccctgctgcaggctaatcctttctcttggagtgaatgctgacttctgtgtctctgtcactgggtgttgacgtgaggcaccgcccttgttattccagtgggggtgctggtgttggatccgacagatggtccataataggccaccgactgtgttcacgtggctcctgccacagatggtctttgtggtggtggggcccactcagctgaccacgctctcctttctggcaggagacgttctagacccagtgtcttcagtggaaacagagcacaggctgtctgcagtctcaggcttcctagcagccctgataagagaagtagagcaatgcaggtgacattaatccttgcaggtttcatttcacctctatatccaacattttatctcaacatgtagtctgtagaaaacgttaatttgagctttatgggtttttttcatattaagtcttcaaaatgcacatgggatgggatgtaaagaacgctgaagtgggggcatttcagaggtgtctgctgctttttgcctgtgcctgctgggaagttgcagtgctctgtgtggcttgcgtgttgcgaggttgcggtctgcgtggctcacgtgttgggaggtcgtggtctgcgtggctcacgtgttgggaagttgcagtggtctgtatggcttgcgtgttgggaggttgcagtctgtgtggcccgtgtgttgggaggttgtggtctgcgtggcttgtgtgttgggaggttgtggtttttgtggcttgcgtgttggggggttgtggtctgtgtggctcacgtgttgggaggttgtggtctgcgtggctcacgtgttgggcagttgtctgcttggctcacgtgttgggaagttgtggtctgcgtggctcatgtgttgggaagttgtttatgtggcttgtgtgctggaggttgtggcctgcgtggctcacgtgttgggcggttgtctgcttggctcatgtgttgggaagttgtggtctgcgtggcttgtgtgttgggaagttgtttatgtggcttgtgtgctggaggttgtggtctacgtggcttgcactgtagttcttttggacagccttgctctgcagtctgtgtttcagccctggaattgccacattctccaagaagccctggtttcttgactagagagccttgtgtagaagccaggacctgggttctgggtgaagccctctgcagatagagctgggagatgcctgttgtgtgtgtctgcaccacatacatggacactgtgcagagggattctgttggcacctgtgtttacatgggttgaaaactgtttttacacggaaacttccagttccctcgtgccccgtgggttccgcccacttcttccctttcagttttgtatctgcgccgtgaggacttgtctcctaatcttcgtatcaactccgtgtcccattgagctgaccttccgcctctcccccagggccctggccatcctgtgggctctgagactttgcatggatccgcggtggggagctgcccccacacaaacgtccggctcttctcaggccaggtggctgccctgacatggcatgatgtccagcgcatggacgtcacccttgcactggagcccagccaaccgctgcatgacagccctcttcccccttgaaccccaagtctgcacacaccagtgcctcctcttcctggatcctcctgatggcctgtacacagaactggggtgtgggtggtgggtttttaaatgaaaaccagtccacacatgcttgagggctggagccgcctgccgtcagggcagtgccatgctgacctgctgaccgttccattttgtcaaggctcatgagcaattttaaatgtttactcgtgggtgaaggtttttgtttcagctgtaccccctatagcagggccatggggagcctaagaggttctccttggcacctgtgcgcgctctgctgttgccggtgagtctgaaattccagggaatgccgtgaggggccctctggcgtttgttcttggacaaatgtgctttcacccccattaagccctgcttgttggtcttcatttcatttgtgctgcgctgcccctcctgagggacagacgctcaggcagtgcttccttccagatgggctatctgaagaggaacggggacgggagcctgctctacagcgtggtcaacacggccgagccggacgctgatgaggaggagacccacccggtggacttgagctcgctctccagtaagctactcccaggcttcaccacgctgggcttcaaagacgagagaagaaacaaagtcacctttctctccagtgccactactgcgctttcgatgcagaataattcagtatttggcgacttgaagtcggacgagatggagctgctctactcagcctacggagatgagacaggcgtgcagtgtgcgctgagcctgcaggagtttgtgaaggatgctgggagctacagcaagaaagtggtggacgacctcctggaccagatcacaggcggagaccactctaggacgctcttccagctgaagcagagaagaaatgttcccatgaagcctccagatgaagccaaggttggggacaccctaggagacagcagcagctctgttctggagttcatgtcgatgaagtcctatcccgacgtttctgtggatatctccatgctcagctctctggggaaggtgaagaaggagctggaccctgacgacagccatttgaacttggatgagacgacgaagctcctgcaggacctgcacgaagcacaggcggagcgcggcggctctcggccgtcgtccaacctcagctccctgtccaacgcctccgagagggaccagcaccacctgggaagcccttctcgcctgagtgtcggggagcagccagacgtcacccacgacccctatgagtttcttcagtctccagagcctgcggcctctgccaagacctaactctagaccaccttcagctcttttattttatttttttagttttattttgcacgtgtagagtttttgtcatcagacaaggactttgatcctgtcccctttggcatgcgggaagcagccgcggggaggtaatgaattgtctgtggtatcatgtcagcagagtctccaagccccacgaaccctgaggagtggagtcatacgcgaaggccatatggccatcgtgtcagcagagagagtctctgtacacagccccgtgaaccctgaggagtggagtcatacacgaagggcgtgtggccatcgtgtcagcagagagagtctctgtacacagccccgtgaaccctgaggagtggagtcatacgcgaagggtgtgtggccaggctgcagagctgcgtgccgtttgtgtccgagcatcacgtgtggctccagcccttgtttctgccagtgtagacacctctgtctgccccactgtcctggggtcgctcttgggaggcacaggcatgggtgtgtctggcctcattctgtatcagtccagtgtgttcctgtcatagtttgtgtctcccaggcaggccatggtaggggcctcgcaggggccattggggagcacagggccaggctggggtgaggagagctcccctgttttctgtttaattgatgagcctgggaaaggagtgtgttctgcctgcccgttacagtggagcgttccgtgtccataaaacgttttctaactggg

SEQ ID NO: 371161 - DNA, 502 bp, Homo sapiens
ggatctcggagggggtttcccttagttctgtccctcccctgagaactgcgaggggattgggcagacctgtccggatcccgcctactcctgcctttctcactcccttgactctgccgcccaggaagagaagaagcggaagcgagagagggagcactgtgacacggagggagaggctgacgactttgatcctgggaagaaggtggagggtgtggtgtcatcttttctgaggccttattccccacgccagcctcgtcagctgtgaaacagaccctgcaccttctcttggtgactcccagtccacttcggggtgcgtaggaagagttcatgaactcattagtggctcactctgaagtcagagtagagtgagggaagtcaaggctagagctgggacattgatggccgccaggatgcgttgggggaatttttattatatctgaaatacctatcacaataaattaaaagacgctcgtaacttttttatttttaagaaacaaaattcggt

SEQ ID NO: 371162 - DNA, 2677 bp, Homo sapiens
ccgcctcgccccgtttccggcgcggcccagcgagctcggcaacctcggcgcagcgagcgcgggcggccagccagggccagggggcggtggcggccaaggtccgaccgggtgccagctgttcccagcccccgcctcgggcccgccgccggcgccgccatgggcaagaagcacaagaagcacaaggccgagtggcgctcgtcctacgaggattatgccgacaagcccctggagaagcctctaaagctagtcctgaaggtcggaggaagtgaagtgactgaactctcaggatccggccacgactccagttactatgatgacaggtcagaccatgagcgagagaggcacaaagaaaagaaaaagaagaagaagaagaagtccgagaaggagaagcatctggacgatgaggaaagaaggaagcgaaaggaagagaagaagcggaagcgagagagggagcactgtgacacggagggagaggctgacgactttgatcctgggaagaaggtggaggtggagccgcccccagatcggccagtccgagcgtgccggacacagccagccgaaaatgagagcacacctattcagcaactcctggaacacttcctccgccagcttcagagaaaagatccccatggattttttgcttttcctgtcacggatgcaattgctcctggatattcaatgataataaaacatcccatggattttggcaccatgaaagacaaaattgtagctaatgaatacaagtcagttacggaatttaaggcagatttcaagctgatgtgtgataatgcaatgacatacaataggccagataccgtgtactacaagttggcgaagaagatccttcacgcaggctttaagatgatgagcaaacaggcagctcttttgggcaatgaagatacagctgttgaggaacctgtccctgaagttgtaccagtacaagtagaaactgccaagaaatccaaaaagccgagtagagaagttatcagctgcatgtttgagcctgaagggaatgcctgcagcttgacggacagtaccgcagaggagcacgtgctggcgctggtggagcacgcagctgacgaagctcgggacaggatcaaccggttcctcccaggcggcaagatgggctatctgaagaggaacggggacgggagcctgctctacagcgtggtcaacacggccgagccggacgctgatgaggaggagacccacccggtggacttgagctcgctctccagtaagctactcccaggcttcaccacgctgggcttcaaagacgagagaagaaacaaagtcacctttctctccagtgccactactgcgctttcgatgcagaataattcagtatttggcgacttgaagtcggacgagatggagctgctctactcagcctacggagatgagacaggcgtgcagtgtgcgctgagcctgcaggagtttgtgaaggatgctgggagctacagcaagaaagtggtggacgacctcctggaccagatcacaggcggagaccactctaggacgctcttccagctgaagcagagaagaaatgttcccatgaagcctccagatgaagccaaggttggggacaccctaggagacagcagcagctctgttctggagttcatgtcgatgaagtcctatcccgacgtttctgtggatatctccatgctcagctctctggggaaggtgaagaaggagctggaccctgacgacagccatttgaacttggatgagacgacgaagctcctgcaggacctgcacgaagcacaggcggagcgcggcggctctcggccgtcgtccaacctcagctccctgtccaacgcctccgagagggaccagcaccacctgggaagcccttctcgcctgagtgtcggggagcagccagacgtcacccacgacccctatgagtttcttcagtctccagagcctgcggcctctgccaagacctaactctagaccaccttcagctcttttattttatttttttagttttattttgcacgtgtagagtttttgtcatcagacaaggactttgatcctgtcccctttggcatgcgggaagcagccgcggggaggtaatgaattgtctgtggtatcatgtcagcagagtctccaagccccacgaaccctgaggagtggagtcatacgcgaaggccatatggccatcgtgtcagcagagagagtctctgtacacagccccgtgaaccctgaggagtggagtcatacacgaagggcgtgtggccatcgtgtcagcagagagagtctctgtacacagccccgtgaaccctgaggagtggagtcatacgcgaagggtgtgtggccaggctgcagagctgcgtgccgtttgtgtccgagcatcacgtgtggctccagcccttgtttctgccagtgtagacacctctgtctgccccactgtcctggggtcgctcttgggaggcacaggcatgggtgtgtctggcctcattctgtatcagtccagtgtgttcctgtcatagtttgtgtctcccaggcaggccatggtaggggcctcgcaggggccattggggagcacagggccaggctggggtgaggagagctcccctgttttctgtttaattgatgagcctgggaaaggagtgtgttctgcctgcccgttacagtggagcgttccgtgtccataaaacgttttctaactggg

SEQ ID NO: 371163 - DNA, 3742 bp, Homo sapiens
ccgcctcgccccgtttccggcgcggcccagcgagctcggcaacctcggcgcagcgagcgcgggcggccagccagggccagggggcggtggcggccaaggtccgaccgggtgccagctgttcccagcccccgcctcgggcccgccgccggcgccgccatgggcaagaagcacaagaagcacaaggccgagtggcgctcgtcctacgaggattatgccgacaagcccctggagaagcctctaaagctagtcctgaaggtcggaggaagtgaagtgactgaactctcaggatccggccacgactccagttactatgatgacaggtcagaccatgagcgagagaggcacaaagaaaagaaaaagaagaagaagaagaagtccgagaaggagaagcatctggacgatgaggaaagaaggaagcgaaaggaagagaagaagcggaagcgagagagggagcactgtgacacggagggagaggctgacgactttgatcctgggaagaaggtggaggtggagccgcccccagatcggccagtccgagcgtgccggacacagccagttctcggtggaacttaaaatgctgtgagacaccagacagacagatactgtgaacttggagctctctaatgaagggataccaaagtcttgtattcaatttttttttccttaaattgtcagccgaaaatgagagcacacctattcagcaactcctggaacacttcctccgccagcttcagagaaaagatccccatggattttttgcttttcctgtcacggatgcaattgctcctggatattcaatgataataaaacatcccatggattttggcaccatgaaagacaaaattgtagctaatgaatacaagtcagttacggaatttaagggtttgctgactcacagaaacacaacagaacagacttaaaggagagtgggagaaaaggaaactcgatgagaggatcaggcagcgcctgagggtagatgttaagagcactccatgcccgaaagccctctgtattccctgcttcgggccccagtctggccattcctagcaacaaagcagatttcaagctgatgtgtgataatgcaatgacatacaataggccagataccgtgtactacaagttggcgaagaagatccttcacgcaggctttaagatgatgagcaaacaggcagctcttttgggcaatgaagatacagctgttgaggaacctgtccctgaagttgtaccagtacaagtagaaactgccaagaaatccaaaaagccgagtagagaagttatcagctgcatgtttgagcctgaagggaatgcctgcagcttgacggacagtaccgcagaggagcacgtgctggcgctggtggagcacgcagctgacgaagctcgggacaggatcaaccggttcctcccaggcggcaaggagacgttctagacccagtgtcttcagtggaaacagagcacaggctgtctgcagtctcaggcttcctagcagccctgataagagaagtagagcaatgcagatgggctatctgaagaggaacggggacgggagcctgctctacagcgtggtcaacacggccgagccggacgctgatgaggaggagacccacccggtggacttgagctcgctctccagtaagctactcccaggcttcaccacgctgggcttcaaagacgagagaagaaacaaagtcacctttctctccagtgccactactgcgctttcgatgcagaataattcagtatttggcgacttgaagtcggacgagatggagctgctctactcagcctacggagatgagacaggcgtgcagtgtgcgctgagcctgcaggagtttgtgaaggatgctgggagctacagcaagaaagtggtggacgacctcctggaccagatcacaggcggagaccactctaggacgctcttccagctgaagcagagaagaaatgttcccatgaagcctccagatgaagccaaggttggggacaccctaggagacagcagcagctctgttctggagttcatgtcgatgaagtcctatcccgacgtttctgtggatatctccatgctcagctctctggtttctttcagggcctgccatctatcacgtgatgctgtactaaagtcggatcggaatttggtgtcttattaccacggagtctgctttgtcaaccttcagatttctgttttaaagttaatgctggtcagctgtgcctgaattccaaaagaggggataatgagatgtttccctgacttctgtgagtcactctaggaaattcatagagctcaagtctggtcttctgggaaccccatttgatagctggttagtcggaagcacagaccacagcctggggctttcagttggcatcagccggtggggccatcctggagactgtgccctcacctgggaggctgccggtgcagcgcccccgagctgttctgacctccagcagcatttgtggtgcctggatccatgggtcccactgctttgcgtggtgacgttccacctgtctctgctggctctgttcaggcacttatggccgtgatttattataggggaagggtgccaacagcagcagagggacaagagtgacatccaaggaaacccagcgtgaggcccagatccactcccagcagaggcacatgggacacgcttaattcccaggagtgagctgtgacaacacacgtgaaatgcccaccagggaagcccgtcagaggcttggtgctcggggtcacagggcacccccttgccagggaaggtgaagaaggagctggaccctgacgacagccatttgaacttggatgagacgacgaagctcctgcaggacctgcacgaagcacaggcggagcgcggcggctctcggccgtcgtccaacctcagctccctgtccaacgcctccgagagggaccagcaccacctgggaagcccttctcgcctgagtgtcggggagcagccagacgtcacccacgacccctatgagtttcttcagtctccagagcctgcggcctctgccaagacctaactctagaccaccttcagctcttttattttatttttttagttttattttgcacgtgtagagtttttgtcatcagacaaggactttgatcctgtcccctttggcatgcgggaagcagccgcggggaggtaatgaattgtctgtggtatcatgtcagcagagtctccaagccccacgaaccctgaggagtggagtcatacgcgaaggccatatggccatcgtgtcagcagagagagtctctgtacacagccccgtgaaccctgaggagtggagtcatacacgaagggcgtgtggccatcgtgtcagcagagagagtctctgtacacagccccgtgaaccctgaggagtggagtcatacgcgaagggtgtgtggccaggctgcagagctgcgtgccgtttgtgtccgagcatcacgtgtggctccagcccttgtttctgccagtgtagacacctctgtctgccccactgtcctggggtcgctcttgggaggcacaggcatgggtgtgtctggcctcattctgtatcagtccagtgtgttcctgtcatagtttgtgtctcccaggcaggccatggtaggggcctcgcaggggccattggggagcacagggccaggctggggtgaggagagctcccctgttttctgtttaattgatgagcctgggaaaggagtgtgttctgcctgcccgttacagtggagcgttccgtgtccataaaacgttttctaactggg

SEQ ID NO: 371164 - DNA, 3343 bp, Homo sapiens
ccgcctcgccccgtttccggcgcggcccagcgagctcggcaacctcggcgcagcgagcgcgggcggccagccagggccagggggcggtggcggccaaggtccgaccgggtgccagctgttcccagcccccgcctcgggcccgccgccggcgccgccatgggcaagaagcacaagaagcacaaggccgagtggcgctcgtcctacgaggattatgccgacaagcccctggagaagcctctaaagctagtcctgaaggtcggaggaagtgaagtgactgaactctcaggatccggccacgactccagttactatgatgacaggtcagaccatgagcgagagaggcacaaagaaaagaaaaagaagaagaagaagaagtccgagaaggagaagcatctggacgatgaggaaagaaggaagcgaaaggaagagaagaagcggaagcgagagagggagcactgtgacacggagggagaggctgacgactttgatcctgggaagaaggtggaggtggagccgcccccagatcggccagtccgagcgtgccggacacagccagccgaaaatgagagcacacctattcagcaactcctggaacacttcctccgccagcttcagagaaaagatccccatggattttttgcttttcctgtcacggatgcaattgctcctggatattcaatgataataaaacatcccatggattttggcaccatgaaagacaaaattgtagctaatgaatacaagtcagttacggaatttaaggcagatttcaagctgatgtgtgataatgcaatgacatacaataggccagataccgtgtactacaagttggcgaagaagatccttcacgcaggctttaagatgatgagcaaagagcggctgttagctttgaagcgcagcatgtcgtttatgcaggacatggatttttctcagcaggcagctcttttgggcaatgaagatacagctgttgaggaacctgtccctgaagttgtaccagtacaagtagaaactgccaagaaatccaaaaagccgagtagagaagttatcagctgcatgtttgagcctgaagggaatgcctgcagcttgacggacagtaccgcagaggagcacgtgctggcgctggtggagcacgcagctgacgaagctcgggacaggatcaaccggttcctcccaggcggcaaggtagtgctctgtggccaccgagagagggtgccacgtggccccagactctctgtgtgcctctccttctgggttggtgctgtgtgatctagcacagccaccgggatccagaggtcagcgtggggccctgacgggaggtccggatcagacacacataaggctggtctcttcagtcggggtccaggtgcctctggcagggctgccgctggtgtttcatgcatcgtggaggccacgtggtcactgacctcatttccttgatggaggccctgctgcaggctaatcctttctcttggagtgaatgctgacttctgtgtctctgtcactgggtgttgacgtgaggcaccgcccttgttattccagtgggggtgctggtgttggatccgacagatggtccataataggccaccgactgtgttcacgtggctcctgccacagatggtctttgtggtggtggggcccactcagctgaccacgctctcctttctggcaggagacgttctagacccagtgtcttcagtggaaacagagcacaggctgtctgcagtctcaggcttcctagcagccctgataagagaagtagagcaatgcaggtgacattaatccttgcagatgggctatctgaagaggaacggggacgggagcctgctctacagcgtggtcaacacggccgagccggacgctgatgaggaggagacccacccggtggacttgagctcgctctccagtaagctactcccaggcttcaccacgctgggcttcaaagacgagagaagaaacaaagtcacctttctctccagtgccactactgcgctttcgatgcagaataattcagtatttggcgacttgaagtcggacgagatggagctgctctactcagcctacggagatgagacaggcgtgcagtgtgcgctgagcctgcaggagtttgtgaaggatgctgggagctacagcaagaaagtggtggacgacctcctggaccagatcacaggcggagaccactctaggacgctcttccagctgaagcagagaagaaatgttcccatgaagcctccagatgaagccaaggttggggacaccctaggagacagcagcagctctgttctggagttcatgtcgatgaagtcctatcccgacgtttctgtggatatctccatgctcagctctctggggaaggtgaagaaggagctggaccctgacgacagccatttgaacttggatgagacgacgaagctcctgcaggacctgcacgaagcacaggcggagcgcggcggctctcggccgtcgtccaacctcagctccctgtccaacgcctccgagagggaccagcaccacctgggaagcccttctcgcctgagtgtcggggagcagccagacgtcacccacgacccctatgagtttcttcagtctccagagcctgcggcctctgccaagacctaactctagaccaccttcagctcttttattttatttttttagttttattttgcacgtgtagagtttttgtcatcagacaaggactttgatcctgtcccctttggcatgcgggaagcagccgcggggaggtaatgaattgtctgtggtatcatgtcagcagagtctccaagccccacgaaccctgaggagtggagtcatacgcgaaggccatatggccatcgtgtcagcagagagagtctctgtacacagccccgtgaaccctgaggagtggagtcatacacgaagggcgtgtggccatcgtgtcagcagagagagtctctgtacacagccccgtgaaccctgaggagtggagtcatacgcgaagggtgtgtggccaggctgcagagctgcgtgccgtttgtgtccgagcatcacgtgtggctccagcccttgtttctgccagtgtagacacctctgtctgccccactgtcctggggtcgctcttgggaggcacaggcatgggtgtgtctggcctcattctgtatcagtccagtgtgttcctgtcatagtttgtgtctcccaggcaggccatggtaggggcctcgcaggggccattggggagcacagggccaggctggggtgaggagagctcccctgttttctgtttaattgatgagcctgggaaaggagtgtgttctgcctgcccgttacagtggagcgttccgtgtccataaaacgttttctaactggg

SEQ ID NO: 371165 - DNA, 2725 bp, Homo sapiens
ccgcctcgccccgtttccggcgcggcccagcgagctcggcaacctcggcgcagcgagcgcgggcggccagccagggccagggggcggtggcggccaaggtccgaccgggtgccagctgttcccagcccccgcctcgggcccgccgccggcgccgccatgggcaagaagcacaagaagcacaaggccgagtggcgctcgtcctacgaggattatgccgacaagcccctggagaagcctctaaagctagtcctgaaggtcggaggaagtgaagtgactgaactctcaggatccggccacgactccagttactatgatgacaggtcagaccatgagcgagagaggcacaaagaaaagaaaaagaagaagaagaagaagtccgagaaggagaagcatctggacgatgaggaaagaaggaagcgaaaggaagagaagaagcggaagcgagagagggagcactgtgacacggagggagaggctgacgactttgatcctgggaagaaggtggaggtggagccgcccccagatcggccagtccgagcgtgccggacacagccagccgaaaatgagagcacacctattcagcaactcctggaacacttcctccgccagcttcagagaaaagatccccatggattttttgcttttcctgtcacggatgcaattgctcctggatattcaatgataataaaacatcccatggattttggcaccatgaaagacaaaattgtagctaatgaatacaagtcagttacggaatttaaggcagatttcaagctgatgtgtgataatgcaatgacatacaataggccagataccgtgtactacaagttggcgaagaagatccttcacgcaggctttaagatgatgagcaaacaggcagctcttttgggcaatgaagatacagctgttgaggaacctgtccctgaagttgtaccagtacaagtagaaactgccaagaaatccaaaaagccgagtagagaagttatcagctgcatgtttgagcctgaagggaatgcctgcagcttgacggacagtaccgcagaggagcacgtgctggcgctggtggagcacgcagctgacgaagctcgggacaggatcaaccggttcctcccaggcggcaagatgggctatctgaagaggaacggggacgggagcctgctctacagcgtggtcaacacggccgagccggacgctgatgaggaggagacccacccggtggacttgagctcgctctccagtaagctactcccaggcttcaccacgctgggcttcaaagacgagagaagaaacaaagtcacctttctctccagtgccactactgcgctttcgatgcagaataattcagtatttggcgacttgaagtcggacgagatggagctgctctactcagcctacggagatgagacaggcgtgcagtgtgcgctgagcctgcaggagtttgtgaaggatgctgggagctacagcaagaaagtggtggacgacctcctggaccagatcacaggcggagaccactctaggacgctcttccagctgaagcaggtgtcccccggagaccgtgactgtgtgctcaccactcccagcgcactcagaagaaatgttcccatgaagcctccagatgaagccaaggttggggacaccctaggagacagcagcagctctgttctggagttcatgtcgatgaagtcctatcccgacgtttctgtggatatctccatgctcagctctctggggaaggtgaagaaggagctggaccctgacgacagccatttgaacttggatgagacgacgaagctcctgcaggacctgcacgaagcacaggcggagcgcggcggctctcggccgtcgtccaacctcagctccctgtccaacgcctccgagagggaccagcaccacctgggaagcccttctcgcctgagtgtcggggagcagccagacgtcacccacgacccctatgagtttcttcagtctccagagcctgcggcctctgccaagacctaactctagaccaccttcagctcttttattttatttttttagttttattttgcacgtgtagagtttttgtcatcagacaaggactttgatcctgtcccctttggcatgcgggaagcagccgcggggaggtaatgaattgtctgtggtatcatgtcagcagagtctccaagccccacgaaccctgaggagtggagtcatacgcgaaggccatatggccatcgtgtcagcagagagagtctctgtacacagccccgtgaaccctgaggagtggagtcatacacgaagggcgtgtggccatcgtgtcagcagagagagtctctgtacacagccccgtgaaccctgaggagtggagtcatacgcgaagggtgtgtggccaggctgcagagctgcgtgccgtttgtgtccgagcatcacgtgtggctccagcccttgtttctgccagtgtagacacctctgtctgccccactgtcctggggtcgctcttgggaggcacaggcatgggtgtgtctggcctcattctgtatcagtccagtgtgttcctgtcatagtttgtgtctcccaggcaggccatggtaggggcctcgcaggggccattggggagcacagggccaggctggggtgaggagagctcccctgttttctgtttaattgatgagcctgggaaaggagtgtgttctgcctgcccgttacagtggagcgttccgtgtccataaaacgttttctaactggg

SEQ ID NO: 371166 - DNA, 865 bp, Homo sapiens
gatcccgatctgggtcacgctcgacagcaccacctgggaagcccttctcgcctgagtgtcggggagcagccagacgtcacccacgacccctatgagtttcttcagtctccagagcctgcggcctctgccaagacctaactctagaccaccttcagctcttttattttatttttttagttttattttgcacgtgtagagtttttgtcatcagacaaggactttgatcctgtcccctttggcatgcgggaagcagccgcggggaggtaatgaattgtctgtggtatcatgtcagcagagtctccaagccccacgaaccctgaggagtggagtcatacgcgaaggccatatggccatcgtgtcagcagagagagtctctgtacacagccccgtgaaccctgaggagtggagtcatacacgaagggcgtgtggccatcgtgtcagcagagagagtctctgtacacagccccgtgaaccctgaggagtggagtcatacgcgaagggtgtgtggccaggctgcagagctgcgtgccgtttgtgtccgagcatcacgtgtggctccagcccttgtttctgccagtgtagacacctctgtctgccccactgtcctggggtcgctcttgggaggcacaggcatgggtgtgtctggcctcattctgtatcagtccagtgtgttcctgtcatagtttgtgtctcccaggcaggccatggtaggggcctcgcaggggccattggggagcacagggccaggctggggtgaggagagctcccctgttttctgtttaattgatgagcctgggaaaggagtgtgttctgcctgcccgttacagtggagcgttccgtgtccataaaacgttttctaactggg

SEQ ID NO: 371167 - DNA, 2971 bp, Homo sapiens
ccgcctcgccccgtttccggcgcggcccagcgagctcggcaacctcggcgcagcgagcgcgggcggccagccagggccagggggcggtggcggccaaggtccgaccgggtgccagctgttcccagcccccgcctcgggcccgccgccggcgccgccatgggcaagaagcacaagaagcacaaggccgagtggcgctcgtcctacgaggattatgccgacaagcccctggagaagcctctaaagctagtcctgaaggtcggaggaagtgaagtgactgaactctcaggatccggccacgactccagttactatgatgacaggtcagaccatgagcgagagaggcacaaagaaaagaaaaagaagaagaagaagaagtccgagaaggagaagcatctggacgatgaggaaagaaggaagcgaaaggaagagaagaagcggaagcgagagagggagcactgtgacacggagggagaggctgacgactttgatcctgggaagaaggtggaggtggagccgcccccagatcggccagtccgagcgtgccggacacagccagccgaaaatgagagcacacctattcagcaactcctggaacacttcctccgccagcttcagagaaaagatccccatggattttttgcttttcctgtcacggatgcaattgctcctggatattcaatgataataaaacatcccatggattttggcaccatgaaagacaaaattgtagctaatgaatacaagtcagttacggaatttaaggcagatttcaagctgatgtgtgataatgcaatgacatacaataggccagataccgtgtactacaagttggcgaagaagatccttcacgcaggctttaagatgatgagcaaacaggcagctcttttgggcaatgaagatacagctgttgaggaacctgtccctgaagttgtaccagtacaagtagaaactgccaagaaatccaaaaagccgagtagagaagttatcagctgcatgtttgagcctgaagggaatgcctgcagcttgacggacagtaccgcagaggagcacgtgctggcgctggtggagcacgcagctgacgaagctcgggacaggatcaaccggttcctcccaggcggcaagatgggctatctgaagaggaacggggacgggagcctgctctacagcgtggtcaacacggccgagccggacgctgatgaggaggagacccacccggtggacttgagctcgctctccagtaagctactcccaggcttcaccacgctgggcttcaaagacgagagaagaaacaaagtcacctttctctccagtgccactactgcgctttcgatgcagaataattcagtatttggcgacttgaagtcggacgagatggagctgctctactcagcctacggagatgagacaggcgtgcagtgtgcgctgagcctgcaggagtttgtgaaggatgctgggagctacagcaagaaagtggtggacgacctcctggaccagatcacaggcggagaccactctaggacgctcttccagctgaagcagagaagaaatgttcccatgaagcctccagatgaagccaaggttggggacaccctaggagacagcagcagctctgttctggagttcatgtcgatgaagtcctatcccgacgtttctgtggatatctccatgctcagctctctggggaaggtgaagaaggagctggaccctgacgacagccatttgaacttggatgagacgacgaagctcctgcaggacctgcacgaagcacaggcggagcgcggcggctctcggccgtcgtccaacctcagctccctgtccaacgcctccgagagggaccagcaccacctgggaagcccttctcgcctgagtgtcggggagcagccagacgtcacccacgacccctatgagtttcttcagtctccagagcctgcggcctctgccaagacctaactctagaccaccttcagctcttttattttatttttttagttttattttgcacgtgtagagtttttgtcatcagacaaggactttgatcctgtcccctttggcatgcgggaagcagccgcggggaggtaatgaattgtctgtggtatcatgtcagcagagtctccaagccccacgaaccctgaggagtggagtcatacgcgaaggccatatggccatcgtgtcagcagagagagtctctgtacacagccccgtgaaccctgaggagtggagtcatacacgaagggcgtgtggccatcgtgtcagcagagagagtctctgtacacagccccgtgaaccctgaggagtggagtcatacgcgaagggtgtgtggccaggctgcagagctgcgtgccgtttgtgtccgagcatcacgtgtggctccagcccttgtttctgccagtgtagacacctctgtctgccccactgtcctggggtcgctcttgggaggcacaggcatgggtgtgtctggcctcattctgtatcagtccagtgtgttcctgtcatagtttgtgtctcccaggcaggccatggtaggggcctcgcaggggccattggggagcacagggccaggctggggtgaggagagctcccctgttttctgtttaattgatgagcctgggaaaggagtgtgttctgcctgcccgttacagtggagcgttccgtgtccataaaacgttttctaactgggtgtttactgagtgcccatttatgttagtatttgcaaaataccataaacacagcttccagtcacaagacacagagcgccaaagtgcacccaactgctcccagcacgcgagggtgctgtgtcctaccagctggtggtggtcctctggcccagctgtcgtgccacagtgacatcaggtgcacctgtgcgcccaccagcacctcctgcagggtggcctggtctgtgaccatggaacttgaaagtgaagaagcacaccttccagaggcaggctggatgggagctcagtcgtcctggggg

SEQ ID NO: 371168 - DNA, 509 bp, Homo sapiens
ctgtagaggcgactactagaggatccccccccgtgaaccctgaggagtggagtcatacacgaagggcgtgtggccatcgtgtcagcagagagagtctctgtacacagccccgtgaaccctgaggagtggagtcatacgcgaagggtgtgtggccaggctgcagagctgcgtgccgtttgtgtccgagcatcacgtgtggctccagcccttgtttctgccagtgtagacacctctgtctgccccactgtcctggggtcgctcttgggaggcacaggcatgggtgtgtctggcctcattctgtatcagtccagtgtgttcctgtcatagtttgtgtctcccaggcaggccatggtaggggcctcgcaggggccattggggagcacagggccaggctggggtgaggagagctcccctgttttctgtttaattgatgagcctgggaaaggagtgtgttctgcctgcccgttacagtggagcgttccgtgtccataaaacgttttctaactggg

SEQ ID NO: 371169 - DNA, 2542 bp, Homo sapiens
ccgcctcgccccgtttccggcgcggcccagcgagctcggcaacctcggcgcagcgagcgcgggcggccagccagggccagggggcggtggcggccaaggtccgaccgggtgccagctgttcccagcccccgcctcgggcccgccgccggcgccgccatgggcaagaagcacaagaagcacaaggccgagtggcgctcgtcctacgaggattatgccgacaagcccctggagaagcctctaaagctagtcctgaaggtcggaggaagtgaagtgactgaactctcaggatccggccacgactccagttactatgatgacaggtcagaccatgagcgagagaggcacaaagaaaagaaaaagaagaagaagaagaagtccgagaaggagaagcatctggacgatgaggaaagaaggaagcgaaaggaagagaagaagcggaagcgagagagggagcactgtgacacggagggagaggctgacgactttgatcctgggaagaaggtggaggtggagccgcccccagatcggccagtccgagcgtgccggacacagccagccgaaaatgagagcacacctattcagcaactcctggaacacttcctccgccagcttcagagaaaagatccccatggattttttgcttttcctgtcacggatgcaattgctcctggatattcaatgataataaaacatcccatggattttggcaccatgaaagacaaaattgtagctaatgaatacaagtcagttacggaatttaaggcagatttcaagctgatgtgtgataatgcaatgacatacaataggccagataccgtgtactacaagttggcgaagaagatccttcacgcaggctttaagatgatgagcaaacaggcagctcttttgggcaatgaagatacagctgttgaggaacctgtccctgaagttgtaccagtacaagtagaaactgccaagaaatccaaaaagccgagtagagaagttatcagctgcatgtttgagcctgaagggaatgcctgcagcttgacggacagtaccgcagaggagcacgtgctggcgctggtggagcacgcagctgacgaagctcgggacaggatcaaccggttcctcccaggcggcaagatgggctatctgaagaggaacggggacgggagcctgctctacagcgtggtcaacacggccgagccggacgctgatgaggaggagacccacccggtggacttgagctcgctctccagtaagctactcccaggcttcaccacgctgggcttcaaagacgagagaagaaacaaagtcacctttctctccagtgccactactgcgctttcgatgcagaataattcagtatttggcgacttgaagtcggacgagatggagctgctctactcagcctacggagatgagacaggcgtgcagtgtgcgctgagcctgcaggagtttgtgaaggatgctgggagctacagcaagaaagtggtggacgacctcctggaccagatcacaggcggagaccactctaggacgctcttccagctgaagcagagaagaaatgttcccatgaagcctccagatgaagccaaggttggggacaccctaggagacagcagcagctctgttctggagttcatgtcgatgaagtcctatcccgacgtttctgtggatatctccatgctcagctctctggggaaggtgaagaaggagctggaccctgacgacagccatttgaacttggatgagacgacgaagctcctgcaggacctgcacgaagcacaggcggagcgcggcggctctcggccgtcgtccaacctcagctccctgtccaacgcctccgagagggaccagcaccacctgggaagcccttctcgcctgagtgtcggggagcagccagacgtcacccacgacccctatgagtttcttcagtctccagagcctgcggcctctgccaagacctaactctagaccaccttcagctcttttattttatttttttagttttattttgcacgtgtagagtttttgtcatcagacaaggactttgatcctgtcccctttggcatgcgggaagcagccgcggggaggtaatgaattgtctgtggtatcatgtcagcagagtctccaagccccacgaaccctgaggagtggagtcatacgcgaaggccatatggccatcgtgtcagcagagagagtctctgtacacagccccgtgaaccctgaggagtggagtcatacacgaagggcgtgtggccatcgtgtcagcagagagagtctctgtacacagccccgtgaaccctgaggagtggagtcatacgcgaagggtgtgtggccaggctgcagagctgcgtgccgtttgtgtccgagcatcacgtgtggctccagcccttgtttctgccagtgtagacacctctgtctgccccactgtcctggggtcgctcttgggaggcacagacgacggccagccgcacacgcatgtcatgcaccacagccgactgttacgaggatactcacccagatcgcacaggcagcccatggcaaccgcctaaacggg

SEQ ID NO: 371170 - DNA, 2523 bp, Homo sapiens
ccgcctcgccccgtttccggcgcggcccagcgagctcggcaacctcggcgcagcgagcgcgggcggccagccagggccagggggcggtggcggccaaggtccgaccgggtgccagctgttcccagcccccgcctcgggcccgccgccggcgccgccatgggcaagaagcacaagaagcacaaggccgagtggcgctcgtcctacgaggattatgccgacaagcccctggagaagcctctaaagctagtcctgaaggtcggaggaagtgaagtgactgaactctcaggatccggccacgactccagttactatgatgacaggtcagaccatgagcgagagaggcacaaagaaaagaaaaagaagaagaagaagaagtccgagaaggagaagcatctggacgatgaggaaagaaggaagcgaaaggaagagaagaagcggaagcgagagagggagcactgtgacacggagggagaggctgacgactttgatcctgggaagaaggtggaggtggagccgcccccagatcggccagtccgagcgtgccggacacagccagccgaaaatgagagcacacctattcagcaactcctggaacacttcctccgccagcttcagagaaaagatccccatggattttttgcttttcctgtcacggatgcaattgctcctggatattcaatgataataaaacatcccatggattttggcaccatgaaagacaaaattgtagctaatgaatacaagtcagttacggaatttaaggcagatttcaagctgatgtgtgataatgcaatgacatacaataggccagataccgtgtactacaagttggcgaagaagatccttcacgcaggctttaagatgatgagcaaacaggcagctcttttgggcaatgaagatacagctgttgaggaacctgtccctgaagttgtaccagtacaagtagaaactgccaagaaatccaaaaagccgagtagagaagttatcagctgcatgtttgagcctgaagggaatgcctgcagcttgacggacagtaccgcagaggagcacgtgctggcgctggtggagcacgcagctgacgaagctcgggacaggatcaaccggttcctcccaggcggcaagatgggctatctgaagaggaacggggacgggagcctgctctacagcgtggtcaacacggccgagccggacgctgatgaggaggagacccacccggtggacttgagctcgctctccagtaagctactcccaggcttcaccacgctgggcttcaaagacgagagaagaaacaaagtcacctttctctccagtgccactactgcgctttcgatgcagaataattcagtatttggcgacttgaagtcggacgagatggagctgctctactcagcctacggagatgagacaggcgtgcagtgtgcgctgagcctgcaggagtttgtgaaggatgctgggagctacagcaagaaagtggtggacgacctcctggaccagatcacaggcggagaccactctaggacgctcttccagctgaagcagagaagaaatgttcccatgaagcctccagatgaagccaaggttggggacaccctaggagacagcagcagctctgttctggagttcatgtcgatgaagtcctatcccgacgtttctgtggatatctccatgctcagctctctggggaaggtgaagaaggagctggaccctgacgacagccatttgaacttggatgagacgacgaagctcctgcaggacctgcacgaagcacaggcggagcgcggcggctctcggccgtcgtccaacctcagctccctgtccaacgcctccgagagggaccagcaccacctgggaagcccttctcgcctgagtgtcggggagcagccagacgtcacccacgacccctatgagtttcttcagtctccagagcctgcggcctctgccaagacctaactctagaccaccttcagctcttttattttatttttttagttttattttgcacgtgtagagtttttgtcatcagacaaggactttgatcctgtcccctttggcatgcgggaagcagccgcggggaggtaatgaattgtctgtggtatcatgtcagcagagtctccaagccccacgaaccctgaggagtggagtcatacgcgaaggccatatggccatcgtgtcagcagagagagtctctgtacacagccccgtgaaccctgaggagtggagtcatacacgaagggcgtgtggccatcgtgtcagcagagagagtctctgtacacagccccgtgaaccctgaggagtggagtcatacgcgaagggtgtgtggccaggctgcagagctgcgtgccgtccaggtctcgtacgccagacgcgacgctgcagcacgacggccagtccctagagacaacgctgtcagctcgactgctagaggattcgcctcacagcggacgaagcggtgcattgagtgtagtcccgccttctgtttcgtgatcaatatctagagtgcgctataagactgtgatctagtac

SEQ ID NO: 371171 - DNA, 2509 bp, Homo sapiens
  misc_feature (2416)..(2416): n is a, c, g, or t
  misc_feature (2427)..(2427): n is a, c, g, or t
  misc_feature (2433)..(2433): n is a, c, g, or t
  misc_feature (2440)..(2441): n is a, c, g, or t
  misc_feature (2446)..(2446): n is a, c, g, or t
  misc_feature (2453)..(2453): n is a, c, g, or t
  misc_feature (2458)..(2458): n is a, c, g, or t
  misc_feature (2468)..(2469): n is a, c, g, or t
ccgcctcgccccgtttccggcgcggcccagcgagctcggcaacctcggcgcagcgagcgcgggcggccagccagggccagggggcggtggcggccaaggtccgaccgggtgccagctgttcccagcccccgcctcgggcccgccgccggcgccgccatgggcaagaagcacaagaagcacaaggccgagtggcgctcgtcctacgaggattatgccgacaagcccctggagaagcctctaaagctagtcctgaaggtcggaggaagtgaagtgactgaactctcaggatccggccacgactccagttactatgatgacaggtcagaccatgagcgagagaggcacaaagaaaagaaaaagaagaagaagaagaagtccgagaaggagaagcatctggacgatgaggaaagaaggaagcgaaaggaagagaagaagcggaagcgagagagggagcactgtgacacggagggagaggctgacgactttgatcctgggaagaaggtggaggtggagccgcccccagatcggccagtccgagcgtgccggacacagccagccgaaaatgagagcacacctattcagcaactcctggaacacttcctccgccagcttcagagaaaagatccccatggattttttgcttttcctgtcacggatgcaattgctcctggatattcaatgataataaaacatcccatggattttggcaccatgaaagacaaaattgtagctaatgaatacaagtcagttacggaatttaaggcagatttcaagctgatgtgtgataatgcaatgacatacaataggccagataccgtgtactacaagttggcgaagaagatccttcacgcaggctttaagatgatgagcaaacaggcagctcttttgggcaatgaagatacagctgttgaggaacctgtccctgaagttgtaccagtacaagtagaaactgccaagaaatccaaaaagccgagtagagaagttatcagctgcatgtttgagcctgaagggaatgcctgcagcttgacggacagtaccgcagaggagcacgtgctggcgctggtggagcacgcagctgacgaagctcgggacaggatcaaccggttcctcccaggcggcaagatgggctatctgaagaggaacggggacgggagcctgctctacagcgtggtcaacacggccgagccggacgctgatgaggaggagacccacccggtggacttgagctcgctctccagtaagctactcccaggcttcaccacgctgggcttcaaagacgagagaagaaacaaagtcacctttctctccagtgccactactgcgctttcgatgcagaataattcagtatttggcgacttgaagtcggacgagatggagctgctctactcagcctacggagatgagacaggcgtgcagtgtgcgctgagcctgcaggagtttgtgaaggatgctgggagctacagcaagaaagtggtggacgacctcctggaccagatcacaggcggagaccactctaggacgctcttccagctgaagcagagaagaaatgttcccatgaagcctccagatgaagccaaggttggggacaccctaggagacagcagcagctctgttctggagttcatgtcgatgaagtcctatcccgacgtttctgtggatatctccatgctcagctctctggtttctttcagggcctgccatctatcacgtgatgctgtactaaagtcggatcggaatttggtgtcttattaccacggagtctgctttgtcaaccttcagatttctgttttaaagttaatgctggtcagctgtgcctgaattccaaaagaggggataatgagatgtttccctgacttctgtgagtcactctaggaaattcatagagctcaagtctggtcttctgggaaccccatttgatagctggggaagggtgccaacagcagcagagggacaagagtgacatccaaggaaacccagcgtgaggcccagatccactcccagcagaggcacatgggacacgcttaattcccaggagtgagctgtgacaacacacgtgaaatgcccaccagggaagcccgtcagaggcttggtgctcggggtcacagggcacccccttgccagggaaggtgaagaaggagctggaccctgacgacagccatttgaacttggatgagacgacgaagctcctgcaggacctgcacgaagcacaggcggagcgcggcggctctcggccgtcgtccaacctcagctccctgtccaacgcctccgagagggaccagcaccacctgggaagcccttctcgcctgagtgtcggggagcagccagacgtcacccacgacccctatgagtttcttcagtctccagagcctgcggcctctgccaagacctaactctagaccaccttcagctcttagtnattggcggtangttggncaacagnntgtcngccctgntgganaccgggggannattgtggttttcattcccaccggtggtaccgcttccttaa

SEQ ID NO: 371172 - DNA, 804 bp, Homo sapiens
ccgcctcgccccgtttccggcgcggcccagcgagctcggcaacctcggcgcagcgagcgcgggcggccagccagggccagggggcggtggcggccaaggtccgaccgggtgccagctgttcccagcccccgcctcgggcccgccgccggcgccgccatgggcaagaagcacaagaagcacaaggccgagtggcgctcgtcctacgaggattatgccgacaagcccctggagaagcctctaaagctagtcctgaaggtcggaggaagtgaagtgactgaactctcaggatccggccacgactccagttactatgatgacaggtcagaccatgagcgagagaggcacaaagaaaagaaaaagaagaagaagaagaagtccgagaaggagaagcatctggacgatgaggaaagaaggaagcgaaaggaagagaagaagcggaagcgagagagggagcactgtgacacggagggagaggctgacgactttgatcctgggaagaaggtggagggtgtggtgtcatcttttctgaggccttattccccacgccagcctcgtcagctgtgaaacagaccctgcaccttctcttggtgactcccagtccacttcggggtgcgtaggaagagttcatgaactcattagtggctcactctgaagtcagagtagagtgagggaagtcaaggctagagctgggacattgatggccgccaggatgcgttgggggaatttttattatatctgaaatacctatcacaataaattaaaagacgctcgtaacttttttatttttaagaaacaaaattcggt

SEQ ID NO: 371173 - DNA, 394 bp, Homo sapiens
aaatgcacatgggatgggatgtaaagaacgctgaagtgggggcatttcagaggtgtctgctgctttttgcctgtgcctgctgggaagttgcagtgctctgtgtggcttgcgtgttgcgaggttgcggtctgcgtggctcacgtgttgggaggtcgtggtctgcgtggctcacgtgttgggaagttgcagtggtctgtatggcttgcgtgttgggaggttgcagtctgtgtggcccgtgtgttgggaggttgtggtctgcgtggcttgtgtgttgggaggttgtggttcacgtggcttgcatgttgggaagttgctgtggtctgcgtggcttatgtgttgggaggttgtggtttgtgtggcttgtgtgttgggaggttgcagtctgcgtggctcg

SEQ ID NO: 371174 - DNA, 2856 bp, Homo sapiens
ccgcctcgccccgtttccggcgcggcccagcgagctcggcaacctcggcgcagcgagcgcgggcggccagccagggccagggggcggtggcggccaaggtccgaccgggtgccagctgttcccagcccccgcctcgggcccgccgccggcgccgccatgggcaagaagcacaagaagcacaaggccgagtggcgctcgtcctacgaggattatgccgacaagcccctggagaagcctctaaagctagtcctgaaggtcggaggaagtgaagtgactgaactctcaggatccggccacgactccagttactatgatgacaggtcagaccatgagcgagagaggcacaaagaaaagaaaaagaagaagaagaagaagtccgagaaggagaagcatctggacgatgaggaaagaaggaagcgaaaggaagagaagaagcggaagcgagagagggagcactgtgacacggagggagaggctgacgactttgatcctgggaagaaggtggaggtggagccgcccccagatcggccagtccgagcgtgccggacacagccagttctcggtggaacttaaaatgctgtgagacaccagacagacagatactgtgaacttggagctctctaatgaagggataccaaagtcttgtattcaatttttttttccttaaattgtcagccgaaaatgagagcacacctattcagcaactcctggaacacttcctccgccagcttcagagaaaagatccccatggattttttgcttttcctgtcacggatgcaattgctcctggatattcaatgataataaaacatcccatggattttggcaccatgaaagacaaaattgtagctaatgaatacaagtcagttacggaatttaaggcagatttcaagctgatgtgtgataatgcaatgacatacaataggccagataccgtgtactacaagttggcgaagaagatccttcacgcaggctttaagatgatgagcaaagagcggctgttagctttgaagcgcagcatgtcgtttatgcaggacatggatttttctcagcaggcagctcttttgggcaatgaagatacagctgttgaggaacctgtccctgaagttgtaccagtacaagtagaaactgccaagaaatccaaaaagccgagtagagaagttatcagctgcatgtttgagcctgaagggaatgcctgcagcttgacggacagtaccgcagaggagcacgtgctggcgctggtggagcacgcagctgacgaagctcgggacaggatcaaccggttcctcccaggcggcaagatgggctatctgaagaggaacggggacgggagcctgctctacagcgtggtcaacacggccgagccggacgctgatgaggaggagacccacccggtggacttgagctcgctctccagtaagctactcccaggcttcaccacgctgggcttcaaagacgagagaagaaacaaagtcacctttctctccagtgccactactgcgctttcgatgcagaataattcagtatttggcgacttgaagtcggacgagatggagctgctctactcagcctacggagatgagacaggcgtgcagtgtgcgctgagcctgcaggagtttgtgaaggatgctgggagctacagcaagaaagtggtggacgacctcctggaccagatcacaggcggagaccactctaggacgctcttccagctgaagcagagaagaaatgttcccatgaagcctccagatgaagccaaggttggggacaccctaggagacagcagcagctctgttctggagttcatgtcgatgaagtcctatcccgacgtttctgtggatatctccatgctcagctctctggggaaggtgaagaaggagctggaccctgacgacagccatttgaacttggatgagacgacgaagctcctgcaggacctgcacgaagcacaggcggagcgcggcggctctcggccgtcgtccaacctcagctccctgtccaacgcctccgagagggaccagcaccacctgggaagcccttctcgcctgagtgtcggggagcagccagacgtcacccacgacccctatgagtttcttcagtctccagagcctgcggcctctgccaagacctaactctagaccaccttcagctcttttattttatttttttagttttattttgcacgtgtagagtttttgtcatcagacaaggactttgatcctgtcccctttggcatgcgggaagcagccgcggggaggtaatgaattgtctgtggtatcatgtcagcagagtctccaagccccacgaaccctgaggagtggagtcatacgcgaaggccatatggccatcgtgtcagcagagagagtctctgtacacagccccgtgaaccctgaggagtggagtcatacacgaagggcgtgtggccatcgtgtcagcagagagagtctctgtacacagccccgtgaaccctgaggagtggagtcatacgcgaagggtgtgtggccaggctgcagagctgcgtgccgtttgtgtccgagcatcacgtgtggctccagcccttgtttctgccagtgtagacacctctgtctgccccactgtcctggggtcgctcttgggaggcacaggcatgggtgtgtctggcctcattctgtatcagtccagtgtgttcctgtcatagtttgtgtctcccaggcaggccatggtaggggcctcgcaggggccattggggagcacagggccaggctggggtgaggagagctcccctgttttctgtttaattgatgagcctgggaaaggagtgtgttctgcctgcccgttacagtggagcgttccgtgtccataaaacgttttctaactggg

SEQ ID NO: 371175 - DNA, 2696 bp, Homo sapiens
ggtcctgggcaccgggcgaggtcctggccacgagggaggggttctgggcacgcgggagggggtcctgggatttcgggcagggaaccgggcacacgtgaggggtcctggattatgccgacaagcccctggagaagcctctaaagctagtcctgaaggtcggaggaagtgaagtgactgaactctcaggatccggccacgactccagttactatgatgacaggtcagaccatgagcgagagaggcacaaagaaaagaaaaagaagaagaagaagaagtccgagaaggagaagcatctggacgatgaggaaagaaggaagcgaaaggaagagaagaagcggaagcgagagagggagcactgtgacacggagggagaggctgacgactttgatcctgggaagaaggtggaggtggagccgcccccagatcggccagtccgagcgtgccggacacagccagttctcggtggaacttaaaatgctgtgagacaccagacagacagatactgtgaacttggagctctctaatgaagggataccaaagtcttgtattcaatttttttttccttaaattgtcagccgaaaatgagagcacacctattcagcaactcctggaacacttcctccgccagcttcagagaaaagatccccatggattttttgcttttcctgtcacggatgcaattgctcctggatattcaatgataataaaacatcccatggattttggcaccatgaaagacaaaattgtagctaatgaatacaagtcagttacggaatttaaggcagatttcaagctgatgtgtgataatgcaatgacatacaataggccagataccgtgtactacaagttggcgaagaagatccttcacgcaggctttaagatgatgagcaaacaggcagctcttttgggcaatgaagatacagctgttgaggaacctgtccctgaagttgtaccagtacaagtagaaactgccaagaaatccaaaaagccgagtagagaagttatcagctgcatgtttgagcctgaagggaatgcctgcagcttgacggacagtaccgcagaggagcacgtgctggcgctggtggagcacgcagctgacgaagctcgggacaggatcaaccggttcctcccaggcggcaagatgggctatctgaagaggaacggggacgggagcctgctctacagcgtggtcaacacggccgagccggacgctgatgaggaggagacccacccggtggacttgagctcgctctccagtaagctactcccaggcttcaccacgctgggcttcaaagacgagagaagaaacaaagtcacctttctctccagtgccactactgcgctttcgatgcagaataattcagtatttggcgacttgaagtcggacgagatggagctgctctactcagcctacggagatgagacaggcgtgcagtgtgcgctgagcctgcaggagtttgtgaaggatgctgggagctacagcaagaaagtggtggacgacctcctggaccagatcacaggcggagaccactctaggacgctcttccagctgaagcagagaagaaatgttcccatgaagcctccagatgaagccaaggttggggacaccctaggagacagcagcagctctgttctggagttcatgtcgatgaagtcctatcccgacgtttctgtggatatctccatgctcagctctctggggaaggtgaagaaggagctggaccctgacgacagccatttgaacttggatgagacgacgaagctcctgcaggacctgcacgaagcacaggcggagcgcggcggctctcggccgtcgtccaacctcagctccctgtccaacgcctccgagagggaccagcaccacctgggaagcccttctcgcctgagtgtcggggagcagccagacgtcacccacgacccctatgagtttcttcagtctccagagcctgcggcctctgccaagacctaactctagaccaccttcagctcttttattttatttttttagttttattttgcacgtgtagagtttttgtcatcagacaaggactttgatcctgtcccctttggcatgcgggaagcagccgcggggaggtaatgaattgtctgtggtatcatgtcagcagagtctccaagccccacgaaccctgaggagtggagtcatacgcgaaggccatatggccatcgtgtcagcagagagagtctctgtacacagccccgtgaaccctgaggagtggagtcatacacgaagggcgtgtggccatcgtgtcagcagagagagtctctgtacacagccccgtgaaccctgaggagtggagtcatacgcgaagggtgtgtggccaggctgcagagctgcgtgccgtttgtgtccgagcatcacgtgtggctccagcccttgtttctgccagtgtagacacctctgtctgccccactgtcctggggtcgctcttgggaggcacaggcatgggtgtgtctggcctcattctgtatcagtccagtgtgttcctgtcatagtttgtgtctcccaggcaggccatggtaggggcctcgcaggggccattggggagcacagggccaggctggggtgaggagagctcccctgttttctgtttaattgatgagcctgggaaaggagtgtgttctgcctgcccgttacagtggagcgttccgtgtccataaaacgttttctaactggg

SEQ ID NO: 371176 - DNA, 2737 bp, Homo sapiens
ccgcctcgccccgtttccggcgcggcccagcgagctcggcaacctcggcgcagcgagcgcgggcggccagccagggccagggggcggtggcggccaaggtccgaccgggtgccagctgttcccagcccccgcctcgggcccgccgccggcgccgccatgggcaagaagcacaagaagcacaaggccgagtggcgctcgtcctacgaggattatgccgacaagcccctggagaagcctctaaagctagtcctgaaggtcggaggaagtgaagtgactgaactctcaggatccggccacgactccagttactatgatgacaggtcagaccatgagcgagagaggcacaaagaaaagaaaaagaagaagaagaagaagtccgagaaggagaagcatctggacgatgaggaaagaaggaagcgaaaggaagagaagaagcggaagcgagagagggagcactgtgacacggagggagaggctgacgactttgatcctgggaagaaggtggaggtggagccgcccccagatcggccagtccgagcgtgccggacacagccagccgaaaatgagagcacacctattcagcaactcctggaacacttcctccgccagcttcagagaaaagatccccatggattttttgcttttcctgtcacggatgcaattgctcctggatattcaatgataataaaacatcccatggattttggcaccatgaaagacaaaattgtagctaatgaatacaagtcagttacggaatttaaggcagatttcaagctgatgtgtgataatgcaatgacatacaataggccagataccgtgtactacaagttggcgaagaagatccttcacgcaggctttaagatgatgagcaaagagcggctgttagctttgaagcgcagcatgtcgtttatgcaggacatggatttttctcagcaggcagctcttttgggcaatgaagatacagctgttgaggaacctgtccctgaagttgtaccagtacaagtagaaactgccaagaaatccaaaaagccgagtagagaagttatcagctgcatgtttgagcctgaagggaatgcctgcagcttgacggacagtaccgcagaggagcacgtgctggcgctggtggagcacgcagctgacgaagctcgggacaggatcaaccggttcctcccaggcggcaagatgggctatctgaagaggaacggggacgggagcctgctctacagcgtggtcaacacggccgagccggacgctgatgaggaggagacccacccggtggacttgagctcgctctccagtaagctactcccaggcttcaccacgctgggcttcaaagacgagagaagaaacaaagtcacctttctctccagtgccactactgcgctttcgatgcagaataattcagtatttggcgacttgaagtcggacgagatggagctgctctactcagcctacggagatgagacaggcgtgcagtgtgcgctgagcctgcaggagtttgtgaaggatgctgggagctacagcaagaaagtggtggacgacctcctggaccagatcacaggcggagaccactctaggacgctcttccagctgaagcagagaagaaatgttcccatgaagcctccagatgaagccaaggttggggacaccctaggagacagcagcagctctgttctggagttcatgtcgatgaagtcctatcccgacgtttctgtggatatctccatgctcagctctctggggaaggtgaagaaggagctggaccctgacgacagccatttgaacttggatgagacgacgaagctcctgcaggacctgcacgaagcacaggcggagcgcggcggctctcggccgtcgtccaacctcagctccctgtccaacgcctccgagagggaccagcaccacctgggaagcccttctcgcctgagtgtcggggagcagccagacgtcacccacgacccctatgagtttcttcagtctccagagcctgcggcctctgccaagacctaactctagaccaccttcagctcttttattttatttttttagttttattttgcacgtgtagagtttttgtcatcagacaaggactttgatcctgtcccctttggcatgcgggaagcagccgcggggaggtaatgaattgtctgtggtatcatgtcagcagagtctccaagccccacgaaccctgaggagtggagtcatacgcgaaggccatatggccatcgtgtcagcagagagagtctctgtacacagccccgtgaaccctgaggagtggagtcatacacgaagggcgtgtggccatcgtgtcagcagagagagtctctgtacacagccccgtgaaccctgaggagtggagtcatacgcgaagggtgtgtggccaggctgcagagctgcgtgccgtttgtgtccgagcatcacgtgtggctccagcccttgtttctgccagtgtagacacctctgtctgccccactgtcctggggtcgctcttgggaggcacaggcatgggtgtgtctggcctcattctgtatcagtccagtgtgttcctgtcatagtttgtgtctcccaggcaggccatggtaggggcctcgcaggggccattggggagcacagggccaggctggggtgaggagagctcccctgttttctgtttaattgatgagcctgggaaaggagtgtgttctgcctgcccgttacagtggagcgttccgtgtccataaaacgttttctaactggg

SEQ ID NO: 371177 - DNA, 3455 bp, Homo sapiens
  misc_feature (40)..(41): n is a, c, g, or t
gtatctagagcatccccttagacggtaccaacaggcggcnnggagacgttctagacccagtgtcttcagtggaaacagagcacaggctgtctgcagtctcaggcttcctagcagccctgataagagaagtagagcaatgcaggtgacattaatccttgcaggtttcatttcacctctatatccaacattttatctcaacatgtagtctgtagaaaacgttaatttgagctttatgggtttttttcatattaagtcttcaaaatgcacatgggatgggatgtaaagaacgctgaagtgggggcatttcagaggtgtctgctgctttttgcctgtgcctgctgggaagttgcagtgctctgtgtggcttgcgtgttgcgaggttgcggtctgcgtggctcacgtgttgggaggtcgtggtctgcgtggctcacgtgttgggaagttgcagtggtctgtatggcttgcgtgttgggaggttgcagtctgtgtggcccgtgtgttgggaggttgtggtctgcgtggcttgtgtgttgggaggttgtggtttttgtggcttgcgtgttggggggttgtggtctgtgtggctcacgtgttgggaggttgtggtctgcgtggctcacgtgttgggcagttgtctgcttggctcacgtgttgggaagttgtggtctgcgtggctcatgtgttgggaagttgtttatgtggcttgtgtgctggaggttgtggcctgcgtggctcacgtgttgggcggttgtctgcttggctcatgtgttgggaagttgtggtctgcgtggcttgtgtgttgggaagttgtttatgtggcttgtgtgctggaggttgtggtctacgtggcttgcactgtagttcttttggacagccttgctctgcagtctgtgtttcagccctggaattgccacattctccaagaagccctggtttcttgactagagagccttgtgtagaagccaggacctgggttctgggtgaagccctctgcagatagagctgggagatgcctgttgtgtgtgtctgcaccacatacatggacactgtgcagagggattctgttggcacctgtgtttacatgggttgaaaactgtttttacacggaaacttccagttccctcgtgccccgtgggttccgcccacttcttccctttcagttttgtatctgcgccgtgaggacttgtctcctaatcttcgtatcaactccgtgtcccattgagctgaccttccgcctctcccccagggccctggccatcctgtgggctctgagactttgcatggatccgcggtggggagctgcccccacacaaacgtccggctcttctcaggccaggtggctgccctgacatggcatgatgtccagcgcatggacgtcacccttgcactggagcccagccaaccgctgcatgacagccctcttcccccttgaaccccaagtctgcacacaccagtgcctcctcttcctggatcctcctgatggcctgtacacagaactggggtgtgggtggtgggtttttaaatgaaaaccagtccacacatgcttgagggctggagccgcctgccgtcagggcagtgccatgctgacctgctgaccgttccattttgtcaaggctcatgagcaattttaaatgtttactcgtgggtgaaggtttttgtttcagctgtaccccctatagcagggccatggggagcctaagaggttctccttggcacctgtgcgcgctctgctgttgccggtgagtctgaaattccagggaatgccgtgaggggccctctggcgtttgttcttggacaaatgtgctttcacccccattaagccctgcttgttggtcttcatttcatttgtgctgcgctgcccctcctgagggacagacgctcaggcagtgcttccttccagatgggctatctgaagaggaacggggacgggagcctgctctacagcgtggtcaacacggccgagccggacgctgatgaggaggagacccacccggtggacttgagctcgctctccagtaagctactcccaggcttcaccacgctgggcttcaaagacgagagaagaaacaaagtcacctttctctccagtgccactactgcgctttcgatgcagaataattcagtatttggcgacttgaagtcggacgagatggagctgctctactcagcctacggagatgagacaggcgtgcagtgtgcgctgagcctgcaggagtttgtgaaggatgctgggagctacagcaagaaagtggtggacgacctcctggaccagatcacaggcggagaccactctaggacgctcttccagctgaagcagagaagaaatgttcccatgaagcctccagatgaagccaaggttggggacaccctaggagacagcagcagctctgttctggagttcatgtcgatgaagtcctatcccgacgtttctgtggatatctccatgctcagctctctggggaaggtgaagaaggagctggaccctgacgacagccatttgaacttggatgagacgacgaagctcctgcaggacctgcacgaagcacaggcggagcgcggcggctctcggccgtcgtccaacctcagctccctgtccaacgcctccgagagggaccagcaccacctgggaagcccttctcgcctgagtgtcggggagcagccagacgtcacccacgacccctatgagtttcttcagtctccagagcctgcggcctctgccaagacctaactctagaccaccttcagctcttttattttatttttttagttttattttgcacgtgtagagtttttgtcatcagacaaggactttgatcctgtcccctttggcatgcgggaagcagccgcggggaggtaatgaattgtctgtggtatcatgtcagcagagtctccaagccccacgaaccctgaggagtggagtcatacgcgaaggccatatggccatcgtgtcagcagagagagtctctgtacacagccccgtgaaccctgaggagtggagtcatacacgaagggcgtgtggccatcgtgtcagcagagagagtctctgtacacagccccgtgaaccctgaggagtggagtcatacgcgaagggtgtgtggccaggctgcagagctgcgtgccgtttgtgtccgagcatcacgtgtggctccagcccttgtttctgccagtgtagacacctctgtctgccccactgtcctggggtcgctcttgggaggcacaggcatgggtgtgtctggcctcattctgtatcagtccagtgtgttcctgtcatagtttgtgtctcccaggcaggccatggtaggggcctcgcaggggccattggggagcacagggccaggctggggtgaggagagctcccctgttttctgtttaattgatgagcctgggaaaggagtgtgttctgcctgcccgttacagtggagcgttccgtgtccataaaacgttttctaactggg

SEQ ID NO: 371178 - DNA, 1947 bp, Homo sapiens
tagaggatcccactcgatccgtgacctgcaggagtttgtgaaggatgctgggagctacagcaagaaagtggtggacgacctcctggaccagatcacaggcggagaccactctaggacgctcttccagctgaagcagagaagaaatgttcccatgaagcctccagatgaagccaaggttggggacaccctaggagacagcagcagctctgttctggagttcatgtcgatgaagtcctatcccgacgtttctgtggatatctccatgctcagctctctggtttctttcagggcctgccatctatcacgtgatgctgtactaaagtcggatcggaatttggtgtcttattaccacggagtctgctttgtcaaccttcagatttctgttttaaagttaatgctggtcagctgtgcctgaattccaaaagaggggataatgagatgtttccctgacttctgtgagtcactctaggaaattcatagagctcaagtctggtcttctgggaaccccatttgatagctggttagtcggaagcacagaccacagcctggggctttcagttggcatcagccggtggggccatcctggagactgtgccctcacctgggaggctgccggtgcagcgcccccgagctgttctgacctccagcagcatttgtggtgcctggatccatgggtcccactgctttgcgtggtgacgttccacctgtctctgctggctctgttcaggcacttatggccgtgatttattataggggaagggtgccaacagcagcagagggacaagagtgacatccaaggaaacccagcgtgaggcccagatccactcccagcagaggcacatgggacacgcttaattcccaggagtgagctgtgacaacacacgtgaaatgcccaccagggaagcccgtcagaggcttggtgctcggggtcacagggcacccccttgccagggaaggtgaagaaggagctggaccctgacgacagccatttgaacttggatgagacgacgaagctcctgcaggacctgcacgaagcacaggcggagcgcggcggctctcggccgtcgtccaacctcagctccctgtccaacgcctccgagagggaccagcaccacctgggaagcccttctcgcctgagtgtcggggagcagccagacgtcacccacgacccctatgagtttcttcagtctccagagcctgcggcctctgccaagacctaactctagaccaccttcagctcttttattttatttttttagttttattttgcacgtgtagagtttttgtcatcagacaaggactttgatcctgtcccctttggcatgcgggaagcagccgcggggaggtaatgaattgtctgtggtatcatgtcagcagagtctccaagccccacgaaccctgaggagtggagtcatacgcgaaggccatatggccatcgtgtcagcagagagagtctctgtacacagccccgtgaaccctgaggagtggagtcatacacgaagggcgtgtggccatcgtgtcagcagagagagtctctgtacacagccccgtgaaccctgaggagtggagtcatacgcgaagggtgtgtggccaggctgcagagctgcgtgccgtttgtgtccgagcatcacgtgtggctccagcccttgtttctgccagtgtagacacctctgtctgccccactgtcctggggtcgctcttgggaggcacaggcatgggtgtgtctggcctcattctgtatcagtccagtgtgttcctgtcatagtttgtgtctcccaggcaggccatggtaggggcctcgcaggggccattggggagcacagggccaggctggggtgaggagagctcccctgttttctgtttaattgatgagcctgggaaaggagtgtgttctgcctgcccgttacagtggagcgttccgtgtccataaaacgttttctaactggg

SEQ ID NO: 371179 - DNA, 3738 bp, Homo sapiens
ccgcctcgccccgtttccggcgcggcccagcgagctcggcaacctcggcgcagcgagcgcgggcggccagccagggccagggggcggtggcggccaaggtccgaccgggtgccagctgttcccagcccccgcctcgggcccgccgccggcgccgccatgggcaagaagcacaagaagcacaaggccgagtggcgctcgtcctacgaggattatgccgacaagcccctggagaagcctctaaagctagtcctgaaggtcggaggaagtgaagtgactgaactctcaggatccggccacgactccagttactatgatgacaggtcagaccatgagcgagagaggcacaaagaaaagaaaaagaagaagaagaagaagtccgagaaggagaagcatctggacgatgaggaaagaaggaagcgaaaggaagagaagaagcggaagcgagagagggagcactgtgacacggagggagaggctgacgactttgatcctgggaagaaggtggaggtggagccgcccccagatcggccagtccgagcgtgccggacacagccagccgaaaatgagagcacacctattcagcaactcctggaacacttcctccgccagcttcagagaaaagatccccatggattttttgcttttcctgtcacggatgcaattgctcctggatattcaatgataataaaacatcccatggattttggcaccatgaaagacaaaattgtagctaatgaatacaagtcagttacggaatttaaggcagatttcaagctgatgtgtgataatgcaatgacatacaataggccagataccgtgtactacaagttggcgaagaagatccttcacgcaggctttaagatgatgagcaaagagcggctgttagctttgaagcgcagcatgtcgtttatgcaggacatggatttttctcagcaggcagctcttttgggcaatgaagatacagctgttgaggaacctgtccctgaagttgtaccagtacaagtagaaactgccaagaaatccaaaaagccgagtagagaagttatcagctgcatgtttgagcctgaagggaatgcctgcagcttgacggacagtaccgcagaggagcacgtgctggcgctggtggagcacgcagctgacgaagctcgggacaggatcaaccggttcctcccaggcggcaaggtagtgctctgtggccaccgagagagggtgccacgtggccccagactctctgtgtgcctctccttctgggttggtgctgtgtgatctagcacagccaccgggatccagaggtcagcgtggggccctgacgggaggtccggatcagacacacataaggctggtctcttcagtcggggtccaggtgcctctggcagggctgccgctggtgtttcatgcatcgtggaggccacgtggtcactgacctcatttccttgatggaggccctgctgcaggctaatcctttctcttggagtgaatgctgacttctgtgtctctgtcactgggtgttgacgtgaggcaccgcccttgttattccagtgggggtgctggtgttggatccgacagatggtccataataggccaccgactgtgttcacgtggctcctgccacagatggtctttgtggtggtggggcccactcagctgaccacgctctcctttctggcaggagacgttctagacccagtgtcttcagtggaaacagagcacaggctgtctgcagtctcaggcttcctagcagccctgataagagaagtagagcaatgcaggtgacattaatccttgcaggtttcatttcacctctatatccaacattttatctcaacatgtagtctgtagaaaacgttaatttgagctttatgggtttttttcatattaagtcttcaaaatgcacatgggatgggatgtaaagaacgctgaagtgggggcatttcagaggtgtctgctgctttttgcctgtgcctgctgggaagttgcagtgctctgtgtggcttgcgtgttgcgaggttgcggtctgcgtggctcacgtgttgggaggtcgtggtctgcgtggctcacgtgttgggaagttgcagtggtctgtatggcttgcgtgttgggaggttgcagtctgtgtggcccgtgtgttgggaggttgtggtctgcgtggcttgtgtgttgggaggttgtggtttttgtggcttgcgtgttggggggttgtggtctgtgtggctcacgtgttgggaggttgtggtctgcgtggctcacgtgttgggcagttgtctgcttggctcacgtgttgggaagttgtggtctgcgtggctcatgtgttgggaagttgtttatgtggcttgtgtgctggaggttgtggcctgcgtggctcacgtgttgggcggttgtctgcttggctcatgtgttgggaagttgtggtctgcgtggcttgtgtgttgggaagttgtttatgtggcttgtgtgctggaggttgtggtctacgtggcttgcactgtagttcttttggacagccttgctctgcagtctgtgtttcagccctggaattgccacattctccaagaagccctggtttcttgactagagagccttgtgtagaagccaggacctgggttctgggtgaagccctctgcagatagagctgggagatgcctgttgtgtgtgtctgcaccacatacatggacactgtgcagagggattctgttggcacctgtgtttacatgggttgaaaactgtttttacacggaaacttccagttccctcgtgccccgtgggttccgcccacttcttccctttcagttttgtatctgcgccgtgaggacttgtctcctaatcttcgtatcaactccgtgtcccattgagctgaccttccgcctctcccccagggccctggccatcctgtgggctctgagactttgcatggatccgcggtggggagctgcccccacacaaacgtccggctcttctcaggccaggtggctgccctgacatggcatgatgtccagcgcatggacgtcacccttgcactggagcccagccaaccgctgcatgacagccctcttcccccttgaaccccaagtctgcacacaccagtgcctcctcttcctggatcctcctgatggcctgtacacagaactggggtgtgggtggtgggtttttaaatgaaaaccagtccacacatgcttgagggctggagccgcctgccgtcagggcagtgccatgctgacctgctgaccgttccattttgtcaaggctcatgagcaattttaaatgtttactcgtgggtgaaggtttttgtttcagctgtaccccctatagcagggccatggggagcctaagaggttctccttggcacctgtgcgcgctctgctgttgccggtgagtctgaaattccagggaatgccgtgaggggccctctggcgtttgttcttggacaaatgtgctttcacccccattaagccctgcttgttggtcttcatttcatttgtgctgcgctgcccctcctgagggacagacgctcaggcagtgcttccttccagatgggctatctgaagaggaacggggacgggagcctgctctacagcgtggtcaacacggccgagccggacgctgatgaggaggagacccacccggtggacttgagctcgcttcccctgttttctgtttaattgatgagcctgggaaaggagtgtgttctgcctgcccgttacagtggagcgttccgtgtccataaaacgttttctaactggg

SEQ ID NO: 371180 - DNA, 2435 bp, Homo sapiens
caagaacctctcagaaacttctctcattaactaaagtcagctctcccgctgggcccactgaagataatgacttgtctaggaaggcagttgcccaagcacctggtagaagatacacaggaaaaagaaaatcagcctgcaccccagcatcagatcattgtgaaccacttttgccaacttctagcctgtcgattgttaacaggtccaaggaagaagtcacctcacacaaatatcagcacgaaaaattatttattcaagtgaaagggaagaaaagtcgtcatcaaaaagaggattccctttcttggagtaatagtgcttatttatccttggatgatgatgctttcacggctccatttcatagggatggaatgctgagtttaaagcaactactgtcttttctcagtatcacagactttcagttacctgatgaagactttggacctcttaagcttgaaaaagtgaagtcctgctcagaaaaaccagtggagccctttgagtcaaaaatgtttggagagagacatcttaaagagggaagctgtatttttccagaggaactgagtcctaaacgcatggatacagaaatggaggacttagaagaggaccttattgttctaccaggaaaatcacatcccaaaaggccaaactcgcaaagccagcatacaaagacgggcctttcttcatccatattactttatactcctttaaatacggttgcgcctgatgataatgacaggcctaccacagacatgtgttcacctgctttccccatcttaggtactactccagcctttggccctcaaggctcctatgaaaaagcatctacagaagttgctggacgaacttgctgcacaccccaacttgctcatttgaaagactcagtctgtcttgccagtgatactaaacaattcgacagttcaggcagcccagcaaaaccacataccaccctgcaagtgtcaggcaggcaaggacaacctacctgtgactgtgactctgtcccgccaggaacacctccacccattgagtcattcacttttaaagaaaatcagctctgtagaaacacatgccaggagctgcataaacattccgtcgaacagactgaaacagcagagcttcctgcttctgatagcataaacccaggcaacctacaattggtttcagagttaaagaatccttcaggttcctgttccgtagatgtgagtgccatgttttgggaaagagccggttgtaaagagccatgtatcataactgcttgcgaagatgtagtttctctttggaaagctctggatgcttggcagtgggaaaaactttatacctggcacttcgcagaggttccagtattacagatagttccagtgcctgatgtgtataatctcgtgtgtgtagctttgggaaatttggaaatcagagagatcagggcattgttttgttcctctgatgatgaaagtgaaaagcaagtactactgaagtctggaaatataaaagctgtgcttggcctgacaaagaggaggctagttagtagcagtgggaccctttctgatcaacaagtagaagtcatgacgtttgcagaagatggaggaggcaaagaaaaccaatttttgatgccccctgaggagactatactaacttttgctgaggtccaagggatgcaagaagctctgcttggtactactattatgaacaacattgttatttggaatttaaaaactggtcaactcctgaaaaagatgcacattgatgattcttaccaagcttcagtctgtcacaaagcctattctgaaatggggcttctctttattgtcctgagtcatccctgtgccaaagagagtgagtcgttgcgaagccctgtgtttcagctcattgtgattaaccctaagacgactctcagcgtgggtgtgatgctgtactgtcttcctccagggcaggctggcaggttcctggaaggtgacgtgaaagatcactgtgcagcagcaatcttgacttctggaacaattgccatttgggacttacttctcggtcagtgtactgccctcctcccacctgtctctgaccaacattggtcttttgtgaaatggtcgggtacagactctcatttgctggctggacaaaaagatggaaatatatttgtataccactattcataagttagggtaaagtgaaaacacaattttctggatatattgggcctcttagtattttttggagttttaaatataaaggagaatatctgaatgacacttaaaatgattgcttgtttatgtccagacagacttattttttattctaatgatggtagcaccactgatcttggatgtacatttatgtatactttgagaaaaagggttttaggttgatttttgtaatttcccacatttgtacatgtgcttttaaaggtgtacataaagcttcaaatggcaataaatatttatttttatacattc

SEQ ID NO: 371181 - DNA, 1252 bp, Homo sapiens
ggtcagctgatcgcgcactgagggtgcgatcccgggctccccattccttcctggggcgcctccccggcccagggccaactgggtcccggtgtcggcaggcctggggtcggcgacggctgctcttttcgttctgtcgcctgcccgatggacgagcctcccgggaagcccctcagctgtgaggagaaggaaaaggtactagagatacctggaccattaacggataaatagaagattcatttgttgagtgactgaggatggcagttcctgctaccttcaaggatctggatgatggggagaaacagagaacatagtgtgagaatactgtgttaaaggagaaattagcattcttgaaaagggaatacagcaagacactagcccgccttcagcgtgcccaaagagctgaaaagattaagcattctattaagaaaacagtagaagaacaagattgtttgtctcagcaggatctctcaccgcagctaaaacactcagaacctaaaaataaaatatgtgtttatgacaagttacacatcaaaacccatcttgatgaagaaactggagaaaagacatctatcacacttgatgttgggcctgagtcctttaaccctggagatggcccaggaggattacctatacaaagaacagatgacacccaagaacattttccccacagggtcagtgaccctagtggtgagcaaaagcagaagctgccaagcagaagaaagaagcagcagaagaggacatttatttcacaggagagagactgtgtctttggcactgattcactcagattgtctgggaaaagactaaaggaacaggaagaaatcagtagcaaaaatcctgctagatcaccagtaactgaaataagaactcaccttttaagtcttaaatctgaacttccagattctccagaaccagttacagaaattaatgaagacagtgtattaattccaccaactgcccaaccagaaaaaggtgttgatacattcctaagaagacctaatttcaccagggcgactacagttcctttacagactctatcagatagcggtagtagtcagcaccttgaacacattcctcctaaaggtagcagtgaacttactactcacgacctaaaaaacattagatttacttcacctgtaagtttggaggcacaaggcaaaaaaatgactgtctctacagataacctccttgtaaataaagctataagtaaaagtggccaactgcccacaagttctaatttagaggcaaatat

SEQ ID NO: 371182 - DNA, 1699 bp, Homo sapiens
ggtcagctgatcgcgcactgagggtgcgatcccgggctccccattccttcctggggcgcctccccggcccagggccaactgggtcccggtgtcggcaggcctggggtcggcgacggctgctcttttcgttctgtcgcctgcccgatggacgagcctcccgggaagcccctcagctgtgaggagaaggaaaagttaaaggagaaattagcattcttgaaaagggaatacagcaagacactagcccgccttcagcgtgcccaaagagctgaaaagattaagcattctattaagaaaacagtagaagaacaagattgtttgtctcagcaggatctctcaccgcagctaaaacactcagactgaaacagcagagcttcctgcttctgatagcataaacccaggcaacctacaattggtttcagagttaaagaatccttcaggttcctgttccgtagatgtgagtgccatgttttgggaaagagccggttgtaaagagccatgtatcataactgcttgcgaagatgtagtttctctttggaaagctctggatgcttggcagtgggaaaaactttatacctggcacttcgcagaggttccagtattacagatagttccagtgcctgatgtgtataatctcgtgtgtgtagctttgggaaatttggaaatcagagagatcagggcattgttttgttcctctgatgatgaaagtgaaaagcaagtactactgaagtctggaaatataaaagctgtgcttggcctgacaaagaggaggctagttagtagcagtgggaccctttctgatcaacaagtagaagtcatgacgtttgcagaagatggaggaggcaaagaaaaccaatttttgatgccccctgaggagactatactaacttttgctgaggtccaagggatgcaagaagctctgcttggtactactattatgaacaacattgttatttggaatttaaaaactggtcaactcctgaaaaagatgcacattgatgattcttaccaagcttcagtctgtcacaaagcctattctgaaatggggcttctctttattgtcctgagtcatccctgtgccaaagagagtgagtcgttgcgaagccctgtgtttcagctcattgtgattaaccctaagacgactctcagcgtgggtgtgatgctgtactgtcttcctccagggcaggctggcaggttcctggaaggtgacgtgaaagatcactgtgcagcagcaatcttgacttctggaacaattgccatttgggacttacttctcggtcagtgtactgccctcctcccacctgtctctgaccaacattggtcttttgtgaaatggtcgggtacagactctcatttgctggctggacaaaaagatggaaatatatttgtataccactattcataagttagggtaaagtgaaaacacaattttctggatatattgggcctcttagtattttttggagttttaaatataaaggagaatatctgaatgacacttaaaatgattgcttgtttatgtccagacagacttattttttattctaatgatggtagcaccactgatcttggatgtacatttatgtatactttgagaaaaagggttttaggttgatttttgtaatttcccacatttgtacatgtgcttttaaaggtgtacataaagcttcaaatggcaataaatatttatttttatacattc

SEQ ID NO: 371183 - DNA, 1356 bp, Homo sapiens
ccataggtgatggtatctttttttggtcacccttattcatagagagtagtagggtcagggttttaaataggctattgtgggctggtctgagaaaccagccaccatgtacaagattgtttttatgggaaaacatgttctgaatgttcaaaaaccaatttacaaatgaatatttctaatttgagcactccctgcacatgtgtgtcctcattctctctttgccaatatttccccaaatgaatggcatgaaatgtagtactatctaaggggaaggaaatggatgaatcagattcatgcctggcaagactggctaaaacaaacactgggaaccggaagcaggagaagctaaagctagaagttggctgaacgcggtggctgacgtctgtaatcccaacactttgggaggctgaggtgggaggatcccttgaggccaggtgttcaacaacagcctgggtaacacaggaaggccttgtctctaaaaaaaaaaagaagaagaacaagaagccagaagtccagtccagtaataatctcaacagttcctagacggcagggaaaaaaatcaagccagtggttaaatcctggatacttcagagcctatcggtcattgctttaattgtttggtttttgtctctgccagatctttatttttcctgacatactcttgacagtctatttgggatatttatttttctccgaaattaggggcttctctttattgtcctgagtcatccctgtgccaaagagagtgagtcgttgcgaagccctgtgtttcagctcattgtgattaaccctaagacgactctcagcgtgggtgtgatgctgtactgtcttcctccagggcaggctggcaggttcctggaaggtgacgtgaaagatcactgtgcagcagcaatcttgacttctggaacaattgccatttgggacttacttctcggtcagtgtactgccctcctcccacctgtctctgaccaacattggtcttttgtgaaatggtcgggtacagactctcatttgctggctggacaaaaagatggaaatatatttgtataccactattcataagttagggtaaagtgaaaacacaattttctggatatattgggcctcttagtattttttggagttttaaatataaaggagaatatctgaatgacacttaaaatgattgcttgtttatgtccagacagacttattttttattctaatgatggtagcaccactgatcttggatgtacatttatgtatactttgagaaaaagggttttaggttgatttttgtaatttcccacatttgtacatgtgcttttaaaggtgtacataaagcttcaaatggcaataaatatttatttttatacattc

SEQ ID NO: 371184 - DNA, 2854 bp, Homo sapiens
caagaacctctcagaaacttctctcattaactaaagtcagctctcccgctgggcccactgaagataatgacttgtctaggaaggcagttgcccaagcacctggtagaagatacacaggaaaaagaaaatcagcctgcaccccagcatcagatcattgtgaaccacttttgccaacttctagcctgtcgattgttaacaggtccaaggaagaagtcacctcacacaaatatcagcacgaaaaattatttattcaagtgaaagggaagaaaagtcgtcatcaaaaagaggattccctttcttggagtaatagtgcttatttatccttggatgatgatgctttcacggctccatttcatagggatggaatgctgagtttaaagcaactactgtcttttctcagtatcacagactttcagttacctgatgaagactttggacctcttaagcttgaaaaagtgaagtcctgctcagaaaaaccagtggagccctttgagtcaaaaatgtttggagagagacatcttaaagagggaagctgtatttttccagaggaactgagtcctaaacgcatggatacagaaatggaggacttagaagaggaccttattgttctaccaggaaaatcacatcccaaaaggccaaactcgcaaagccagcatacaaagacgggcctttcttcatccatattactttatactcctttaaatacggttgcgcctgatgataatgacaggcctaccacagacatgtgttcacctgctttccccatcttaggtactactccagcctttggccctcaaggctcctatgaaaaagcatctacagaagttgctggacgaacttgctgcacaccccaacttgctcatttgaaagactcagtctgtcttgccagtgatactaaacaattcgacagttcaggcagcccagcaaaaccacataccaccctgcaagtgtcaggcaggcaaggacaacctacctgtgactgtgactctgtcccgccaggaacacctccacccattgagtcattcacttttaaagaaaatcagctctgtagaaacacatgccaggagctgcataaacattccgtcgaacagactgaaacagcagagcttcctgcttctgatagcataaacccaggcaacctacaattggtttcagagttaaagaatccttcaggttcctgttccgtagatgtgagtgccatgttttgggaaagagccggttgtaaagagccatgtatcataactgcttgcgaagatgtagtttctctttggaaagctctggatgcttggcagtgggaaaaactttatacctggcacttcgcagaggttccagtattacagatagttccagtgcctgatgtgtataatctcgtgtgtgtagctttgggaaatttggaaatcagagagatcagggcattgttttgttcctctgatgatgaaagtgaaaagcaagtactactgaagtctggaaatataaaagctgtgcttggcctgacaaagaggaggctagttagtagcagtgggaccctttctgatcaacaagtagaagtcatgacgtttgcagaagatggaggaggcaaagaaaaccaatttttgatgccccctgaggagactatactaacttttgctgaggtccaagggatgcaagaagctctgcttggtactactattatgaacaacattgttatttggaatttaaaaactggtcaactcctgaaaaagatgcacattgatgattcttaccaagcttcagtctgtcacaaagcctattctgaaatggggcttctctttattgtcctgagtcatccctgtgccaaagagagtgagtcgttgcgaagccctgtgtttcagctcattgtgattaaccctaagacgactctcagcgtgggtgtgatgctgtactgtcttcctccagggcaggctggcaggttcctggaaggtgacgtgaaagatcactgtgcagcagcaatcttgacttctggaacaattgccatttgggacttacttctcggtcagtgtactgccctcctcccacctgtctctgaccaacattggtcttttgtgaaatggtcgggtacagactctcatttgctggctggacaaaaagatggaaatatatttgtataccactattcataagttagggtaaagtgaaaacacaattttctggatatattgggcctcttagtattttttggagttttaaatataaaggagaatatctgaatgacacttaaaatgattgcttgtttatgtccagacagacttattttttattctaatgatggtagcaccactgatcttggatgtacatttatgtatactttgagaaaaagggttttaggttgatttttgtaatttcccacatttgtacatgtgcttttaaaggtgtacataaagcttcaaatggcaataaatatttatttttatacattcaaaaaaaaatatggctctatctggtctcagggaggggagctatggggaccgctatctattaggagggggtaattaattatccctccgtcactgaccaccgtgtcttccggacgtaccgcctgtagtgagccgtgtcccagataacctcataaggcggcaatcacgagttatctgcagatatcggtggattagcgacagacaagatcacgggagcgatgagggctctagatatcgctacgtatcaccttaaagcgcacgatccgatcacagcatctacatacgacctcatcgcactgaccagcatttctacactgagccttctactcctagtgtgaaagctcgacaggccttcattcattcatgtcgcgtccactcgataccactaatgcgcgcatctccagtaaactccatatccaatg

SEQ ID NO: 371185 - DNA, 704 bp, Homo sapiens
tgagaagataaaattactgggacttggtgattgactagattgagaggaaggagagaatatcaacatggtagggttggtcacttgagtggtgaccaagctcgaaatgtgggtattatccttgtctccttccccccagtctaggtggtcacttgagtggtgaccaaccctgaaacttggacattagatggtgatgcaattcattgagataggaatgcagaaagaaacaaaaggtttatagaaaaagttaacaagtttaattttgaatataatgaattcgaggtgcttgcagcatatctaggtagatattatgaaagtaatatatgttcattgtagaaagtttagtatacacgttttctgggttagatttttttttcctgatattaggttagtttatattatgcagttcaacaatgcggagaagggctacctagagactgctttagtgcaaagtactgacttttcatactgttttaattacagaggcaaagaaaaccaatttttgatgccccctgaggagactatactaacttttgctgaggtccaagggatgcaagaagctctgcttggtactactattatgaacaacattgttatttggtaagctttccctctaggtcctcagttccctcatctgtagtatgaggatatacctctaattttacagggttgttgtgaagattaaataagagagtatgtgtaaacat

SEQ ID NO: 371186 - DNA, 1118 bp, Homo sapiens
ggtcagctgatcgcgcactgagggtgcgatcccgggctccccattccttcctggggcgcctccccggcccagggccaactgggtcccggtgtcggcaggcctggggtcggcgacggctgctcttttcgttctgtcgcctgcccgatggacgagcctcccgggaagcccctcagctgtgaggagaaggaaaagttaaaggagaaattagcattcttgaaaagggaatacagcaagacactagcccgccttcagcgtgcccaaagagctgaaaagattaagcattctattaagaaaacagtagaagaacaagattgtttgtctcagcaggatctctcaccgcagctaaaacactcagaacctaaaaataaaatatgtgtttatgacaagttacacatcaaaacccatcttgatgaagaaactggagaaaagacatctatcacacttgatgttgggcctgagtcctttaaccctggagatggcccaggaggattacctatacaaagaacagatgacacccaagaacattttccccacagggtcagtgaccctagtggtgagcaaaagcagaagctgccaagcagaagaaagaagcagcagaagaggacatttatttcacaggagagagactgtgtctttggcactgattcactcagattgtctgggaaaagactaaaggaacaggaagaaatcagtagcaaaaatcctgctagatcaccagtaactgaaataagaactcaccttttaagtcttaaatctgaacttccagattctccagaaccagttacagaaattaatgaagacagtgtattaattccaccaactgcccaaccagaaaaaggtgttgatacattcctaagaagacctaatttcaccagggcgactacagttcctttacagactctatcagatagcggtagtagtcagcaccttgaacacattcctcctaaaggtagcagtgaacttactactcacgacctaaaaaacattagatttacttcacctgtaagtttggaggcacaaggcaaaaaaatgactgtctctacagataacctccttgtaaataaagctataagtaaaagtggccaactgcccacaagttctaatttagaggcaaatat

SEQ ID NO: 371187 - DNA, 2286 bp, Homo sapiens
caagaacctctcagaaacttctctcattaactaaagtcagctctcccgctgggcccactgaagataatgacttgtctaggaaggcagttgcccaagcacctggtagaagatacacaggaaaaagaaaatcagcctgcaccccagcatcagatcattgtgaaccacttttgccaacttctagcctgtcgattgttaacaggtccaaggaagaagtcacctcacacaaatatcagcacgaaaaattatttattcaagtgaaagggaagaaaagtcgtcatcaaaaagaggattccctttcttggagtaatagtgcttatttatccttggatgatgatgctttcacggctccatttcatagggatggaatgctgagtttaaagcaactactgtcttttctcagtatcacagactttcagttacctgatgaagactttggacctcttaagcttgaaaaagtgaagtcctgctcagaaaaaccagtggagccctttgagtcaaaaatgtttggagagagacatcttaaagagggaagctgtatttttccagaggaactgagtcctaaacgcatggatacagaaatggaggacttagaagaggaccttattgttctaccaggaaaatcacatcccaaaaggccaaactcgcaaagccagcatacaaagacgggcctttcttcatccatattactttatactcctttaaatacggttgcgcctgatgataatgacaggcctaccacagacatgtgttcacctgctttccccatcttaggtactactccagcctttggccctcaaggctcctatgaaaaagcatctacagaagttgctggacgaacttgctgcacaccccaacttgctcatttgaaagactcagtctgtcttgccagtgatactaaacaattcgacagttcaggcagcccagcaaaaccacataccaccctgcaagtgtcaggcaggcaaggacaacctacctgtgactgtgactctgtcccgccaggaacacctccacccattgagtcattcacttttaaagaaaatcagctctgtagaaacacatgccaggagctgcataaacattccgtcgaacagactgaaacagcagagcttcctgcttctgatagcataaacccaggcaacctacaattggtttcagagttaaagaatccttcaggttcctgttccgtagatgtgagtgccatgttttgggaaagagccggttgtaaagagccatgtatcataactgcttgcgaagatgtagtttctctttggaaagctctggatgcttggcagtgggaaaaactttatacctggcacttcgcagaggttccagtattacagatagttccagtgcctgatgtgtataatctcgtgtgtgtagctttgggaaatttggaaatcagagagatcagggcattgttttgttcctctgatgatgaaagtgaaaagcaagtactactgaagtctggaaatataaaagctgtgcttggcctgacaaagaggaggctagttagtagcagtgggaccctttctgatcaacaagtagaagtcatgacgtttgcagaagatggaggaggcaaagaaaaccaatttttgatgccccctgaggagactatactaacttttgctgaggtccaagggatgcaagaagctctgcttggtactactattatgaacaacattgttatttggaatttaaaaactggtcaactcctgaaaaagatgcacattgatgattcttaccaagcttcagtctgtcacaaagcctattctgaaatggttcctggaaggtgacgtgaaagatcactgtgcagcagcaatcttgacttctggaacaattgccatttgggacttacttctcggtcagtgtactgccctcctcccacctgtctctgaccaacattggtcttttgtgaaatggtcgggtacagactctcatttgctggctggacaaaaagatggaaatatatttgtataccactattcataagttagggtaaagtgaaaacacaattttctggatatattgggcctcttagtattttttggagttttaaatataaaggagaatatctgaatgacacttaaaatgattgcttgtttatgtccagacagacttattttttattctaatgatggtagcaccactgatcttggatgtacatttatgtatactttgagaaaaagggttttaggttgatttttgtaatttcccacatttgtacatgtgcttttaaaggtgtacataaagcttcaaatggcaataaatatttatttttatacattc

SEQ ID NO: 371188 - DNA, 657 bp, Homo sapiens
tgagttgaaaaaatgtgtaactctagttcattggttttgattgctataaggtattccatcagaggcatacacaacattttacttacaaattcctctagaaatgaaaacctaggttgcctgcaactcattgtcactgcaaataatacttcagtgatttttttaatacatggacttgtgtatggaatccagtttccaaggtatccccaagtgacccttgtcttctagtattcatgcccatgtataatccctttccacattgtgtcggggttaatctttgtgaccaacctaatatggcatagtgatagctttgtgaattcccagactaagtcataaaataacactgctgcttccgccttgttctcttggattacttgttctcggcaaaaccagccactatgttatgaggatgctttagcagcccagccctatggagcagccaatagctaccaccagcttaccagccctgtgcctgaggcatcttagaagtggatcctttagcccaagttaaacattcagatgaccggagccccagccaacatctcgactgaaacttcataagcaaccctgagccagaactatccagctaagccactcctgatttcttgacccacaaaaactatgagataataaatgtttattgttggtttaaaaaaatcc

SEQ ID NO: 371189 - DNA, 7571 bp, Homo sapiens
  misc_feature (4724)..(4724): n is a, c, g, or t
ggtctcgatctcctgaccttgtgatccacctcctcggcctcccaaagtgctgggattacaggcatgagccacggcacccagcctcatttgctgttaaactcatttattgagtcacctttttcttcctcacactttttagtcttagaatttttgtgtgtttttatttaccctaacctgtcaatttcatagtttccactttcttgttgaagtttccaaacttgacctcatgcctttgaatatactaattctattgctttgacacatttttttcccgaaaaaggtgtaaatgggtcaataaatggaagtaatacatcatctgtaattggtatcaacacatctgtactatccactactgcttcaagttccatgggacaaactaaaagtacaagctcaggtggaggaaatcgaaaatgtaatcaggaacaaagcaaaaaccagcctttggatgctagagttgacaaaatcaaagataagaaaccaaggaagaaagcaatggaaagttctagcaacagtgatagtgattcaggcacatcatcagacacctcaagtgaaggcattagtagcagtgattcagatgatctagaagaagatgaagaagaagaagatcaaagtattgaagaaagtgaagatgatgattctgattcagagagtgaagcacaacataaaagtaacaaccaggtgctattacatggtatttcagacccaaaagcagatggacagaaagcaactgaaaaagcccaggaaaaaagaatacaccagccattacctcttgcgtctgaatcccagactcactcattccaatcccagcagaagcagcctcaggttttgtcacagcagcttccatttattttccaaagctctcaggcaaaggaggaatctgtgaacaaacacaccagtgtaatacagtctacgggattggtgtccaatgtgaaacctttatctttggtaaatcaagccaaaaaggaaacttacatgaaactcatagttccttctcctgatgttcttaaagcagggaataaaaatacctctgaagaatctagtttattgaccagtgaattgagatccaaacgggaacaatataaacaggcattcccatcacagttaaagaaacaagagtcatcgaagagcctgaagaaggttattgcagctttgtcaaatccaaaagcaacctctagttcaccagcacatccaaaacaaacattagaaaacaaccacccaaatccattcttgacaaatgcacttttaggtaatcaccaaccaaatggagttattcaaagtgtcattcaagaagctcctctagcacttactaccaaaactaaaatgcagagcaagattaatgaaaacattgctgctgcaagtagcacccctttttcctcacctgtaaatctgagtacaagtgggagaagaacccctggcaatcagacacctgtaatgccctctgcctctcccatcctgcatagtcaagggaaggaaaaagcagttagcaataatgtaaacccagtaaaaacacagcatcactcccatcctgcaaaatctttagtggaacaattcagaggaacagattcagacattcccagtagtaaagattctgaagattcaaatgaggatgaagaggaagatgatgaagaagaagatgaggaagatgatgaagatgatgaatctgatgacagccaatcagaatcagatagtaattcagaatcagatacagaaggatcagaagaagaagatgatgatgataaagaccaagatgaatcagatagtgatactgaaggagagaaaacttcaatgaaactgaataaaacaacttcctctgtcaaaagcccttccatgagtctcacaggtcactcaacacctcgtaacctccacatagcaaaagccccaggctctgctcctgctgccttatgttctgaatcccagtcacctgcttttcttggtacatcttcttccacacttacttcaagcccacactctggcacttccaaaagaagaagagtaacagatgaacgtgaactgcgtattccattggaatatggctggcagagagagacaagaataagaaactttggagggcgccttcaaggagaagtagcatattatgctccatgtggaaagaaacttaggcagtaccctgaagtaataaagtatctcagcagaaatggaataatggatatctcaagggacaatttcagcttcagtgcaaaaataagagtgggtgacttctatgaagccagagatggaccgcagggaatgcagtggtgtcttttgaaagaagaggatgtcattcctcgtatcagggcaatggaaggtcgtagaggaagaccaccaaatccagatagacaacgagcaagagaggaatccaggatgagacgtcggaaaggtcgacctccaaatgttggcaatgctgaattcctagataacgcagatgcaaagttgctaagaaaactgcaagctcaagaaatagccaggcaagcagcacaaataaagcttttgagaaaacttcaaaagcaggaacaggctcgggttgctaaagaagccaaaaaacaacaagcaataatggctgctgaggagaagcggaagcaaaaagaacagataaagattatgaaacagcaggaaaaaattaagagaatacagcaaatcagaatggaaaaagaacttcgagctcagcaaattctagaggctaaaaagaaaaagaaggaagaagcggcaaatgccaaattattggaggccgagaaacgaataaaggaaaaagaaatgagaagacaacaagctgttcttctgaaacatcaggaacgagagcgaaggcgacaacacatgatgcttatgaaagctatggaagctcgtaaaaaagcagaagaaaaagagcggttgaaacaagaaaaacgtgatgagaaaagattaaataaagagcgtaaactagagcagcgaagattagaattagaaatggcaaaggaactaaagaagcctaatgaagacatgtgcttagcagaccaaaagcctttgccagagttgcctcgtattccaggacttgttctctctggaagtacattttcagactgtctcatggtggtgcagttcttacgaaactttggtaaagttttgggctttgatgtgaatattgatgttccaaacctgagtgttcttcaagagggattgctaaatataggggacagcatgggtgaagtacaagacttgcttgtgaggctcctctcagctgctgtatgtgatccaggtctaataacaggatacaaggctaaaacagctcttggagaacatttgctgaatgttggtgtgaatcgagacaatgtttccgagattttacagatatttatggaagcccactgtggacaaactgagcttactgaaagtctgaagaccaaagcttttcaggctcacactccagcacagaaagcttcagtcctggctttcctgatcaatgaactggcatgcagcaagagtgtggtcagtgaaatcgacaagaacattgattatatgtcaaacttgaggagagataaatgggtggtagaaggtaaactccgcaagctcagaatcattcatgctaagaaaacaggcaaaagagacacttcaggtggcattgatctgggagaagagcagcatcccttgggcacacccactccaggacgcaagcgaagaaggaagggaggagacagtgattatgacgatgatgatgacgatgacagtgatgaccaaggggatgaagatgatgaggatgaagaagataaagaagacaaaaaaggaaaaaagactgatatctgtgaagatgaggatgaaggtgaccaagcagcaagtgttgaagagctggaaaaacagattgaaaaactgagtaaacaacagagtcagtacagaaggaagctctttgatgcgtctcactcattgcgttcagtgatgtttggccaagatcgttacagacgccggtactggattcttccccaatgtggggggatttttgtagaaggcatggagagtggtgaaggactagaagaaattgcaaaagaaagagaaaaactgaaaaaggcagaaagtgtccagatcaaagaagaaatgtttgagacttctggggacagtttaaattgttcaaatacagatcactgtgaacaaaaggaagatcttaaagaaaaagataacacaaatctattccttcagaaacctggctctttttccaaattaagcaagcttttggaagtagctaagatgcctcctgagtcagaggttatgacccccaaaccaaatgctggtgcaaatgggtgcacgttgtcttatcagaacagtggaaaacattcactgggcagcgttcagtcaacagcaacgcaaagcaatgtggaaaaggcagactctaataatctgtttaatactggttcaagtggtccagggaagttctacagtcctctccccaatgaccagttactaaaaacgctgactgaaaagaatagacaatggtttagtcttttgccacgaacaccctgtgatgacacttcacttactcatgccgatatgtcaactgcttctttggtgactcctcagtctcagccaccatctaagtcaccttcacctaccccagctcctcttggatcttctgctcagaatcctgttggcttaaatccatttgctttatcacctcttcaggtgaaaggtggagtatctatgatgggacttcagttttgtggatggcccactggtgtggttacttctaatattccatttacatnatctgtacctagtctaggatcggggttagggttatcagaaggaaatggtaattcattcttgacttccaatgttgcttcaagtaaaagtgaatctccagtaccacagaatgaaaaggccacttcagctcaacctgcagctgttgaagtagcaaaaccagtagattttcctagtccaaaacctattccagaagaaatgcagtttggttggtggagaattattgacccagaggacctaaaagctttgctcaaagtgctgcatctcagaggaataagagaaaaggcattacaaaaacaaattcagaaacatttggattatattactcaagcctgcctcaagaataaggatgttgctattattgaactgaatgaaaatgaagaaaaccaagtaactcgagatattgtggagaactggtcagtagaagaacaagcaatggaaatggatttgagtgtccttcaacaggtagaagatctagaaaggagagttgcatcagcaagtttgcaagtgaagggttggatgtgtccagagcctgcatcagaaagggaggacttggtatattttgaacataaatcatttactaaattgtgcaaggagcatgatggagaatttactggcgaagacgaaagcagtgcacatgcactagaacggaagagtgacaaccccctagatatagctgtaaccaggctggctgatttggagcggaacattgaaagaagaattgaagaggatattgctccagggctcagggtatggagaagggcattatcagaagctcgcagtgctgcacaggtagctctgtgcattcagcaattacagaaatcaatagcatgggaaaaatcaattatgaaagtttactgccaaatctgtcgaaagggagataatgaagaactgcttcttctttgtgatggctgtgacaaaggctgtcatacctactgccatagacccaagattacaacaatcccagatggagactggttttgtccagcttgcattgctaaggcaagtggtcaaactctaaaaatcaaaaaacttcatgtcaaaggaaaaaagactaatgagtcaaagaaaggcaagaaggtaactttaacaggagatactgaagatgaagactctgcatctacaagtagttcactaaaaagaggaaacaaagacctcaagaaaagaaaaatggaggaaaacacttctattaacttgtcaaaacaagaaagttttacttcagttaagaaacctaaaagagatgactccaaggacctagctctttgcagtatgattctgactgaaatggaaactcatgaggatgcatggccttttctacttcctgtaaacttgaaacttgttcctggttataagaaagttattaagaagcctatggatttttccacaattagagagaaactaagtagtggacagtatccaaaccttgaaacctttgctctagatgtcaggcttgtttttgacaactgtgaaacatttaatgaagatgattctgatataggcagagctggccacaatatgaggaagtattttgaaaaaaagtggacagatactttcaaagtgagctgaagttataataatctctttatttttttccttctaaacaaggacaaatgagaccagcaatgtgaactgtatttacataaacgtgcaaggcacatacataatgactttctttttccttaagtataaaaaaaaagtatcagaagaatgataccatttttaaaggcttcattcctacaacaaccaaggccctcggttattggtttgtgtgatttatcagctaatttaggtagaacagggaagcacacccaaagaattttcaaaggaaagggtgttatagtgcaatagcaattaaaatatatcaaatcgcactgaatactcaacaccagagctctaatgtgggaaatggttctcctttccctctcaataaatatctatttttcatttttttactttgtagtttattttttagtgaatgtatttaattttatgaattatttatgattaaaccacatccagaatcttcgttttctgtgaaaaggaagaactagaaaattgctttaaatcttgaaaatacaaggaatgttttaaaatataaaacaaagccaagttaaactgtttacactgatgtgctataaaagcaccaaaaagaaactttactgtagagttacaagtacatttatatatatatgttgctgcatcacttgtgtagttaaattgtatttcaaaacagtgaaaaaattgacatgtatatactgttcattcttgtttatattaagtcttgttttaaatatgtattatgtgtatatattgtttgcagacattattgttcatgccttagaggattgtagcattttattttcgtctgaaggtaatgatagctatacagtctgtacagtaattatcctctaccaacactgtggcgtctccttaatcttggtagtgcctgcctttgaaacagggtgtaggggatattagttttccatttttctattttgttatataattttaagccaccagggcctaaattaaagtataatcatttgtatccatgtggaataaaattgtgacaatttcctacgcacacagtattttttcatagaaacatttccctcccatttgccttgcctcagaaataaatttaaaagacgtttgtaaccactgtgttttatctactgtgtgttgtggtggcctgttggaggcaaatagatcagattttttttgtacctacgtaagagtacttgaagttttatttaaaataaaatgttgtggaaaaggtagcattctttttttaggagtgttatttttcactatgtgtggcacggatacaataaaagacttttacaaactaa

SEQ ID NO: 371190 - DNA, 2345 bp, Homo sapiens
ttgtactaatttacactcatgagatatttttaatggttacattattttagtatacagattgtcataggttagaattaacttaaaatttgcatttctaaaagctatcttttaaaatgtattgaactggcttgagttggtttgaaatgaccattcccttcttactaataagcttatgcagattcattcacctttcttttctcttttctgtttttctacagagaaagagaattgggcttatcccgccagaaaagcacagaagccacagtgcttcttgttgaaagacagaccctcataatgttacctctagtagaaagatagcatatgcttgttttgcttgtttgggttcatcatactctattgcttgggcagaagagcacatatgaagagaagagaaatgggaaatggggaagacaacgcagagcaccatatcttggggtgtatatagaagctacaggacaagtgtaatttttatcattgcatggggagcattgacataatttctactgcagctgagcattttttaatatggataataggattctgcaagtgatacatttggtcagagaacttaataaactagtcaagtgggataggtcctgtgacagaattgtgtgatacaggtcaaacaggagttgggttatggggaaaatgccagttgaaatatgttttgatctttggagaaacctattttttcatttaacctgttctttaaatccagtatgttccagaacatacaaaaatgtttaaatgttccatttgtaagaggatatcatgtattttatatcaatttaaatgcagttatcctaatcatttttctttcatttttaccctttattaactcttcatttgtttacaaaacaaatccactctatgaacgcaatctctaattatgtgttttctttcaggtatccaaaccttgaaacctttgctctagatgtcaggcttgtttttgacaactgtgaaacatttaatgaagatgattctgatataggcagagctggccacaatatgaggaagtattttgaaaaaaagtggacagatactttcaaagtgagctgaagttataataatctctttatttttttccttctaaacaaggacaaatgagaccagcaatgtgaactgtatttacataaacgtgcaaggcacatacataatgactttctttttccttaagtataaaaaaaaagtatcagaagaatgataccatttttaaaggcttcattcctacaacaaccaaggccctcggttattggtttgtgtgatttatcagctaatttaggtagaacagggaagcacacccaaagaattttcaaaggaaagggtgttatagtgcaatagcaattaaaatatatcaaatcgcactgaatactcaacaccagagctctaatgtgggaaatggttctcctttccctctcaataaatatctatttttcatttttttactttgtagtttattttttagtgaatgtatttaattttatgaattatttatgattaaaccacatccagaatcttcgttttctgtgaaaaggaagaactagaaaattgctttaaatcttgaaaatacaaggaatgttttaaaatataaaacaaagccaagttaaactgtttacactgatgtgctataaaagcaccaaaaagaaactttactgtagagttacaagtacatttatatatatatgttgctgcatcacttgtgtagttaaattgtatttcaaaacagtgaaaaaattgacatgtatatactgttcattcttgtttatattaagtcttgttttaaatatgtattatgtgtatatattgtttgcagacattattgttcatgccttagaggattgtagcattttattttcgtctgaaggtaatgatagctatacagtctgtacagtaattatcctctaccaacactgtggcgtctccttaatcttggtagtgcctgcctttgaaacagggtgtaggggatattagttttccatttttctattttgttatataattttaagccaccagggcctaaattaaagtataatcatttgtatccatgtggaataaaattgtgacaatttcctacgcacacagtattttttcatagaaacatttccctcccatttgccttgcctcagaaataaatttaaaagacgtttgtaaccactgtgttttatctactgtgtgttgtggtggcctgttggaggcaaatagatcagattttttttgtacctacgtaagagtacttgaagttttatttaaaataaaatgttgtggaaaaggtagcattctttttttaggagtgttatttttcactatgtgtggcacggatacaataaaagacttttacaaactaa

SEQ ID NO: 371191 - DNA, 2272 bp, Homo sapiens
ttgtactaatttacactcatgagatatttttaatggttacattattttagtatacagattgtcataggttagaattaacttaaaatttgcatttctaaaagctatcttttaaaatgtattgaactggcttgagttggtttgaaatgaccattcccttcttactaataagcttatgcagattcattcacctttcttttctcttttctgtttttctacagagaaagagaattgggcttatcccgccagaaaagcacagaagccacagtgcttcttgttgaaagacagaccctcataatgttacctctagtagaaagatagcatatgcttgttttgcttgtttgggttcatcatactctattgcttgggcagaagagcacatatgaagagaagagaaatgggaaatggggaagacaacgcagagcaccatatcttggggtgtatatagaagctacaggacaagtgtaatttttatcattgcatggggagcattgacataatttctactgcagctgagcattttttaatatggataataggattctgcaagtgatacatttggtcagagaacttaataaactagtcaagtgggataggtcctgtgacagaattgtgtgatacaggtcaaacaggagttgggttatggggaaaatgccagttgaaatatgttttgatctttggagaaacctattttttcatttaacctgttctttaaatccagtatgttccagaacatacaaaaatgtttaaatgttccatttgtaagaggatatcatgtattttatatcaatttaaatgcagttatcctaatcatttttctttcatttttaccctttattaactcttcatttgtttacaaaacaaatccactctatgaacgcaatctctaattatgtgttttctttcaggtatccaaaccttgaaacctttgctctagatgtcaggcttgtttttgacaactgtgaaacatttaatgaagatgattctgatataggcagagctggccacaatatgaggaagtattttgaaaaaaagtggacagatactttcaaagtgagctgaagttataataatctctttatttttttccttctaaacaaggacaaatgagaccagcaatgtgaactgtatttacataaacgtgcaaggcacatacataatgactttctttttccttaagtataaaaaaaaagtatcagaagaatgataccatttttaaaggcttcattcctacaacaaccaaggccctcggttattggtttgtgtgatttatcagctaatttaggtagaacagggaagcacacccaaagaattttcaaaggaaagggtgttatagtgcaatagcaattaaaatatatcaaatcgcactgaatactcaacaccagagctctaatgtgggaaatggttctcctttccctctcaataaatatctatttttcatttttttactttgtagtttattttttagtgaatgtatttaattttatgaattatttatgattaaaccacatccagaatcttcgttttctgtgaaaaggaagaactagaaaattgctttaaatcttgaaaatacaaggaatgttttaaaatataaaacaaagccaagttaaactgtttacactgatgtgctataaaagcaccaaaaagaaactttactgtagagttacaagtacatttatatatatatgttgctgcatcacttgtgtagttaaattgtatttcaaaacagtgaaaaaattgacatgtatatactgttcattcttgtttatattaagtcttgttttaaatatgtattatgtgtatatattgtttgcagacattattgttcatgccttagaggattgtagcattttattttcgtctgaaggtaatgatagctatacagtctgtacagtaattatcctctaccaacactgtggcgtctccttaatcttggtagtgcctgcctttgaaacagggtgtaggggatattagttttccatttttctattttgttatataattttaagccaccagggcctaaattaaagtataatcatttgtatccatgtggaataaaattgtgacaatttcctacgcacacagtattttttcatagaaacatttccctcccatttgccttgcctcagaaataaatttaaaagacgtttgtaaccactgtgttttatctactgtgtgttgtggtggcctgttggaggcaaatagatcagattttttttgtacctacgtaagagtacttgaagttttatttaaaataaaatgttgtggaaaaggt

SEQ ID NO: 371192 - DNA, 652 bp, Homo sapiens
tttcaaaacagtatatacatgtcaattttttcacgttttgaaatacaatttaactacacaagtgatgcagcaacatatatatataaatgtacttgtaactctacagtgaaaaaattgacatgtatatactgttcattcttgtttatattaagtcttgttttaaatatgtattatgtgtatatattgtttgcagacattattgttcatgccttagaggattgtagcattttattttcgtctgaaggtaatgatagctatacagtctgtacagtaattatcctctaccaacactgtggcgtctccttaatcttggtagtgcctgcctttgaaacagggtgtaggggatattagttttccatttttctattttgttatataattttaagccaccagggcctaaattaaagtataatcatttgtatccatgtggaataaaattgtgacaatttcctacgcacacagtattttttcatagaaacatttccctcccatttgccttgcctcagaaataaatttaaaagacgtttgtaaccactgtgttttatctactgtgtgttgtggtggcctgttggaggcaaatagatcagattttttttgtacctacgtaagagtacttgaagttttatttaaaataaaatgttgtggaaaaggt

SEQ ID NO: 371193 - DNA, 896 bp, Homo sapiens
agaagaatcatctcctgcttcaatctgctgctggataggaactaatcagagagagagaagcggaagacggagaaggagggagtcgaaggctttcccgatcacaaatctcacctccactacaactctctttatacttttcttgcagaaataataatagaaataaggaggtggtggggtttccaaaaatcttaaccttcaaccatctggggaaaaggcaaaaatcccatctaccgcaactctcagttcgagagtaaaggtgagtttaaaatcctcgggcgtgaggggtgcgggtgaggatgtaaattcccagtgttacaaagccggtggaaacagcagcggagaaactgcgctcgggcaagcgggggactccggagttgctgcgtggaggcgctcgccccgccgccctctcgccctccgccgctgtttatcctcgccggtcggtgcggctctttgttgtggtggccggaaggctggggtggttctcggggtcccgagtggagtttgggggaggaggacacggagatgtgccgtcctgggtgggaggtggggggtgcggcctcaggagaacgtaaactttattcctagaagccggtgcgggacttcgctggagtagggccgtgggttgtgctcccggccgggcaggcgctgccgccgcgagtccgccgcctttgtgccggccgccctggcttcgcgtctccttcctcttccccttcggcttccagcgctcaggtcgccgccaacagttttgcttctgggaaggtctatgtcagcacgcagaaggtttgaggagcattgcttctcatacagtaaggtctgtgccttggtctcatgttttagcagttcttccccgggaacgaccgccagctcccaactcctctgcttccctcttttaatct

SEQ ID NO: 371194 - DNA, 7596 bp, Homo sapiens
  misc_feature (4822)..(4822): n is a, c, g, or t
tgagtttactgaagatgagcgggggtgggggtggggcaggtgggattgggaaaagatctggatacctgggaaggtctatgtcagcacgcagaaggtttgaggagcattgcttctcatacagtaaggtttcccaacagtgatgtcacaagattgaccacattgatcacaatatggagtctggagaacggttaccatcctcagcagcctcctctactacaccaacttcatcttcgacaccttctgtggcttcagtagtttcaaaaggtggcctttccactggagttgcttcacttagctctacaatcaacccatgtgcagaatggtggcgaacaactgatgctcatactcgtacaggagcaaccttctttccaccattactgggaattccaccactatttgctcccccagcccagaatcatgattcttcttcattccattcaaggacttcgggaaaaagtaatcgaaatggtcccgaaaaaggtgtaaatgggtcaataaatggaagtaatacatcatctgtaattggtatcaacacatctgtactatccactactgcttcaagttccatgggacaaactaaaagtacaagctcaggtggaggaaatcgaaaatgtaatcaggaacaaagcaaaaaccagcctttggatgctagagttgacaaaatcaaagataagaaaccaaggaagaaagcaatggaaagttctagcaacagtgatagtgattcaggcacatcatcagacacctcaagtgaaggcattagtagcagtgattcagatgatctagaagaagatgaagaagaagaagatcaaagtattgaagaaagtgaagatgatgattctgattcagagagtgaagcacaacataaaagtaacaaccaggtgctattacatggtatttcagacccaaaagcagatggacagaaagcaactgaaaaagcccaggaaaaaagaatacaccagccattacctcttgcgtctgaatcccagactcactcattccaatcccagcagaagcagcctcaggttttgtcacagcagcttccatttattttccaaagctctcaggcaaaggaggaatctgtgaacaaacacaccagtgtaatacagtctacgggattggtgtccaatgtgaaacctttatctttggtaaatcaagccaaaaaggaaacttacatgaaactcatagttccttctcctgatgttcttaaagcagggaataaaaatacctctgaagaatctagtttattgaccagtgaattgagatccaaacgggaacaatataaacaggcattcccatcacagttaaagaaacaagagtcatcgaagagcctgaagaaggttattgcagctttgtcaaatccaaaagcaacctctagttcaccagcacatccaaaacaaacattagaaaacaaccacccaaatccattcttgacaaatgcacttttaggtaatcaccaaccaaatggagttattcaaagtgtcattcaagaagctcctctagcacttactaccaaaactaaaatgcagagcaagattaatgaaaacattgctgctgcaagtagcacccctttttcctcacctgtaaatctgagtacaagtgggagaagaacccctggcaatcagacacctgtaatgccctctgcctctcccatcctgcatagtcaagggaaggaaaaagcagttagcaataatgtaaacccagtaaaaacacagcatcactcccatcctgcaaaatctttagtggaacaattcagaggaacagattcagacattcccagtagtaaagattctgaagattcaaatgaggatgaagaggaagatgatgaagaagaagatgaggaagatgatgaagatgatgaatctgatgacagccaatcagaatcagatagtaattcagaatcagatacagaaggatcagaagaagaagatgatgatgataaagaccaagatgaatcagatagtgatactgaaggagagaaaacttcaatgaaactgaataaaacaacttcctctgtcaaaagcccttccatgagtctcacaggtcactcaacacctcgtaacctccacatagcaaaagccccaggctctgctcctgctgccttatgttctgaatcccagtcacctgcttttcttggtacatcttcttccacacttacttcaagcccacactctggcacttccaaaagaagaagagtaacagatgaacgtgaactgcgtattccattggaatatggctggcagagagagacaagaataagaaactttggagggcgccttcaaggagaagtagcatattatgctccatgtggaaagaaacttaggcagtaccctgaagtaataaagggaatgcagtggtgtcttttgaaagaagaggatgtcattcctcgtatcagggcaatggaaggtcgtagaggaagaccaccaaatccagatagacaacgagcaagagaggaatccaggatgagacgtcggaaaggtcgacctccaaatgttggcaatgctgaattcctagataacgcagatgcaaagttgctaagaaaactgcaagctcaagaaatagccaggcaagcagcacaaataaagcttttgagaaaacttcaaaagcaggaacaggctcgggttgctaaagaagccaaaaaacaacaagcaataatggctgctgaggagaagcggaagcaaaaagaacagataaagattatgaaacagcaggaaaaaattaagagaatacagcaaatcagaatggaaaaagaacttcgagctcagcaaattctagaggctaaaaagaaaaagaaggaagaagcggcaaatgccaaattattggaggccgagaaacgaataaaggaaaaagaaatgagaagacaacaagctgttcttctgaaacatcaggaacgagagcgaaggcgacaacacatgatgcttatgaaagctatggaagctcgtaaaaaagcagaagaaaaagagcggttgaaacaagaaaaacgtgatgagaaaagattaaataaagagcgtaaactagagcagcgaagattagaattagaaatggcaaaggaactaaagaagcctaatgaagacatgtgcttagcagaccaaaagcctttgccagagttgcctcgtattccaggacttgttctctctggaagtacattttcagactgtctcatggtggtgcagttcttacgaaactttggtaaagttttgggctttgatgtgaatattgatgttccaaacctgagtgttcttcaagagggattgctaaatataggggacagcatgggtgaagtacaagacttgcttgtgaggctcctctcagctgctgtatgtgatccaggtctaataacaggatacaaggctaaaacagctcttggagaacatttgctgaatgttggtgtgaatcgagacaatgtttccgagattttacagatatttatggaagcccactgtggacaaactgagcttactgaaagtctgaagaccaaagcttttcaggctcacactccagcacagaaagcttcagtcctggctttcctgatcaatgaactggcatgcagcaagagtgtggtcagtgaaatcgacaagaacattgattatatgtcaaacttgaggagagataaatgggtggtagaaggtaaactccgcaagctcagaatcattcatgctaagaaaacaggcaaaagagacacttcaggtggcattgatctgggagaagagcagcatcccttgggcacacccactccaggacgcaagcgaagaaggaagggaggagacagtgattatgacgatgatgatgacgatgacagtgatgaccaaggggatgaagatgatgaggatgaagaagataaagaagacaaaaaaggaaaaaagactgatatctgtgaagatgaggatgaaggtgaccaagcagcaagtgttgaagagctggaaaaacagattgaaaaactgagtaaacaacagagtcagtacagaaggaagctctttgatgcgtctcactcattgcgttcagtgatgtttggccaagatcgttacagacgccggtactggattcttccccaatgtggggggatttttgtagaaggcatggagagtggtgaaggactagaagaaattgcaaaagaaagagaaaaactgaaaaaggcagaaagtgtccagatcaaagaagaaatgtttgagacttctggggacagtttaaattgttcaaatacagatcactgtgaacaaaaggaagatcttaaagaaaaagataacacaaatctattccttcagaaacctggctctttttccaaattaagcaagcttttggaagtagctaagatgcctcctgagtcagaggttatgacccccaaaccaaatgctggtgcaaatgggtgcacgttgtcttatcagaacagtggaaaacattcactgggcagcgttcagtcaacagcaacgcaaagcaatgtggaaaaggcagactctaataatctgtttaatactggttcaagtggtccagggaagttctacagtcctctccccaatgaccagttactaaaaacgctgactgaaaagaatagacaatggtttagtcttttgccacgaacaccctgtgatgacacttcacttactcatgccgatatgtcaactgcttctttggtgactcctcagtctcagccaccatctaagtcaccttcacctaccccagctcctcttggatcttctgctcagaatcctgttggcttaaatccatttgctttatcacctcttcaggtgaaaggtggagtatctatgatgggacttcagttttgtggatggcccactggtgtggttacttctaatattccatttacatnatctgtacctagtctaggatcggggttagggttatcagaaggaaatggtaattcattcttgacttccaatgttgcttcaagtaaaagtgaatctccagtaccacagaatgaaaaggccacttcagctcaacctgcagctgttgaagtagcaaaaccagtagattttcctagtccaaaacctattccagaagaaatgcagtttggttggtggagaattattgacccagaggacctaaaagctttgctcaaagtgctgcatctcagaggaataagagaaaaggcattacaaaaacaaattcagaaacatttggattatattactcaagcctgcctcaagaataaggatgttgctattattgaactgaatgaaaatgaagaaaaccaagtaactcgagatattgtggagaactggtcagtagaagaacaagcaatggaaatggatttgagtgtccttcaacaggtagaagatctagaaaggagagttgcatcagcaagtttgcaagtgaagggttggatgtgtccagagcctgcatcagaaagggaggacttggtatattttgaacataaatcatttactaaattgtgcaaggagcatgatggagaatttactggcgaagacgaaagcagtgcacatgcactagaacggaagagtgacaaccccctagatatagctgtaaccaggctggctgatttggagcggaacattgaaagaagaattgaagaggatattgctccagggctcagggtatggagaagggcattatcagaagctcgcagtgctgcacaggtagctctgtgcattcagcaattacagaaatcaatagcatgggaaaaatcaattatgaaagtttactgccaaatctgtcgaaagggagataatgaagaactgcttcttctttgtgatggctgtgacaaaggctgtcatacctactgccatagacccaagattacaacaatcccagatggagactggttttgtccagcttgcattgctaaggcaagtggtcaaactctaaaaatcaaaaaacttcatgtcaaaggaaaaaagactaatgagtcaaagaaaggcaagaaggtaactttaacaggagatactgaagatgaagactctgcatctacaagtagttcactaaaaagaggaaacaaagacctcaagaaaagaaaaatggaggaaaacacttctattaacttgtcaaaacaagaaagttttacttcagttaagaaacctaaaagagatgactccaaggacctagctctttgcagtatgattctgactgaaatggaaactcatgaggatgcatggccttttctacttcctgtaaacttgaaacttgttcctggttataagaaagttattaagaagcctatggatttttccacaattagagagaaactaagtagtggacagtatccaaaccttgaaacctttgctctagatgtcaggcttgtttttgacaactgtgaaacatttaatgaagatgattctgatataggcagagctggccacaatatgaggaagtattttgaaaaaaagtggacagatactttcaaagtgagctgaagttataataatctctttatttttttccttctaaacaaggacaaatgagaccagcaatgtgaactgtatttacataaacgtgcaaggcacatacataatgactttctttttccttaagtataaaaaaaaagtatcagaagaatgataccatttttaaaggcttcattcctacaacaaccaaggccctcggttattggtttgtgtgatttatcagctaatttaggtagaacagggaagcacacccaaagaattttcaaaggaaagggtgttatagtgcaatagcaattaaaatatatcaaatcgcactgaatactcaacaccagagctctaatgtgggaaatggttctcctttccctctcaataaatatctatttttcatttttttactttgtagtttattttttagtgaatgtatttaattttatgaattatttatgattaaaccacatccagaatcttcgttttctgtgaaaaggaagaactagaaaattgctttaaatcttgaaaatacaaggaatgttttaaaatataaaacaaagccaagttaaactgtttacactgatgtgctataaaagcaccaaaaagaaactttactgtagagttacaagtacatttatatatatatgttgctgcatcacttgtgtagttaaattgtatttcaaaacagtgaaaaaattgacatgtatatactgttcattcttgtttatattaagtcttgttttaaatatgtattatgtgtatatattgtttgcagacattattgttcatgccttagaggattgtagcattttattttcgtctgaaggtaatgatagctatacagtctgtacagtaattatcctctaccaacactgtggcgtctccttaatcttggtagtgcctgcctttgaaacagggtgtaggggatattagttttccatttttctattttgttatataattttaagccaccagggcctaaattaaagtataatcatttgtatccatgtggaataaaattgtgacaatttcctacgcacacagtattttttcatagaaacatttccctcccatttgccttgcctcagaaataaatttaaaagacgtttgtaaccactgtgttttatctactgtgtgttgtggtggcctgttggaggcaaatagatcagattttttttgtacctacgtaagagtacttgaagttttatttaaaataaaatgttgtggaaaaggt

SEQ ID NO: 371195 - DNA, 7727 bp, Homo sapiens
  misc_feature (4953)..(4953): n is a, c, g, or t
agaagaatcatctcctgcttcaatctgctgctggataggaactaatcagagagagagaagcggaagacggagaaggagggagtcgaaggctttcccgatcacaaatctcacctccactacaactctctttatacttttcttgcagaaataataatagaaataaggaggtggtggggtttccaaaaatcttaaccttcaaccatctggggaaaaggcaaaaatcccatctaccgcaactctcagttcgagagtaaaggtttcccaacagtgatgtcacaagattgaccacattgatcacaatatggagtctggagaacggttaccatcctcagcagcctcctctactacaccaacttcatcttcgacaccttctgtggcttcagtagtttcaaaaggtggcctttccactggagttgcttcacttagctctacaatcaacccatgtgcagaatggtggcgaacaactgatgctcatactcgtacaggagcaaccttctttccaccattactgggaattccaccactatttgctcccccagcccagaatcatgattcttcttcattccattcaaggacttcgggaaaaagtaatcgaaatggtcccgaaaaaggtgtaaatgggtcaataaatggaagtaatacatcatctgtaattggtatcaacacatctgtactatccactactgcttcaagttccatgggacaaactaaaagtacaagctcaggtggaggaaatcgaaaatgtaatcaggaacaaagcaaaaaccagcctttggatgctagagttgacaaaatcaaagataagaaaccaaggaagaaagcaatggaaagttctagcaacagtgatagtgattcaggcacatcatcagacacctcaagtgaaggcattagtagcagtgattcagatgatctagaagaagatgaagaagaagaagatcaaagtattgaagaaagtgaagatgatgattctgattcagagagtgaagcacaacataaaagtaacaaccaggtgctattacatggtatttcagacccaaaagcagatggacagaaagcaactgaaaaagcccaggaaaaaagaatacaccagccattacctcttgcgtctgaatcccagactcactcattccaatcccagcagaagcagcctcaggttttgtcacagcagcttccatttattttccaaagctctcaggcaaaggaggaatctgtgaacaaacacaccagtgtaatacagtctacgggattggtgtccaatgtgaaacctttatctttggtaaatcaagccaaaaaggaaacttacatgaaactcatagttccttctcctgatgttcttaaagcagggaataaaaatacctctgaagaatctagtttattgaccagtgaattgagatccaaacgggaacaatataaacaggcattcccatcacagttaaagaaacaagagtcatcgaagagcctgaagaaggttattgcagctttgtcaaatccaaaagcaacctctagttcaccagcacatccaaaacaaacattagaaaacaaccacccaaatccattcttgacaaatgcacttttaggtaatcaccaaccaaatggagttattcaaagtgtcattcaagaagctcctctagcacttactaccaaaactaaaatgcagagcaagattaatgaaaacattgctgctgcaagtagcacccctttttcctcacctgtaaatctgagtacaagtgggagaagaacccctggcaatcagacacctgtaatgccctctgcctctcccatcctgcatagtcaagggaaggaaaaagcagttagcaataatgtaaacccagtaaaaacacagcatcactcccatcctgcaaaatctttagtggaacaattcagaggaacagattcagacattcccagtagtaaagattctgaagattcaaatgaggatgaagaggaagatgatgaagaagaagatgaggaagatgatgaagatgatgaatctgatgacagccaatcagaatcagatagtaattcagaatcagatacagaaggatcagaagaagaagatgatgatgataaagaccaagatgaatcagatagtgatactgaaggagagaaaacttcaatgaaactgaataaaacaacttcctctgtcaaaagcccttccatgagtctcacaggtcactcaacacctcgtaacctccacatagcaaaagccccaggctctgctcctgctgccttatgttctgaatcccagtcacctgcttttcttggtacatcttcttccacacttacttcaagcccacactctggcacttccaaaagaagaagagtaacagatgaacgtgaactgcgtattccattggaatatggctggcagagagagacaagaataagaaactttggagggcgccttcaaggagaagtagcatattatgctccatgtggaaagaaacttaggcagtaccctgaagtaataaagggaatgcagtggtgtcttttgaaagaagaggatgtcattcctcgtatcagggcaatggaaggtcgtagaggaagaccaccaaatccagatagacaacgagcaagagaggaatccaggatgagacgtcggaaaggtcgacctccaaatgttggcaatgctgaattcctagataacgcagatgcaaagttgctaagaaaactgcaagctcaagaaatagccaggcaagcagcacaaataaagcttttgagaaaacttcaaaagcaggaacaggctcgggttgctaaagaagccaaaaaacaacaagcaataatggctgctgaggagaagcggaagcaaaaagaacagataaagattatgaaacagcaggaaaaaattaagagaatacagcaaatcagaatggaaaaagaacttcgagctcagcaaattctagaggctaaaaagaaaaagaaggaagaagcggcaaatgccaaattattggaggccgagaaacgaataaaggaaaaagaaatgagaagacaacaagctgttcttctgaaacatcaggaacgagagcgaaggcgacaacacatgatgcttatgaaagctatggaagctcgtaaaaaagcagaagaaaaagagcggttgaaacaagaaaaacgtgatgagaaaagattaaataaagagcgtaaactagagcagcgaagattagaattagaaatggcaaaggaactaaagaagcctaatgaagacatgtgcttagcagaccaaaagcctttgccagagttgcctcgtattccaggacttgttctctctggaagtacattttcagactgtctcatggtggtgcagttcttacgaaactttggtaaagttttgggctttgatgtgaatattgatgttccaaacctgagtgttcttcaagagggattgctaaatataggggacagcatgggtgaagtacaagacttgcttgtgaggctcctctcagctgctgtatgtgatccaggtctaataacaggatacaaggctaaaacagctcttggagaacatttgctgaatgttggtgtgaatcgagacaatgtttccgagattttacagatatttatggaagcccactgtggacaaactgagcttactgaaagtctgaagaccaaagcttttcaggctcacactccagcacagaaagcttcagtcctggctttcctgatcaatgaactggcatgcagcaagagtgtggtcagtgaaatcgacaagaacattgattatatgtcaaacttgaggagagataaatgggtggtagaaggtaaactccgcaagctcagaatcattcatgctaagaaaacaggcaaaagagacacttcaggtggcattgatctgggagaagagcagcatcccttgggcacacccactccaggacgcaagcgaagaaggaagggaggagacagtgattatgacgatgatgatgacgatgacagtgatgaccaaggggatgaagatgatgaggatgaagaagataaagaagacaaaaaaggaaaaaagactgatatctgtgaagatgaggatgaaggtgaccaagcagcaagtgttgaagagctggaaaaacagattgaaaaactgagtaaacaacagagtcagtacagaaggaagctctttgatgcgtctcactcattgcgttcagtgatgtttggccaagatcgttacagacgccggtactggattcttccccaatgtggggggatttttgtagaaggcatggagagtggtgaaggactagaagaaattgcaaaagaaagagaaaaactgaaaaaggcagaaagtgtccagatcaaagaagaaatgtttgagacttctggggacagtttaaattgttcaaatacagatcactgtgaacaaaaggaagatcttaaagaaaaagataacacaaatctattccttcagaaacctggctctttttccaaattaagcaagcttttggaagtagctaagatgcctcctgagtcagaggttatgacccccaaaccaaatgctggtgcaaatgggtgcacgttgtcttatcagaacagtggaaaacattcactgggcagcgttcagtcaacagcaacgcaaagcaatgtggaaaaggcagactctaataatctgtttaatactggttcaagtggtccagggaagttctacagtcctctccccaatgaccagttactaaaaacgctgactgaaaagaatagacaatggtttagtcttttgccacgaacaccctgtgatgacacttcacttactcatgccgatatgtcaactgcttctttggtgactcctcagtctcagccaccatctaagtcaccttcacctaccccagctcctcttggatcttctgctcagaatcctgttggcttaaatccatttgctttatcacctcttcaggtgaaaggtggagtatctatgatgggacttcagttttgtggatggcccactggtgtggttacttctaatattccatttacatnatctgtacctagtctaggatcggggttagggttatcagaaggaaatggtaattcattcttgacttccaatgttgcttcaagtaaaagtgaatctccagtaccacagaatgaaaaggccacttcagctcaacctgcagctgttgaagtagcaaaaccagtagattttcctagtccaaaacctattccagaagaaatgcagtttggttggtggagaattattgacccagaggacctaaaagctttgctcaaagtgctgcatctcagaggaataagagaaaaggcattacaaaaacaaattcagaaacatttggattatattactcaagcctgcctcaagaataaggatgttgctattattgaactgaatgaaaatgaagaaaaccaagtaactcgagatattgtggagaactggtcagtagaagaacaagcaatggaaatggatttgagtgtccttcaacaggtagaagatctagaaaggagagttgcatcagcaagtttgcaagtgaagggttggatgtgtccagagcctgcatcagaaagggaggacttggtatattttgaacataaatcatttactaaattgtgcaaggagcatgatggagaatttactggcgaagacgaaagcagtgcacatgcactagaacggaagagtgacaaccccctagatatagctgtaaccaggctggctgatttggagcggaacattgaaagaagaattgaagaggatattgctccagggctcagggtatggagaagggcattatcagaagctcgcagtgctgcacaggtagctctgtgcattcagcaattacagaaatcaatagcatgggaaaaatcaattatgaaagtttactgccaaatctgtcgaaagggagataatgaagaactgcttcttctttgtgatggctgtgacaaaggctgtcatacctactgccatagacccaagattacaacaatcccagatggagactggttttgtccagcttgcattgctaaggcaagtggtcaaactctaaaaatcaaaaaacttcatgtcaaaggaaaaaagactaatgagtcaaagaaaggcaagaaggtaactttaacaggagatactgaagatgaagactctgcatctacaagtagttcactaaaaagaggaaacaaagacctcaagaaaagaaaaatggaggaaaacacttctattaacttgtcaaaacaagaaagttttacttcagttaagaaacctaaaagagatgactccaaggacctagctctttgcagtatgattctgactgaaatggaaactcatgaggatgcatggccttttctacttcctgtaaacttgaaacttgttcctggttataagaaagttattaagaagcctatggatttttccacaattagagagaaactaagtagtggacagtatccaaaccttgaaacctttgctctagatgtcaggcttgtttttgacaactgtgaaacatttaatgaagatgattctgatataggcagagctggccacaatatgaggaagtattttgaaaaaaagtggacagatactttcaaagtgagctgaagttataataatctctttatttttttccttctaaacaaggacaaatgagaccagcaatgtgaactgtatttacataaacgtgcaaggcacatacataatgactttctttttccttaagtataaaaaaaaagtatcagaagaatgataccatttttaaaggcttcattcctacaacaaccaaggccctcggttattggtttgtgtgatttatcagctaatttaggtagaacagggaagcacacccaaagaattttcaaaggaaagggtgttatagtgcaatagcaattaaaatatatcaaatcgcactgaatactcaacaccagagctctaatgtgggaaatggttctcctttccctctcaataaatatctatttttcatttttttactttgtagtttattttttagtgaatgtatttaattttatgaattatttatgattaaaccacatccagaatcttcgttttctgtgaaaaggaagaactagaaaattgctttaaatcttgaaaatacaaggaatgttttaaaatataaaacaaagccaagttaaactgtttacactgatgtgctataaaagcaccaaaaagaaactttactgtagagttacaagtacatttatatatatatgttgctgcatcacttgtgtagttaaattgtatttcaaaacagtgaaaaaattgacatgtatatactgttcattcttgtttatattaagtcttgttttaaatatgtattatgtgtatatattgtttgcagacattattgttcatgccttagaggattgtagcattttattttcgtctgaaggtaatgatagctatacagtctgtacagtaattatcctctaccaacactgtggcgtctccttaatcttggtagtgcctgcctttgaaacagggtgtaggggatattagttttccatttttctattttgttatataattttaagccaccagggcctaaattaaagtataatcatttgtatccatgtggaataaaattgtgacaatttcctacgcacacagtattttttcatagaaacatttccctcccatttgccttgcctcagaaataaatttaaaagacgtttgtaaccactgtgttttatctactgtgtgttgtggtggcctgttggaggcaaatagatcagattttttttgtacctacgtaagagtacttgaagttttatttaaaataaaatgttgtggaaaaggt

SEQ ID NO: 371196 - DNA, 5706 bp, Homo sapiens
  misc_feature (2932)..(2932): n is a, c, g, or t
gcttcttttacttcccagaatcagatagtaattcagaatcagatacagaaggatcagaagaagaagatgatgatgataaagaccaagatgaatcagatagtgatactgaaggagagaaaacttcaatgaaactgaataaaacaacttcctctgtcaaaagcccttccatgagtctcacaggcacttccaaaagaagaagagtaacagatgaacgtgaactgcgtattccattggaatatggctggcagagagagacaagaataagaaactttggagggcgccttcaaggagaagtagcatattatgctccatgtggaaagaaacttaggcagtaccctgaagtaataaagtatctcagcagaaatggaataatggatatctcaagggacaatttcagcttcagtgcaaaaataagagtgggtgacttctatgaagccagagatggaccgcagggaatgcagtggtgtcttttgaaagaagaggatgtcattcctcgtatcagggcaatggaaggtcgtagaggaagaccaccaaatccagatagacaacgagcaagagaggaatccaggatgagacgtcggaaaggtcgacctccaaatgttggcaatgctgaattcctagataacgcagatgcaaagttgctaagaaaactgcaagctcaagaaatagccaggcaagcagcacaaataaagcttttgagaaaacttcaaaagcaggaacaggctcgggttgctaaagaagccaaaaaacaacaagcaataatggctgctgaggagaagcggaagcaaaaagaacagataaagattatgaaacagcaggaaaaaattaagagaatacagcaaatcagaatggaaaaagaacttcgagctcagcaaattctagaggctaaaaagaaaaagaaggaagaagcggcaaatgccaaattattggaggccgagaaacgaataaaggaaaaagaaatgagaagacaacaagctgttcttctgaaacatcaggaacgagagcgaaggcgacaacacatgatgcttatgaaagctatggaagctcgtaaaaaagcagaagaaaaagagcggttgaaacaagaaaaacgtgatgagaaaagattaaataaagagcgtaaactagagcagcgaagattagaattagaaatggcaaaggaactaaagaagcctaatgaagacatgtgcttagcagaccaaaagcctttgccagagttgcctcgtattccaggacttgttctctctggaagtacattttcagactgtctcatggtggtgcagttcttacgaaactttggtaaagttttgggctttgatgtgaatattgatgttccaaacctgagtgttcttcaagagggattgctaaatataggggacagcatgggtgaagtacaagacttgcttgtgaggctcctctcagctgctgtatgtgatccaggtctaataacaggatacaaggctaaaacagctcttggagaacatttgctgaatgttggtgtgaatcgagacaatgtttccgagattttacagatatttatggaagcccactgtggacaaactgagcttactgaaagtctgaagaccaaagcttttcaggctcacactccagcacagaaagcttcagtcctggctttcctgatcaatgaactggcatgcagcaagagtgtggtcagtgaaatcgacaagaacattgattatatgtcaaacttgaggagagataaatgggtggtagaaggtaaactccgcaagctcagaatcattcatgctaagaaaacaggcaaaagagacacttcaggtggcattgatctgggagaagagcagcatcccttgggcacacccactccaggacgcaagcgaagaaggaagggaggagacagtgattatgacgatgatgatgacgatgacagtgatgaccaaggggatgaagatgatgaggatgaagaagataaagaagacaaaaaaggaaaaaagactgatatctgtgaagatgaggatgaaggtgaccaagcagcaagtgttgaagagctggaaaaacagattgaaaaactgagtaaacaacagagtcagtacagaaggaagctctttgatgcgtctcactcattgcgttcagtgatgtttggccaagatcgttacagacgccggtactggattcttccccaatgtggggggatttttgtagaaggcatggagagtggtgaaggactagaagaaattgcaaaagaaagagaaaaactgaaaaaggcagaaagtgtccagatcaaagaagaaatgtttgagacttctggggacagtttaaattgttcaaatacagatcactgtgaacaaaaggaagatcttaaagaaaaagataacacaaatctattccttcagaaacctggctctttttccaaattaagcaagcttttggaagtagctaagatgcctcctgagtcagaggttatgacccccaaaccaaatgctggtgcaaatgggtgcacgttgtcttatcagaacagtggaaaacattcactgggcagcgttcagtcaacagcaacgcaaagcaatgtggaaaaggcagactctaataatctgtttaatactggttcaagtggtccagggaagttctacagtcctctccccaatgaccagttactaaaaacgctgactgaaaagaatagacaatggtttagtcttttgccacgaacaccctgtgatgacacttcacttactcatgccgatatgtcaactgcttctttggtgactcctcagtctcagccaccatctaagtcaccttcacctaccccagctcctcttggatcttctgctcagaatcctgttggcttaaatccatttgctttatcacctcttcaggtgaaaggtggagtatctatgatgggacttcagttttgtggatggcccactggtgtggttacttctaatattccatttacatnatctgtacctagtctaggatcggggttagggttatcagaaggaaatggtaattcattcttgacttccaatgttgcttcaagtaaaagtgaatctccagtaccacagaatgaaaaggccacttcagctcaacctgcagctgttgaagtagcaaaaccagtagattttcctagtccaaaacctattccagaagaaatgcagtttggttggtggagaattattgacccagaggacctaaaagctttgctcaaagtgctgcatctcagaggaataagagaaaaggcattacaaaaacaaattcagaaacatttggattatattactcaagcctgcctcaagaataaggatgttgctattattgaactgaatgaaaatgaagaaaaccaagtaactcgagatattgtggagaactggtcagtagaagaacaagcaatggaaatggatttgagtgtccttcaacaggtagaagatctagaaaggagagttgcatcagcaagtttgcaagtgaagggttggatgtgtccagagcctgcatcagaaagggaggacttggtatattttgaacataaatcatttactaaattgtgcaaggagcatgatggagaatttactggcgaagacgaaagcagtgcacatgcactagaacggaagagtgacaaccccctagatatagctgtaaccaggctggctgatttggagcggaacattgaaagaagaattgaagaggatattgctccagggctcagggtatggagaagggcattatcagaagctcgcagtgctgcacaggtagctctgtgcattcagcaattacagaaatcaatagcatgggaaaaatcaattatgaaagtttactgccaaatctgtcgaaagggagataatgaagaactgcttcttctttgtgatggctgtgacaaaggctgtcatacctactgccatagacccaagattacaacaatcccagatggagactggttttgtccagcttgcattgctaaggcaagtggtcaaactctaaaaatcaaaaaacttcatgtcaaaggaaaaaagactaatgagtcaaagaaaggcaagaaggtaactttaacaggagatactgaagatgaagactctgcatctacaagtagttcactaaaaagaggaaacaaagacctcaagaaaagaaaaatggaggaaaacacttctattaacttgtcaaaacaagaaagttttacttcagttaagaaacctaaaagagatgactccaaggacctagctctttgcagtatgattctgactgaaatggaaactcatgaggatgcatggccttttctacttcctgtaaacttgaaacttgttcctggttataagaaagttattaagaagcctatggatttttccacaattagagagaaactaagtagtggacagtatccaaaccttgaaacctttgctctagatgtcaggcttgtttttgacaactgtgaaacatttaatgaagatgattctgatataggcagagctggccacaatatgaggaagtattttgaaaaaaagtggacagatactttcaaagtgagctgaagttataataatctctttatttttttccttctaaacaaggacaaatgagaccagcaatgtgaactgtatttacataaacgtgcaaggcacatacataatgactttctttttccttaagtataaaaaaaaagtatcagaagaatgataccatttttaaaggcttcattcctacaacaaccaaggccctcggttattggtttgtgtgatttatcagctaatttaggtagaacagggaagcacacccaaagaattttcaaaggaaagggtgttatagtgcaatagcaattaaaatatatcaaatcgcactgaatactcaacaccagagctctaatgtgggaaatggttctcctttccctctcaataaatatctatttttcatttttttactttgtagtttattttttagtgaatgtatttaattttatgaattatttatgattaaaccacatccagaatcttcgttttctgtgaaaaggaagaactagaaaattgctttaaatcttgaaaatacaaggaatgttttaaaatataaaacaaagccaagttaaactgtttacactgatgtgctataaaagcaccaaaaagaaactttactgtagagttacaagtacatttatatatatatgttgctgcatcacttgtgtagttaaattgtatttcaaaacagtgaaaaaattgacatgtatatactgttcattcttgtttatattaagtcttgttttaaatatgtattatgtgtatatattgtttgcagacattattgttcatgccttagaggattgtagcattttattttcgtctgaaggtaatgatagctatacagtctgtacagtaattatcctctaccaacactgtggcgtctccttaatcttggtagtgcctgcctttgaaacagggtgtaggggatattagttttccatttttctattttgttatataattttaagccaccagggcctaaattaaagtataatcatttgtatccatgtggaataaaattgtgacaatttcctacgcacacagtattttttcatagaaacatttccctcccatttgccttgcctcagaaataaatttaaaagacgtttgtaaccactgtgttttatctactgtgtgttgtggtggcctgttggaggcaaatagatcagattttttttgtacctacgtaagagtacttgaagttttatttaaaataaaatgttgtggaaaaggt

SEQ ID NO: 371197 - DNA, 7824 bp, Homo sapiens
  misc_feature (4977)..(4977): n is a, c, g, or t
agaagaatcatctcctgcttcaatctgctgctggataggaactaatcagagagagagaagcggaagacggagaaggagggagtcgaaggctttcccgatcacaaatctcacctccactacaactctctttatacttttcttgcagaaataataatagaaataaggaggtggtggggtttccaaaaatcttaaccttcaaccatctggggaaaaggcaaaaatcccatctaccgcaactctcagttcgagagtaaaggtttcccaacagtgatgtcacaagattgaccacattgatcacaatatggagtctggagaacggttaccatcctcagcagcctcctctactacaccaacttcatcttcgacaccttctgtggcttcagtagtttcaaaaggtggcctttccactggagttgcttcacttagctctacaatcaacccatgtggacatttattcagaacagctggggatcaaccgtttaacctgtccacagtgtcgagtgccttcccaatggtcagccacccagtctttggtctacattcagccagctcagggcattcagaatttggtggtttggggacacttggtacacccacagccttagccgcacatccccaactagcatcttttccagcagaatggtggcgaacaactgatgctcatactcgtacaggagcaaccttctttccaccattactgggaattccaccactatttgctcccccagcccagaatcatgattcttcttcattccattcaaggacttcgggaaaaagtaatcgaaatggtcccgaaaaaggtgtaaatgggtcaataaatggaagtaatacatcatctgtaattggtatcaacacatctgtactatccactactgcttcaagttccatgggacaaactaaaagtacaagctcaggtggaggaaatcgaaaatgtaatcaggaacaaagcaaaaaccagcctttggatgctagagttgacaaaatcaaagataagaaaccaaggaagaaagcaatggaaagttctagcaacagtgatagtgattcaggcacatcatcagacacctcaagtgaaggcattagtagcagtgattcagatgatctagaagaagatgaagaagaagaagatcaaagtattgaagaaagtgaagatgatgattctgattcagagagtgaagcacaacataaaagtaacaaccaggtgctattacatggtatttcagacccaaaagcagatggacagaaagcaactgaaaaagcccaggaaaaaagaatacaccagccattacctcttgcgtctgaatcccagactcactcattccaatcccagcagaagcagcctcaggttttgtcacagcagcttccatttattttccaaagctctcaggcaaaggaggaatctgtgaacaaacacaccagtgtaatacagtctacgggattggtgtccaatgtgaaacctttatctttggtaaatcaagccaaaaaggaaacttacatgaaactcatagttccttctcctgatgttcttaaagcagggaataaaaatacctctgaagaatctagtttattgaccagtgaattgagatccaaacgggaacaatataaacaggcattcccatcacagttaaagaaacaagagtcatcgaagagcctgaagaaggttattgcagctttgtcaaatccaaaagcaacctctagttcaccagcacatccaaaacaaacattagaaaacaaccacccaaatccattcttgacaaatgcacttttaggtaatcaccaaccaaatggagttattcaaagtgtcattcaagaagctcctctagcacttactaccaaaactaaaatgcagagcaagattaatgaaaacattgctgctgcaagtagcacccctttttcctcacctgtaaatctgagtacaagtgggagaagaacccctggcaatcagacacctgtaatgccctctgcctctcccatcctgcatagtcaagggaaggaaaaagcagttagcaataatgtaaacccagtaaaaacacagcatcactcccatcctgcaaaatctttagtggaacaattcagaggaacagattcagacattcccagtagtaaagattctgaagattcaaatgaggatgaagaggaagatgatgaagaagaagatgaggaagatgatgaagatgatgaatctgatgacagccaatcaggcacttccaaaagaagaagagtaacagatgaacgtgaactgcgtattccattggaatatggctggcagagagagacaagaataagaaactttggagggcgccttcaaggagaagtagcatattatgctccatgtggaaagaaacttaggcagtaccctgaagtaataaagtatctcagcagaaatggaataatggatatctcaagggacaatttcagcttcagtgcaaaaataagagtgggtgacttctatgaagccagagatggaccgcagggaatgcagtggtgtcttttgaaagaagaggatgtcattcctcgtatcagggcaatggaaggtcgtagaggaagaccaccaaatccagatagacaacgagcaagagaggaatccaggatgagacgtcggaaaggtcgacctccaaatgttggcaatgctgaattcctagataacgcagatgcaaagttgctaagaaaactgcaagctcaagaaatagccaggcaagcagcacaaataaagcttttgagaaaacttcaaaagcaggaacaggctcgggttgctaaagaagccaaaaaacaacaagcaataatggctgctgaggagaagcggaagcaaaaagaacagataaagattatgaaacagcaggaaaaaattaagagaatacagcaaatcagaatggaaaaagaacttcgagctcagcaaattctagaggctaaaaagaaaaagaaggaagaagcggcaaatgccaaattattggaggccgagaaacgaataaaggaaaaagaaatgagaagacaacaagctgttcttctgaaacatcaggagttggagaggcatagactagatatggaacgagagcgaaggcgacaacacatgatgcttatgaaagctatggaagctcgtaaaaaagcagaagaaaaagagcggttgaaacaagaaaaacgtgatgagaaaagattaaataaagagcgtaaactagagcagcgaagattagaattagaaatggcaaaggaactaaagaagcctaatgaagacatgtgcttagcagaccaaaagcctttgccagagttgcctcgtattccaggacttgttctctctggaagtacattttcagactgtctcatggtggtgcagttcttacgaaactttggtaaagttttgggctttgatgtgaatattgatgttccaaacctgagtgttcttcaagagggattgctaaatataggggacagcatgggtgaagtacaagacttgcttgtgaggctcctctcagctgctgtatgtgatccaggtctaataacaggatacaaggctaaaacagctcttggagaacatttgctgaatgttggtgtgaatcgagacaatgtttccgagattttacagatatttatggaagcccactgtggacaaactgagcttactgaaagtctgaagaccaaagcttttcaggctcacactccagcacagaaagcttcagtcctggctttcctgatcaatgaactggcatgcagcaagagtgtggtcagtgaaatcgacaagaacattgattatatgtcaaacttgaggagagataaatgggtggtagaaggtaaactccgcaagctcagaatcattcatgctaagaaaacaggcaaaagagacacttcaggtggcattgatctgggagaagagcagcatcccttgggcacacccactccaggacgcaagcgaagaaggaagggaggagacagtgattatgacgatgatgatgacgatgacagtgatgaccaaggggatgaagatgatgaggatgaagaagataaagaagacaaaaaaggaaaaaagactgatatctgtgaagatgaggatgaaggtgaccaagcagcaagtgttgaagagctggaaaaacagattgaaaaactgagtaaacaacagagtcagtacagaaggaagctctttgatgcgtctcactcattgcgttcagtgatgtttggccaagatcgttacagacgccggtactggattcttccccaatgtggggggatttttgtagaaggcatggagagtggtgaaggactagaagaaattgcaaaagaaagagaaaaactgaaaaaggcagaaagtgtccagatcaaagaagaaatgtttgagacttctggggacagtttaaattgttcaaatacagatcactgtgaacaaaaggaagatcttaaagaaaaagataacacaaatctattccttcagaaacctggctctttttccaaattaagcaagcttttggaagtagctaagatgcctcctgagtcagaggttatgacccccaaaccaaatgctggtgcaaatgggtgcacgttgtcttatcagaacagtggaaaacattcactgggcagcgttcagtcaacagcaacgcaaagcaatgtggaaaaggcagactctaataatctgtttaatactggttcaagtggtccagggaagttctacagtcctctccccaatgaccagttactaaaaacgctgactgaaaagaatagacaatggtttagtcttttgccacgaacaccctgtgatgacacttcacttactcatgccgatatgtcaactgcttctttggtgactcctcagtctcagccaccatctaagtcaccttcacctaccccagctcctcttggatcttctgctcagaatcctgttggcttaaatccatttgctttatcacctcttcaggtgaaaggtggagtatctatgatgggacttcagttttgtggatggcccactggtgtggttacttctaatattccatttacatnatctgtacctagtctaggatcggggttagggttatcagaaggaaatggtaattcattcttgacttccaatgttgcttcaagtaaaagtgaatctccagtaccacagaatgaaaaggccacttcagctcaacctgcagctgttgaagtagcaaaaccagtagattttcctagtccaaaacctattccagaagaaatgcagtttggttggtggagaattattgacccagaggacctaaaagctttgctcaaagtgctgcatctcagaggaataagagaaaaggcattacaaaaacaaattcagaaacatttggattatattactcaagcctgcctcaagaataaggatgttgctattattgaactgaatgaaaatgaagaaaaccaagtaactcgagatattgtggagaactggtcagtagaagaacaagcaatggaaatggatttgagtgtccttcaacaggtagaagatctagaaaggagagttgcatcagcaagtttgcaagtgaagggttggatgtgtccagagcctgcatcagaaagggaggacttggtatattttgaacataaatcatttactaaattgtgcaaggagcatgatggagaatttactggcgaagacgaaagcagtgcacatgcactagaacggaagagtgacaaccccctagatatagctgtaaccaggctggctgatttggagcggaacattgaaagaagaattgaagaggatattgctccagggctcagggtatggagaagggcattatcagaagctcgcagtgctgcacaggtagctctgtgcattcagcaattacagaaatcaatagcatgggaaaaatcaattatgaaagtttactgccaaatctgtcgaaagggagataatgaagaactgcttcttctttgtgatggctgtgacaaaggctgtcatacctactgccatagacccaagattacaacaatcccagatggagactggttttgtccagcttgcattgctaaggcaagtggtcaaactctaaaaatcaaaaaacttcatgtcaaaggaaaaaagactaatgagtcaaagaaaggcaagaaggtaactttaacaggagatactgaagatgaagactctgcatctacaagtagttcactaaaaagaggaaacaaagacctcaagaaaagaaaaatggaggaaaacacttctattaacttgtcaaaacaagaaagttttacttcagttaagaaacctaaaagagatgactccaaggacctagctctttgcagtatgattctgactgaaatggaaactcatgaggatgcatggccttttctacttcctgtaaacttgaaacttgttcctggttataagaaagttattaagaagcctatggatttttccacaattagagagaaactaagtagtggacagtatccaaaccttgaaacctttgctctagatgtcaggcttgtttttgacaactgtgaaacatttaatgaagatgattctgatataggcagagctggccacaatatgaggaagtattttgaaaaaaagtggacagatactttcaaagtgagctgaagttataataatctctttatttttttccttctaaacaaggacaaatgagaccagcaatgtgaactgtatttacataaacgtgcaaggcacatacataatgactttctttttccttaagtataaaaaaaaagtatcagaagaatgataccatttttaaaggcttcattcctacaacaaccaaggccctcggttattggtttgtgtgatttatcagctaatttaggtagaacagggaagcacacccaaagaattttcaaaggaaagggtgttatagtgcaatagcaattaaaatatatcaaatcgcactgaatactcaacaccagagctctaatgtgggaaatggttctcctttccctctcaataaatatctatttttcatttttttactttgtagtttattttttagtgaatgtatttaattttatgaattatttatgattaaaccacatccagaatcttcgttttctgtgaaaaggaagaactagaaaattgctttaaatcttgaaaatacaaggaatgttttaaaatataaaacaaagccaagttaaactgtttacactgatgtgctataaaagcaccaaaaagaaactttactgtagagttacaagtacatttatatatatatgttgctgcatcacttgtgtagttaaattgtatttcaaaacagtgaaaaaattgacatgtatatactgttcattcttgtttatattaagtcttgttttaaatatgtattatgtgtatatattgtttgcagacattattgttcatgccttagaggattgtagcattttattttcgtctgaaggtaatgatagctatacagtctgtacagtaattatcctctaccaacactgtggcgtctccttaatcttggtagtgcctgcctttgaaacagggtgtaggggatattagttttccatttttctattttgttatataattttaagccaccagggcctaaattaaagtataatcatttgtatccatgtggaataaaattgtgacaatttcctacgcacacagtattttttcatagaaacatttccctcccatttgccttgcctcagaaataaatttaaaagacgtttgtaaccactgtgttttatctactgtgtgttgtggtggcctgttggaggcaaatagatcagattttttttgtacctacgtaagagtacttgaagttttatttaaaataaaatgttgtggaaaaggtagcattctttttttaggagtgttatttttcactatgtgtggcacggatacaataaaagacttttacaaactaa

SEQ ID NO: 371198 - DNA, 7848 bp, Homo sapiens
  misc_feature (4950)..(4950): n is a, c, g, or t
agaagaatcatctcctgcttcaatctgctgctggataggaactaatcagagagagagaagcggaagacggagaaggagggagtcgaaggctttcccgatcacaaatctcacctccactacaactctctttatacttttcttgcagaaataataatagaaataaggaggtggtggggtttccaaaaatcttaaccttcaaccatctggggaaaaggcaaaaatcccatctaccgcaactctcagttcgagagtaaaggtttcccaacagtgatgtcacaagattgaccacattgatcacaatatggagtctggagaacggttaccatcctcagcagcctcctctactacaccaacttcatcttcgacaccttctgtggcttcagtagtttcaaaaggtggcctttccactggagttgcttcacttagctctacaatcaacccatgtggacatttattcagaacagctggggatcaaccgtttaacctgtccacagtgtcgagtgccttcccaatggtcagccacccagtctttggtctacattcagccagctcagggcattcagaatttggtggtttggggacacttggtacacccacagccttagccgcacatccccaactagcatcttttccagcagaatggtggcgaacaactgatgctcatactcgtacaggagcaaccttctttccaccattactgggaattccaccactatttgctcccccagcccagaatcatgattcttcttcattccattcaaggacttcgggaaaaagtaatcgaaatggtcccgaaaaaggtgtaaatgggtcaataaatggaagtaatacatcatctgtaattggtatcaacacatctgtactatccactactgcttcaagttccatgggacaaactaaaagtacaagctcaggtggaggaaatcgaaaatgtaatcaggaacaaagcaaaaaccagcctttggatgctagagttgacaaaatcaaagataagaaaccaaggaagaaagcaatggaaagttctagcaacagtgatagtgattcaggcacatcatcagacacctcaagtgaaggcattagtagcagtgattcagatgatctagaagaagatgaagaagaagaagatcaaagtattgaagaaagtgaagatgatgattctgattcagagagtgaagcacaacataaaagtaacaaccaggtgctattacatggtatttcagacccaaaagcagatggacagaaagcaactgaaaaagcccaggaaaaaagaatacaccagccattacctcttgcgtctgaatcccagactcactcattccaatcccagcagaagcagcctcaggttttgtcacagcagcttccatttattttccaaagctctcaggcaaaggaggaatctgtgaacaaacacaccagtgtaatacagtctacgggattggtgtccaatgtgaaacctttatctttggtaaatcaagccaaaaaggaaacttacatgaaactcatagttccttctcctgatgttcttaaagcagggaataaaaatacctctgaagaatctagtttattgaccagtgaattgagatccaaacgggaacaatataaacaggcattcccatcacagttaaagaaacaagagtcatcgaagagcctgaagaaggttattgcagctttgtcaaatccaaaagcaacctctagttcaccagcacatccaaaacaaacattagaaaacaaccacccaaatccattcttgacaaatgcacttttaggtaatcaccaaccaaatggagttattcaaagtgtcattcaagaagctcctctagcacttactaccaaaactaaaatgcagagcaagattaatgaaaacattgctgctgcaagtagcacccctttttcctcacctgtaaatctgagtacaagtgggagaagaacccctggcaatcagacacctgtaatgccctctgcctctcccatcctgcatagtcaagggaaggaaaaagcagttagcaataatgtaaacccagtaaaaacacagcatcactcccatcctgcaaaatctttagtggaacaattcagaggaacagattcagacattcccagtagtaaagattctgaagattcaaatgaggatgaagaggaagatgatgaagaagaagatgaggaagatgatgaagatgatgaatctgatgacagccaatcaggcacttccaaaagaagaagagtaacagatgaacgtgaactgcgtattccattggaatatggctggcagagagagacaagaataagaaactttggagggcgccttcaaggagaagtagcatattatgctccatgtggaaagaaacttaggcagtaccctgaagtaataaagtatctcagcagaaatggaataatggatatctcaagggacaatttcagcttcagtgcaaaaataagagtgggtgacttctatgaagccagagatggaccgcagggaatgcagtggtgtcttttgaaagaagaggatgtcattcctcgtatcagggcaatggaaggtcgtagaggaagaccaccaaatccagatagacaacgagcaagagaggaatccaggatgagacgtcggaaaggtcgacctccaaatgttggcaatgctgaattcctagataacgcagatgcaaagttgctaagaaaactgcaagctcaagaaatagccaggcaagcagcacaaataaagcttttgagaaaacttcaaaagcaggaacaggctcgggttgctaaagaagccaaaaaacaacaagcaataatggctgctgaggagaagcggaagcaaaaagaacagataaagattatgaaacagcaggaaaaaattaagagaatacagcaaatcagaatggaaaaagaacttcgagctcagcaaattctagaggctaaaaagaaaaagaaggaagaagcggcaaatgccaaattattggaggccgagaaacgaataaaggaaaaagaaatgagaagacaacaagctgttcttctgaaacatcaggaacgagagcgaaggcgacaacacatgatgcttatgaaagctatggaagctcgtaaaaaagcagaagaaaaagagcggttgaaacaagaaaaacgtgatgagaaaagattaaataaagagcgtaaactagagcagcgaagattagaattagaaatggcaaaggaactaaagaagcctaatgaagacatgtgcttagcagaccaaaagcctttgccagagttgcctcgtattccaggacttgttctctctggaagtacattttcagactgtctcatggtggtgcagttcttacgaaactttggtaaagttttgggctttgatgtgaatattgatgttccaaacctgagtgttcttcaagagggattgctaaatataggggacagcatgggtgaagtacaagacttgcttgtgaggctcctctcagctgctgtatgtgatccaggtctaataacaggatacaaggctaaaacagctcttggagaacatttgctgaatgttggtgtgaatcgagacaatgtttccgagattttacagatatttatggaagcccactgtggacaaactgagcttactgaaagtctgaagaccaaagcttttcaggctcacactccagcacagaaagcttcagtcctggctttcctgatcaatgaactggcatgcagcaagagtgtggtcagtgaaatcgacaagaacattgattatatgtcaaacttgaggagagataaatgggtggtagaaggtaaactccgcaagctcagaatcattcatgctaagaaaacaggcaaaagagacacttcaggtggcattgatctgggagaagagcagcatcccttgggcacacccactccaggacgcaagcgaagaaggaagggaggagacagtgattatgacgatgatgatgacgatgacagtgatgaccaaggggatgaagatgatgaggatgaagaagataaagaagacaaaaaaggaaaaaagactgatatctgtgaagatgaggatgaaggtgaccaagcagcaagtgttgaagagctggaaaaacagattgaaaaactgagtaaacaacagagtcagtacagaaggaagctctttgatgcgtctcactcattgcgttcagtgatgtttggccaagatcgttacagacgccggtactggattcttccccaatgtggggggatttttgtagaaggcatggagagtggtgaaggactagaagaaattgcaaaagaaagagaaaaactgaaaaaggcagaaagtgtccagatcaaagaagaaatgtttgagacttctggggacagtttaaattgttcaaatacagatcactgtgaacaaaaggaagatcttaaagaaaaagataacacaaatctattccttcagaaacctggctctttttccaaattaagcaagcttttggaagtagctaagatgcctcctgagtcagaggttatgacccccaaaccaaatgctggtgcaaatgggtgcacgttgtcttatcagaacagtggaaaacattcactgggcagcgttcagtcaacagcaacgcaaagcaatgtggaaaaggcagactctaataatctgtttaatactggttcaagtggtccagggaagttctacagtcctctccccaatgaccagttactaaaaacgctgactgaaaagaatagacaatggtttagtcttttgccacgaacaccctgtgatgacacttcacttactcatgccgatatgtcaactgcttctttggtgactcctcagtctcagccaccatctaagtcaccttcacctaccccagctcctcttggatcttctgctcagaatcctgttggcttaaatccatttgctttatcacctcttcaggtgaaaggtggagtatctatgatgggacttcagttttgtggatggcccactggtgtggttacttctaatattccatttacatnatctgtacctagtctaggatcggggttagggttatcagaaggaaatggtaattcattcttgacttccaatgttgcttcaagtaaaagtgaatctccagtaccacagaatgaaaaggccacttcagctcaacctgcagctgttgaagtagcaaaaccagtagattttcctagtccaaaacctattccagaagaaatgcagtttggttggtggagaattattgacccagaggacctaaaagctttgctcaaagtgctgcatctcagaggaataagagaaaaggcattacaaaaacaaattcagaaacatttggattatattactcaagcctgcctcaagaataaggatgttgctattattgaactgaatgaaaatgaagaaaaccaagtaactcgagatattgtggagaactggtcagtagaagaacaagcaatggaaatggatttgagtgtccttcaacaggtagaagatctagaaaggagagttgcatcagcaagtttgcaagtgaagggttggatgtgtccagagcctgcatcagaaagggaggacttggtatattttgaacataaatcatttactaaattgtgcaaggagcatgatggagaatttactggcgaagacgaaagcagtgcacatgcactagaacggaagagtgacaaccccctagatatagctgtaaccaggctggctgatttggagcggaacattgaaagaaggtatctgaagagccccttaagtaccaccattcagatcaaactggataatgtgggcacagttactgtccctgctcctgcaccatccgttagtggtgatggtgacggaattgaagaggatattgctccagggctcagggtatggagaagggcattatcagaagctcgcagtgctgcacaggtagctctgtgcattcagcaattacagaaatcaatagcatgggaactgcttcttctttgtgatggctgtgacaaaggctgtcatacctactgccatagacccaagattacaacaatcccagatggagactggttttgtccagcttgcattgctaaggcaagtggtcaaactctaaaaatcaaaaaacttcatgtcaaaggaaaaaagactaatgagtcaaagaaaggcaagaaggtaactttaacaggagatactgaagatgaagactctgcatctacaagtagttcactaaaaagaggaaacaaagacctcaagaaaagaaaaatggaggaaaacacttctattaacttgtcaaaacaagaaagttttacttcagttaagaaacctaaaagagatgactccaaggacctagctctttgcagtatgattctgactgaaatggaaactcatgaggatgcatggccttttctacttcctgtaaacttgaaacttgttcctggttataagaaagttattaagaagcctatggatttttccacaattagagagaaactaagtagtggacagtatccaaaccttgaaacctttgctctagatgtcaggcttgtttttgacaactgtgaaacatttaatgaagatgattctgatataggcagagctggccacaatatgaggaagtattttgaaaaaaagtggacagatactttcaaagtgagctgaagttataataatctctttatttttttccttctaaacaaggacaaatgagaccagcaatgtgaactgtatttacataaacgtgcaaggcacatacataatgactttctttttccttaagtataaaaaaaaagtatcagaagaatgataccatttttaaaggcttcattcctacaacaaccaaggccctcggttattggtttgtgtgatttatcagctaatttaggtagaacagggaagcacacccaaagaattttcaaaggaaagggtgttatagtgcaatagcaattaaaatatatcaaatcgcactgaatactcaacaccagagctctaatgtgggaaatggttctcctttccctctcaataaatatctatttttcatttttttactttgtagtttattttttagtgaatgtatttaattttatgaattatttatgattaaaccacatccagaatcttcgttttctgtgaaaaggaagaactagaaaattgctttaaatcttgaaaatacaaggaatgttttaaaatataaaacaaagccaagttaaactgtttacactgatgtgctataaaagcaccaaaaagaaactttactgtagagttacaagtacatttatatatatatgttgctgcatcacttgtgtagttaaattgtatttcaaaacagtgaaaaaattgacatgtatatactgttcattcttgtttatattaagtcttgttttaaatatgtattatgtgtatatattgtttgcagacattattgttcatgccttagaggattgtagcattttattttcgtctgaaggtaatgatagctatacagtctgtacagtaattatcctctaccaacactgtggcgtctccttaatcttggtagtgcctgcctttgaaacagggtgtaggggatattagttttccatttttctattttgttatataattttaagccaccagggcctaaattaaagtataatcatttgtatccatgtggaataaaattgtgacaatttcctacgcacacagtattttttcatagaaacatttccctcccatttgccttgcctcagaaataaatttaaaagacgtttgtaaccactgtgttttatctactgtgtgttgtggtggcctgttggaggcaaatagatcagattttttttgtacctacgtaagagtacttgaagttttatttaaaataaaatgttgtggaaaaggtagcattctttttttaggagtgttatttttcactatgtgtggcacggatacaataaaagacttttacaaactaa
